United States Patent Application Publication US 2026/0092266 A1 - sequence listing, part 24

SEQ ID NO: 3946 - DNA, 14853 bp, synthetic construct
  source 1..14853: mol_type = other DNA
  misc_feature 1..14853: note = Synthetic
cgacgatttttggcacaagattagtcagcgaacaacctaccgggtcacggttgaccgcgacgtgttgatcggtcgtgcagtcaaggaactcaaggctgcgcctaagatcgagccgctgcggatccaagttacccgcgctggaatcaaactacgccgcggtggcaccaagggtgaggagctcggtactcgctcagcagacctacgtggcagttacgacttgccggacatcattgcagaactgcaatcagcgactaatctgactcgcaagacgatcatcgatatcctgactcgtagtggtcgactttccgagttcatcgccaaccccaatgacttcattgcccaggtcaaacgcattctgcaaacagaactgcgcaccattttggtcgatggggtccagtacgagaggatcgcgggatcagtatacgaattgcgtgagttgcaagaacacgggctggaggagaaagagcggtttcttgaccagatgtatcaggtgcagaacacgcacaagactgactttgactatgtcctattcgattccgatgtggaacgccagtttgcggaattactcgacacccgcgaagacgtcaaactgttcatgaaactccccgccaggttcaagattgacaccccggttggtcgatacaaccctgactgggcgatcatcaaacaggaggatggggaagacagggtctacatgattcgtgagaccaaggggacgctcgacgaatcaaagttgcgtccaattgagcgcgcgaaggtccgttctgcgaggcagcatttcaaggctctagaaatcgatgattatgcgctggctgcgccgggaaactggaacctttagccgtcccaaggattgatgatttctacgtcggctccttcgaagtcgcgagtgtttcttgtagccaccgcataaccgtgcgcgcggcatattgaaacaatcatcgtgtcttccacgctcactgaatgtcccgttgcttcccgatttgatcgaatgtctgcatagtgtcgggccgcggcgtcgtcaaatggcaagagccgggttctggctccttgaagagtccgttcaatttgaacggtgatggaatcacgccgttttccttgaggcagccgtctagcgccgtggaatagttcagcgatactgatcgatgtgatggcgatctcggagtcgttatcgagtagccattgaatgacccgagggtttggcagtgccttcagtggttcagaaagcacgttggtgtcgacgacgatcacgacagatccacttcacgcgcgacagaacgtgctggtaactcgaaatcgccgcgcagactttcagtgccgctgatccattcagccatcaatccgcgacgagggttgacggctgactcgaggattgctcgggcttcagcttccatcgagcgattactgttcgcagcgcgcaccttgagcgctttacgagtttcctcgggaagacctcggatagtaattgttgccatgaggatcaccacctttgacgacgatgctgtcaatgctagcatcgtcaatcacgtgcttccggcgcaaatgctgcttgttgcactctgccgtcatacgcgtcgtatgcggtctcttgcagattgacccgcaaccaatcgccgggatgctcgtcgtctgggatctccatccccagcagtgagcagatctgctgcaacagagcctcatcgccgtgggcatcatagattacagagatgtccaccggcagttccggcaaaagcgtgagggaaagctcgtcgcctttaagtgggaacgagaggaataaggtttcccctgcccaacgctcgtactcgaacccgagcacgtaccatcgccgcccgtcgatcacatcggtgttcacccacgacagattcacttcgaatggcgaccatccgtcaaaccagtggaagaacacttcgtaaagatcggcatgtaggcaggtctcccacatcgagcgcaagatggttcgcagcggccgggccgccgcagtgtcaccgaagccgcgcgttgacatcaacaggccaccgccatattgaaatccacgcggcaatggcggagcgtcatcggcactgtggaagtgtcgttcgacacggtgtactcgatccgcatgcagtgattgtggatggtcagtgatcaaagtggtgatatgggtcaactcgtacaacctgtgaaacgtcgccgtctcgtcggtcgcagttgcaggcgcaactgcggctggcgtatcgaaatagcaccgtaggtcgatccaatgaccggtggatagttcgatacgtaacgcgcattcgttgggcgaggtcggatcagtgacttcgagcgcatggcccgacacccgcagggcgcgaagcacatcacgcaacattcgagccgccggactgagcgttccttgcacgtcgaaatgccagaactcgcgacgcggatcgtcgtagtcggggtcactcctgacctgtcgttctaagccccgtcgaagaggagtctcgtacatcgcctgcatcgttgacccgcggcggacagcgggctcggcatactgtgcgtgggtgacctcgtcggacgagttgccctgcgcatggccggaactgtcgatgaatcgtgcgggagccagcgggcggccatcgtccgccaatgtggccaacgcgttaaacaccacatcgatattctgaaaaccacccggatatgaacgcaccgagatgagatgggcgagtgagcgacgtgccttttgaagctcagcggtccagtcgggccgcaatggtatcccgccaagctcctgttcgtgtcgctcgtggttgtcgccccacgagcgtattgtgtacccgggccagttcctgcgaaaatcttccgcgatgtcgtactgcccgaagtgggaccaccacgagacttccttagtgttcgcgtcgatatgcacgccttcgaaggcctggcgcatctcgtccgatgaatcgatgccgaggtccgcgccccaaccgtcaccggccagtcggcttcggtaggcgctccgggcaaacctgagaacagacttcggcgtcgaataggcaacctgctctagcgatacgtccgcacgccaacacactaagtgattgccgaaatggaccgagatgggcgggttctcgtaaccgtccctcgtgggccaggccccgccgaatgttgagtagtccgttggtgcaggtcgttccaatcgggggttggggaccggcgggaggtcaatgccaagcacctccggtatgccgagcgaagtctcgggtgcccactgtgcggtccaacctggccaggagcgttccaacacatagttggcgagccgtggcggccccggaccgtcctctccgttgaaccaggtcaaggtcttacgagtctggtcgatcgcaagcacggcttcagcccacccaatcacccctgccgcaacggtggatgtcccctcgaaactccatgactcgcgtacccgtgccaacgtgctgttttggccgtccaatgcggcatcccaggacaggtaatgtgacgcgtcccgatcgaaatagatccgcgtggcggactcgtccttgatggctacaactgcgggatgactcatctcgacctccttgtgcccacgacgttaagttgaccgtctgacattcgttgtgggtggtgatcggcgcacagacacccgcgatatcatgtgatatcttcgagttatggaggtggacgatgcctgatctacttattcgtgatttccctgctgcggaacttgcgctcattgatgctcaagcacgccgacttggcttatcgcgcaccgagttcctgcgacggcagttacagcaaactgcgcgcagtcttgacgccgcggtgacaaaaatcgaccttgtgcgcgccagtgaactggcctgtgatctagtcgatgccgaaatcatgtctgaggcatggtcatgactgtaaagtggctgatcgacaaatccgcatttgcgcggcttggaatggcaatcgacgccgaacgatgggcagggaacatccagcgcggactcgttgcgatctcgaccgtgactcgccttgagattggattctcagcacggtcaagtaccgagtttgaaacgctattcgaccagccaccactgcaatacatgcctatcgagtacctcaccccggctattgaggaccgcgcacttgccatacaacggcacctcgctacccgcggccaacaccgggcgccttcaatccccgatctgcttatcgccgcgactgccgaactgactggccgtcaggtcttgcatatggacaaagatttcgacctcatcgcaaatctgacgaggcagccaatgtcgaaattggaggttacttcgaactgagactggaaaccgcctaccgaacccgcatcaccacggcgggtgctcgcttcgccttgatggtgctcgtcccacggtaacggaccttcaccttgactttgccccgtgtggtcagccgaggcgacttgacccgggctcggccgttcttcaatttcccaaccacacgtttcttgccgaaacgtaccgcgactttccccttggcgggctttccggcagaccccacgcgaacagtgaccacagtgcgcttaccctggcgcaccttcttcttcgcaaccttgacccggatcttcgcggttcgcttcttcgcggtgttcttggtcgcagatttggtttcgggcttggctccggacggggtggtttcgttttcgcagggcccacctggagtcggattgcctggaactggccctatgggcaccgaggtcaacgagactttcgcagccccatatttgtagccggtcacccgaaccgcaatcgaacaaccggcatcggtatcctgcacggtgtaactcgtaccggttgccccagaaatactcgtcgtgccgcgcagccattggtaactcagcaccacgaactcgtcccactggcccggaacggccgtcaacgtggcgccgacagcgggactgccggaaatgatcggcgtagtcgaactcgtcaatgaacccagcggttttgggtttgcgtccggattgacccccggcgaatattgcgcgaagttctgcgtccaatacggggttgtgccgcgtaacgcgtaaccaacgccaaggtgtgtgtacgacggctgcagaatattggcgcggtggccttctgagttcatccaggcggccaccactgaggcggcactgcgttgaccagtcgcgatattctcagcagcaccccgccaccccggaggataactgttccatgggttcgggccgtgaccccagtacccggtggcagccatgtactcagaccagtagcgcgagtaacccccgagctcgttcgaccaggtcagcgggttcaagccttcgttggtgcgttcgatgttggtgaggcgaaggacctcggcctcgaacgagttcgccgaagacgagttggcccacactgtattgctctgtttcactgttgtgactgccatggctgcgatcaatgtcaacacaatgaacagcacaaggtggcggtgagagcgggcagattgctgctgccgaaaccgcaggaccagtgtcatacggcgatcctaggaaaggctgcgccgacccgcgcgccgagattcagcgtgcgccgtgacgccagcgactttgaccaatgaggttctgcgcgaactgcacccgattgaatacgtcgcgatgttcatattcgttgttgatccagagggtatccgagtaactctgtccgttcgacgcccacactgtcacagtgacggaacccgacattcgcgggttgcgcaccagcaagaacagcagactgagcaggaagaaccagacgaagatgaccgccaaggcgatggcccacccaggggtgtaggtcgagatttgagtattgtcctgggtgctgatgttgatgtctgccgttgaccatgttccgacgggggtcgtaacctgttcgccaccgacatgaatgttgccgattgagacgagtgtcggctgtgtcgggtctggtcccgggacgatagaactcatgaagccgattctagggtgcatgctcgtggtgacctaggggcgtggaatgttgtcgcagacgctcagtaggtgaaccgctcgggaagaaacatcggcaacatgcatgcgattgctatcagaatgaatggaatcaccgcaaatatcactagccgaagatggcgcctgtaagccttgaagtatggggtagtgcctgaccgcactttttatcgatgtgttgatatcatagaacaaactgatatcagtactggggtgagcggattgtccaacaccaatgagtttgagcagattcttgtacgtcgtctgccgcttggaaccaaacaggcgctgcgagacttggcacgcagtcacgggcgcagttcagtcgaggacgagttacgtcatatcatcgccgaagccaccggtggtcgcgacgaaacccctggtgggccactgattgactttatatacagtgcccaggatttccgccgtgaacgcggtggttttgagtttgaatcgtcaacagcgccccgccgtgatgaggatctttttgcatgattctcctcgataccaatgtgatctcagagccgctacgcccacatcctgatccacggatcgtggcctggctggccgcgattgcgcaaccggccatcagcgtgatcagcattcaggaactcaccttcggcgtggcacacttaccggtcgggaaacgtaagagtgaacttgcgattctcgtagacgaggccatctcgtgcttcccgactgtcctgccatttgatgaagccgcgagtcggtgtgccggtgaacttttggcgcttcagggcagagcgcaggccggtaactcagctatccaggacgtacagattgcggctattgccaagacttcaggtgttccgctggcgacgcgcaatatcaaagacttccggaccctcctacccgcacggatgctgatcaacccttggaacggcggaccatctcgttgatccagatcggggcgaacggagatgtgcagtttggcggtgtcggatagtccttgagcacttcgaggcgctcgccgatgtcgagagcgcgggcgcgcaatgccgcgtgttcaatcccgatggtcgccaagcaggtgttcatggcccactgcagccggtcgggagcgtccttcatctgcgtctcgataatgtccagcagacccggcaggtccagtccgtccggcttcttggcgacacggtcactcgtcaatgcccaaccagcgctggcaacgaccgggtcatcatcagcgaaccagagttgtcgcagttcctcggcatgcgggctcttcttgacgacgtaattgaccagccagtcgtgcactttgggaacccgggagtctcgcagcatcgcatccagctcgtccatgctgaatgccttgggacggcaggtcagtaaagcgacgagtcgcgccgcggtgtctccggtctgccacaggtcgcgggccaactcgtgatttgtcctggctgccttggccactgcgcgcaatttagtgaggttgacgccgtgaccgtcaccgtgtttctcgttgacggcacggattttggggtcttcgagggcggcgagttcggccatgacctcgccgacggtggcaggctgggtagtagtcatttttcctcgatttcgtggcggcgcagagaagcaaggttaccggtcaccaggacgagcgctcccaagctgtgggggagaactcgtcctctttctgtaacgcacggacttggcgccgcatattgatgccgcgacggatcttatagaacccgaagatggcgacgcctatccagataccgaatggagccagcgggtttgatgagtcgctggtgtcggcgttacctagtggtgggtcgggttcaagtagggtagcgatgaaacccactacggctagagcacagacaagccatgccgctatgccgaagacaatactgttgcgaccttggcgcagagcgcgacgttgtgatcgtctcacattgggggtggaggcgtcggcatcgggcacgatgagtggtttgacggcccccagcccactttctgagaagtctgtcctgccaggccggtatgtctgataccgcgctccgttggggaagcacggcggaaccatgatcaggccttcttggatgctcagggccgcggcgaccgcgcgcactcgtgcctcaatgtcgatatagggcaggtgctgttggatggtgagaaattgggcgatacgagggtcgtccgggtctggattctcagagtgccagggtgcgttgagcagggttgttgcggccgcgatgagatgaccagctggtgagttgatttcgatatccgggcagatcctttcaggcggggtaatggggacgagcaagacattggcagggttcccgtccgtgactgagaactcggccgccccaagatcacggtggaaggcgatgaagggatgggtgcgttcttgcggcttggtgaggcggtcgacgcgcgaatggggttccgatgcgatggcgaggatgcggccggctttacgggtgacatggatatcagtttctgccgctgtggcaaagatttcggcggtctcgctgatctcgccttgatcggcccaagtccatgccgaggtcacgggacgatgcatctgtgtcgtgaactgcgcgaactcgcgtgcccattgaaccgccgggtgggtcttacgctgcacgaagggaagcctgtgccgcgcctgcatgttaagcggaatgatgccgccatcgggcaggacgacagtgttgctgtcaaccacgatgggtgcgtctcgttggtaggcgagtgctgtgactgtgtgcacgatgtcggacccgtgtagcaggtcacccgctgaattggaagccaagcagcgatacgatgcatcaactgcaatgatcattcggtccattcgtggtaggccgatttcagtgccgtcgctgatcagagcgatgagaccacgtgtgttggcgaagagcgcgagatcattgacgagcgatgttccagggtctttagggactgagagaacgagcaaatctgtctcgccgagcacctcgcgtgcctcgggtacggaaagttgcggcagccgatcccacatccaagtcatggactcagcatgtcattgcgcggtcggtggtgtcacggggatttggtgcgtgattgcgggtcgggcgcaacttcggagtcgagcgcggagcgcagatctgtgtgcgtgaagtcgtcgccgacgtagagcagggtgtcatgttccgctgaggccagagcgtaactgtatgtatcgccaagattgagtttggctcgatgcccgctaccgcgcccaaaatcacgataggccgcacgagcaatctcagcatgctctgtgttgaacggaaccacctcaattccataggcatcaaggagcgaatcaataagacggcgttgttcgggggtcgtgcgcgaatcgatgacgatgtgtaactcaacaagggtcgctgctgaaatccgagtgcgcgaagttcggcggagaacctgatcaatagcggcagcctcaggctctcgttggatgagagccacgattgctgaggtgtcaacgatcatcgaggtaaccctgattcgtcgtaaaggtcttgttcggcgtcgtgcagaccttcaagttcgaacgcccacaccgagttgaggaggagatcgatggcggtgtcgcggggcattgcgctcgagcctgcttcttctttgatttcggcgagtcgacgagagaccgcgtcttcgacgacgctgcgttgtgattgtcccgtcagcgcagcaagttcacgcaccagcgcgtgggtgcgctcgtccttaatgttcaggctcataaagtaattctacctatagatccacctttctaccatttcggagaggaaactctacgaggcacgacccccgctacacgggccttcaactgagtctcgtcggtctcttgacatgcgaaaacaattgggtactgtaggtctcgaactgattctcagtaagggccgactcgttagcggtcaagaatgctccatccggtgggcatcggcatcgagccgatgccgccggatacttttataagtgcgatgaagcacgggaggtctgggaaggatgactgagcagatccgttaccgcatcggaatcgatgttggtctgtactccgtgggattcgctgcggtcgaggttgacgatcaagggtaccctcgacgcctattgaaggcacaggtacaccagcacgacgcaggcgttgacccgcttcagggcaagaccgccaaaacccgcttggcggagtcgggcgtcgctcgtcgtgtccgccgactcatccaacgccgacgcaagcggttggcggcgctggaccggatgatagtttcgcagggctggccgctagtatcgctagagaacgagcccgatgcgtggctgccgtggaaggtccgggcgcgactcgtgtcggagaaaatcgcagaccaggacgagttaggtcgtagcctatccatcgcgctcagacacatggcacgccaccgtggatggcgaaacccatggacctcggtcgcttcgttgagtgcaaccaatgaaccctcagagttcttgattaacttccgcgaacgagttgcatccgtcaccggcaaagatttgccgatagatgtgacccctgctgagctcgtcatgattgccaaaaccggccccagtttgaaacttcgtggtgaaggcggtctgattggcggcaaacttcaccaatctgataatgccaatgaactgcgagcagtcgcacggcggcagggtctttctgatgacctgttccagacattgctagaagcagtgttcgaggcgaagtccccgcggggtgccagcgcaaaacttgtcggtaaggacgtgctgccagggcgcgagagcgagcctcgagcggctaagtcaacacttgcgtttcagcgttaccgtatagcggcattgatcgggaatatgcggatcgaagaatcaagcaaggccaaacgagtcctcacagtcgcggaacgccgcgaagtcatggactacctggacacgactgacgagcagcctagctgggccgacgtggctgaactgctgggtatttcgaggcgagcgctcaagggcgtcgcgcaatcggatctcgaagccgaccttgtcgcgactcgtcccgcggtcaacgtcaccgaccagactttacggaagatcaagataaagtcgatcaagcagtggtgggaaaacgcaaatgacgacgagcgggaagctctcgtgcgtgccctgtcgaatagcggcgtcatctctgaggactcggctccggatctagcagcgaccgaactgattgagtcactgccggaggaggacctggccaaactcgatgggctgcatcttcctgctgggcgggcggcctactcagaacggtcgctgcgagaaatcactgaacagatcatgcagtccgaagatgatttgcatgcggcgcgcaagcggttgtttggcgttgacgataagtggcggccaccggttgaaccaatcggtgaacgggttggaaaccccgctgtcgaccgggtgctgagaatcgttgcccgatggcttgaggccgcggaacgcgagtggggcgcgccggagagcatcaatgttgagcacgtgcgtgaggcgttgggaagcgtcgctgctgcgcgtgatcttgtacggcaaaacgaaaagcgctatgaacagcgcagacgtgagatggccgagatcagagaaaagcacagcatcgacggcgaagttagacaatctgacgtccgcaggtaccaagctgtgatccggcagaacagtcaatgcttgtactgcgggacgggcataaagctgcacactgccgagatggatcacattgtgccgcgtgctggaacgggcagtacgaacactcgaacgaatctggtggctgtgtgccgtgactgcaatgcagataaatcaaacaccttattctcggtgtgggctgctaagacgaaacgaccagaagtcagccttgagggggcgttgcagcgggtcaatgcgttcctgagtgagtcgggtgtgagtgctcgtgagaacaagaagttccagtctgaggtcaagcgtcggttgaaagccactgaactcgatgaccctgttgacgccaggagcattgagtccgtggcgtggatggccaatcaactgcaccttcgcattgccggtcacttccatcacgcgggaacagaagtgcgggtcttccggggtcagattactgcttgggcgcggaaggcttctgggatcgaagggcggatcgagttcattggtggacgaggtaaaacccgcctggaccgccgacaccacgccgttgatgcagccgttaccgcgatgatgagacattctgtggctcagacgcttgctgaacgtgacagcctacgtatcgagcagtggagtacgacggataccggcacttggaagcaatatcgtgggggtgatcctgctgctcaggtactttttgatcgctggcgctctcagatggaggctctggtagacctgctcaacgaagcgttgcgtgaagatcggatccctattacggagaacctacgacttcggttgggcagttctgcggcacatgatgacacgatcaggaaactggatatgcgtcaggttggtgatgaactctcagtcgcagtgatcgatcgagcaagcacaccggcgttgtggtgtgctctgacccgacaccccgacttctcgccgacggatggcctaccggctgatccagaacgacggatcagacttcagtgtgagtggttggatagcggcgaaaagattgggttcttctcttctgacgccgctgcggcgtcgatcttggtgcggggtggttcagctgatatcgggaatacgatccaccatgcgcgagtgtatcgagtttcgaacggtaagcgttcgttctatgcgatgctccgggtattccaggtcgatttagtgcggcatcaaagcagcgaccttttcagcgtcgaattgccaccgcaatcgataagtgtccgaacgtccgaaccacgtctccgcactgctctagcggaggatcgggctgagtatctcgggtggctggtcgagggagacgagttattgctcgacatgtcctcacagactaagggacagatcggcgaactattggcagactacccgggcaccgtgagatggagagtttcggggtttccccatatctctaagctacggttgcggcctcgactactagcggcagagggactacctgaccccatagcatcaactaatgattccgatgcagagcagacaagctcaggaacgcgaatgattctcgccggacaaggctggagaccgggtgtcaatgtcatctttgattcatgcgatgccgtggtgattcgccgtgacaccttaggaagagtgagactgtcttctcacgcgcatcttccggcttcatggagcgtcagaacggactgacatgcccggcggatggcgtatcctcgactgctccgcattggaaggaagaatctcctaccaacggggccaggtaaaggtgcgacctgacggcggtgaggaacgcacagttccacttgcggacgtagcagttgttttactcgggttgaaggtatcgatcggggcagcagttctacatcagtttgcgcagttcgatgttgtaacgctggtctgtaattggacaggagtgccagtatcggctgtttccccctggagtgcgcattcgagagtaggggcacgccaactggcgcaggccagcgcctcaataccgagcaagaagaacgcttggggaaatattgttcgggctaagatcgcgggtcagcaagcaaatctgaaagaactgagacgcccggctgcaaagacgttggttgatatccgcaagtcggttcggtcgggtgatccagataattgcgaagctcgtgcagccaaagcgtactggccgcaactatttggggatggggaacgcttctaccgcaacccgggtgccgggtcgggacgtaatggtctgctcgactacgggtataccgtattgcgcggacacgccatccgggcggtcatggaagccggattggcacccgcactcggactcttccatcgtggtcgctctaatcctttcaacttggctgacgatctcatcgagccgttccgtcctgtggtggattggaccgttgcgcaattgcctgcggatgcttctccgaatcatccgagtgtaaagcgtgctctagtgagcgcgtcatcgcagccgtttactgaatctggatattcagcggctaccgaaatgacgaacctagctcagcagttgggccgttactttgagggtgatgtcacgaaacttcaagtgcttcagtggaacccgtccgtggtgaacgagcatgactgaggcgggtgatgaagaggtgtggaatctggtcatgttcgatttgccggttgtgacgaaatctcagcagcgtgcagcgaaccaattccgaaacatgttgttagatctcggttatgagagagtccagtactcgatctatgttcgctacctgccgatcccatcgatgggagcctccggcatcagaatgatcaaatcgaatctgccccgtggtggtgcgattcgaatgatcaacatcagtgatcatcagtggtcttcggcgttcagattcgttgacgccgaagacgtttccgtcgtcgatacgccagaggaactcacgattttctagcgttcagcagcgagaaaagcctgttcagaagggatttccccccgatagctcaagtctatcggggggaaagtgaactgatccccagctgttgaacgcaatacaggttaacccggacaagtctatcggggggaaagtgaactgatccccagctgcgcactccaagaggcatttatcccgacaagtctatcggggggaaagtgaactgatccccagccatgcgcagcgtgtagcggctggtcgcacaagtctatcggggggaaagtgaactgatccccagcacaaccaatgcgccgatgc

SEQ ID NO: 3947 - DNA, 4544 bp, synthetic construct
  source 1..4544: mol_type = other DNA
  misc_feature 1..4544: note = Synthetic
gagttcttcggcgtcgtggctggtgacgatctcgttgatcgagtgggtgcggccgatcgaaatcgggtacgggtcgacgcctgcgtcgagaaggcgttggcgcttctcacgacgcacctgcatctgttctggcaggtcgtcggtctctgtggtttcaggcgtctcgctcacgaggattgagtctagtcggcgttggtggcgtgcggggcggagtggttgcactcctcggtgtgatgccctaggctgctgccaactgattcccagtaaggcccacctcgtttgtgggtcagaatgctccacggaacggcccgacttcggttgggccgtccgtcttttcctaggcatttcgggcagttttcccgccattggtagaaaagtgtctgcccggactggcaagatccacaacatgagtgcagatgtgaaaccaaagttttgggtggggatcgacgtggggacccactcggtgggttgtgccgcgatcgagattgacgacgatggcttcccgatccagatcctcaacgccaaagttcaaatccatgattctggtgtggatcctgccaaggtcaagtcggcgaccacgcgactcgcctcctccggtgtcgctcgacgcactcgtcgtttagtgcgtcggcgtcgcaagcgtctgcaggctctcgatgcggcgctccacgagtggggctggttccccactgctgaatcttccgatccgcatttcccgtggcgcgctcgcgctcgtctcgccgatggtttcattggcaataccgaggaacgtgaccttctgttgggtgttgcgttgaggcacatggcccgacatcgcgggtggcgaaatccttgggttcgggttgaatcacttcgtgtcgagcaggatccgagcgaacaattcgaagctttccgtgaacgcgtcgaagatcgcgcgactcgctcactcgacgcagacgccaccatcggccagctcgcggtcgccgcgatcgatgccaaaccgcatcttccactccgcgccggcaaaaccaacaaggtcaggccgtcaaaagaccgtgccgaaaaagagttcagttacatcggcaacaaacttctgcagtctgacaacgcaaacgagttacttcacattgcacggattcagggcatcgatgccgagcgcacgcgcgaaatgatccagctcgtgtttgcagccgaatcacctcgcggtgcagccctcgcgctggttgggaaagacccgctccccggccagcgtcaactcccccgcgcttcaaaagccaccgatgcattccagcgctaccgcatagtttctgtcttggcaaaccttcgaatcgttggagcaaacggcgagcgcccactgactgtcgaggaacgcaaggccggattcgactacttgatcaacgtcaagacgaccgccgatccaacctgggtcgacgtggccggcgctcttggcatcgaccgcgacaaactgcgcggcacagcatcgccgaccgcggatggagaacgcgctgcagctcgcccgcccgtgcacgtcacggatcggacaatccgaaccagcaaagtcaagacgctgaaacagtggtggcccggttcggaccaggaagccaagaacgctgtgattgcggttctcgctgacgggaagttcgatgaagcctcagccggtggtgatgacgcccgcgaactcatcgagtccttaaccgatgaggaactgactgccctagacacgatcaacagcccggctggtcgtgctgcttattcagtggattcgctgaaccgcctcacccggcgaatgctcacagaagaactcgatgttcacggcgcgcgcatggctgagttcggcgttgcccccgattgggctcccccagccgaaccaattggggcgcctgttggcaaccctgcggtggatcgtgtcacgaagatcgtggcgcgctggttgcgtgcaggtgaggccgagtggggtgcgccagacaagatcgtgatcgagcacgtgcgttcggctttcgccagtgaggaacaggcacggaaactcgaatacgagatgggcaaacgctacgaacagaacttgcaacatatgcgcgagttggcggcttctgaaaacatcggcggcgttgtgcggcggtctgatttgaaccgataccaagccatcactcggcaaaatggctgctgcctctattgcggcacgggcatttcttttagcaccgccgagatggaccatattgttcctcgtgccggtatcgtcagcaccaacacgcgcaccaatcttgttgctgtgtgttccagttgcaaccgaagcaagaaagagcaactcttccctgaatgggccgagagtcatccaaacccgaacatttcactcgacgaagcgttggaacgcacacgtcattggctttccggccctggcgagacaacgaaagaccatcgtcgttttgtttctgaagttcaagcgcggttgaaaaagaccagcaaggaccctgaattcgacggccgttccatggagtctgttgcttggatggccaacgagttgcgcctgcgtatcgcttcgcatttcaaagaggccggcacgaaggtttcggtatatcgcggggcgatcacggccgaggcccgcaaggcttctggtttagaggggcgtatcccgtttatcggtggtggcggcaagacgcgcctcgaccggcggcaccacgccgttgatgctgccgtggtttcgctgctcgacgaatccgtggcacgcacgctcgccgaacgagtcaaccgccggcagagtcagcaactcacgcgtgaggccgacgattggaagacgtggacgggaagctcgcccaaagctaaggaacgatatcaacactggctcactcacatgagtgtgctggcggacttgctgaccgaggccatgcataacgacgacattccggtgatggaagatttgcgtctacggttagccaacggctctgctcacgacgacacgatccgaccactggttcgtcgcttggtgagcgacgagttgcaagtcgagttgatcgatcgtgcttcctcgccttcgttgtgggtggcgttgacgcgcgatcctgatttcgatccaaaggaggggttgcctgcaaatccggatcgtcggattcgtattaacggcacgcatcttggtcctgacgatgagatcggtttcttcggttcgggtgccgcagcgattgcggtgcgcggcggttacgccgagattggttccacgatccatcacgctcgggtttatcggatcgacggtggcaagaagcccacgttcgcgatgcttcgcgttttctctaccgacttgttggcgcatcgccacggggatctgtttacggctccgattcttccgcaatccatttcgatgcgcactgcccctccgaagttgcgtcaagccattgctgatggcaatgcagtttcgttgggttggtttgtggtcggcgacgaactcgagatcgacatgtctggcttcaagacgggccaggttggcgagttcctgcaggagtatggagatgttcggcggtggaagttggacggtttctacagtgcggacaagctgagactccggcccgcgttgatcgcaagcgagggccttcctgaacatgcttcggactccacgaagaaagtggtcgaccggccaggctggttgcctgcgctaaacgtcctaggaagttcgccgcacttcgcaaccgtacggcgagacactctcgggcggcctcgctacggctccgattcgggcttgccggtgtcgtggcaggttgagcaggagtaggcctcatgtcgcggggctggcgcgttctagacatgaccacattggttggtcgcgtcactacacgccggggccaactgttggtccagccccaagacggtgctgaggttgcggtcccggttgccgatgtagcgctggtgcttttcggccaaaaggtggcgctcggcggcggggtggttcactacctcgcccagcacgatgtgtctgccctgatgtgtgactggcgcggcgttccacttgccgggttccacgcttggtcggatcacacgcgggttggtgctcgtcagatcgcgcaagcgaacttgacgaagcctcggcagaagaacgcgtggctgcaactcatcaaggcgaagatcctgggccaagcagcaacgctcgcgctcgtggatgagctctcggccgattacctgttagatctcgcttcgcaagtgcggtcgggcgacccgaacaatctcgaggctgccgccgctcgttggtactggcggtacttgtttgctgatcgcacgttctcgcgcgaacaggacggttcagacaacacgaacgcgatgttgaactatggttacggcattttgcgcggccttgggatccgagcggccgcgggcgctggcctaacgcctgcgctcggcgtgttccattccaatcgatccaaccctttcaatttggtggaggatttgatcgaaccgttccggcccatcgtggacgcatgcgtcctgggtctacctgccgatggctctttagagcatcctgcaatcaaacaggcactggtcgctacggccacaacctcggtggatgggtctggcctcagcatgggcgc

SEQ ID NO: 3948 - DNA, 5326 bp, synthetic construct
  source 1..5326: mol_type = other DNA
  misc_feature 1..5326: note = Synthetic
acgaaacgctcacgcccccccaatcatcaatcgtcaatcatcaataatcaatccaaaggcatccccgccgcaacgccttgccgttgttgggcttacgaaattatctcccgaggaattgccgcgcccctccaatcccccttctttcccacgtaggtttccaactggcaactgcctttcaaccgcgaaggacgcgaagtgacacgaaggtttcccaccgactaccgactactggctaccaattactgcttgtccaccacgaagggcgcgaagagcgcgaagaacagcgcaagagcccccggaaaaagtgccggatccccacaatttccgctgtcagggacacaagctattgcaccggcgcccgacctccggtagaatctgcgggtggccgcgagccgcttggagaggcaataatgatgcccacagggaaatataggccaaggtttaccccattgggcgttttgtgcaaacgcccaatggggcagagcctgcggaatcccccgccgcaaggcgggggtccttgttgtgacaagcccgcaggcgcggatcagttacaatccagtctccttctagcgccgaaatgtgaattggtcaagcgaaaacttccgtttttttctggagaggaaccatgggcaactacacgctcggtcttgacattgggtcgaatagcatagggtggacactggtggatataggcgaagagcctcgccttgtggacctgggggtacgcgtgtttccagaagagggtaaaggagcaagcgtttcgaagggcggcaagacagtgcgcgtctcacaaagggggaagcgaggaatcgacaggcgggcaaggaactgcagagcacgccggttgcagagacggaaggaattgattcgcataatgacgctcgcgggattgctcccccaggattccagcaagagagaagccattttgaaggacgcatctgttgatgagaaagaccggccactctgggcctacaaactgcgtgccgagggactggaacgaatgctgaccctattcgagtttggaagggccatcatgcacttggccaagaggaggggctatcagacgaacaggaagggtggtgatccgacagaggataagtctgtgggacaggaagcccaagagttgcttctcgagattgaccagtctgatagcgggactctcggtagatatctttacagggcagcaactggagagatcaaggatgtgtccggttttgttgaaggcaggataaggaaccggcgcaccttccgagagatgtacaaggatgagttcgacaggctgtgggaacaccagagggagtactatcgatcggtcctgatcgacgaactcaaaggggaaatctggaacgccattttctatcaaaggcccccgaggtatagagagccaggaccttgcgatcttgatgggcaacccaggtgccttagggcctgctggacagcgagacagttcgtcctctggcagaaggtgaacaattttagaatagaggcaccatacagggagccgcagaccctgtcagacgttcagcgtgcaattctccatgggctgctaagcacaaatgccaaagtcaagttcgcgaacctgcgaaaggaactggagttggcggacgggagtacgttcaacttcgaggagggaggaaagaagaagaccacgtcaggcgatgaattcctgtgtgatatacgcaagcaggttggcgcgagcgtctgggacgccatgggagaggagaaacagaaacgtctcgtcgacctgcttgcgcaagaagacgatgagacgctgatcacgcaagtactcacaggagacgactatcaactagacgctcagaaggcgaaatccctcctgaaggtatatgtacctgaaggaaggtcgagtctctccgaagatgcgctatgcaagattcttccccaggtcaaggatggaaagaggaccgatgaggcaattcgccttgtctacggtactggagccggggcagcgggagcggtctgtgacaggctcgcgcgcgtcgaggctatcgagaatcacgtggtaatgaaagccatgtgcgagctgagagaggtcgtaaacgccctgctcaacatctacggcaagccaaaacgcatcaaggtcgagatggcaagggatctgaataaatctcgcgaagaaaaagacagaataagccgggagatcaagaaaaatacgcagagaaatgacgaggtcaaagagaggctgagggatctagagagggagtacggtctacgaatacctcccaaggcagcgagtatcgtcaaatacaggctgtggacggagacgaaccagacctgcatttactgcgggcgaagaattcacccaaccaaattgtttggagaccactccgactgcgaggttgagcacatactgccacggaagaggagtctgcaaccctatgactacaacaacaagacgctctgccatgtggcatgcaaccaactgaaagacaactgcacgccctttgaagcgtacaaggatagaccggaagaataccgcagactcctgaagcgggtgtttgcgtcggacatgcctaaggcgaagaaacttcggttcgttagggagactctggaccttgacgacagtgtggaacggaatatcaatgacacaagatatgtcacgcgtcgcgccctgagctaccttcagacgcttggtgccgacgtcttcggaacgcgaggcatggcgacggacttgatgcgcaaggagtccagtttcgagaccctgcttgagccgatggctattggcaagaaacacgaggacaacaggaaccatgccgttgatgctgtcgttgtcgccctcacaacgccggatttgttgagggacatcgcgcgaggatatgaccgcactggtgagttcaatctggctcggtcgtgggctggtatgaggaagcaactggaggagagactcccagaggtcaaggtgtcctatagaccgagatacagaatatccgattatctgcacaaggagatggcctttgggcttacacccgaggccagacaggcgttttcggagggacggatggaacaactcagcaagcacgcttggatttcacgtgagaagttgccctacatcatcagcaaggacgtgaccgacctcattaaaaccgttggagatgtccaagcaaacctgcccgctgaggcaggaaacatcaaagaggcgattcttgcagaagcagccagaaaaggggtcgatgtccatgacgcgaacgcaacaatcccttgggatgagattgattcggaccatgatgacgaacttgactccgcaccgcgcaagagggccaagctctacctcaagagcaaagatgggagaagaatccctgtgtggaagatacgagtcagagagccacacagtaacatgctcattgtgacgaatcaagagggcgaaccctacaaaggatacgtgctggaaaacaatcaccacatagaagtagcagagtttacagatcctcagggaacacgggaacgaaggggtacaatcgtcacacagttggaggcagcgagacgttgggcggaccgtaagccagtggtccgtaccgattacacagcggaagggggccaatttctctactctctcgcgcggaacgaaatgttcatggtccaatttgaagacggtactgaactcctccacagggtggagaagattagcggctccactatagtgttgcgtcctcacacgtatgggggagtatgcaaagggtctgaccaaccccctcttgtcttgcgacgaggtcccaatacactccgagggcataaggttctcgtcgactgcatcgggcgagttcgtccggtgccgagtctggcaggaagtgacacgttgtgaaagtggctagccgatattgccgatagcttccgtggaaataccgtggataatgaagcgggggcgcggcaatgattaagcgtatcgtcgagatatcgtcggcacggacgcatttatcggtccggtacgggcagttggtcatcaaggagggtggcaacgagctttcgcagattccctgcgaggatatcggcgtcctcctgatcgatcaccaggggaccagctatacgcactccgtcttcacggagttattggacaatggggcggcgattgtcctgtgcggggggaatcatcatccagcaggaatgctcctgccactcgaaagcaatagcgagcagggcgagcgattccgaactcagatcgaggcgaaagagcctgtcaaaaagcggctttggaaacaactcgtccagacgaagattcagcatcaggccaggatcgtcggcaaaggcaccgagacgtatgccgcactcatggtgttacggcagagggtccgctccggcgatccgcagaacgtcgaggcgcaggccagccgtaagttctgggcgtcgtacctgcaaggcatcgaatttcggcgcgctgtggatggggctccgcctaacaatctgctcaattacggctacacggtaatgcgtgcggcggtggcacgcgcgctatgctcggccggactgctcccctgcctcggcgttcaccactgcaaccgctacaacgcttttgccctggccgacgacgtggtggagccgtttcgcggatttgtggagtcgaaagttaaggaaatctgcgaaggcaacgccgtccccgacggattgacgcaggacttgaaggcaaagctcctggaagtgctctatcaaccggtcattatcgggggctatgaagggcccctgatggtcggactgcaccgcacggccgcatcgctgcaccgctgcttcgcgggcgagcaggagcaactggagctgccggagctatgattctcagtgggtatcgagccgtgtggattttcgccatgtttgacctgccggtggacaccaaatcagcccgcaaagcctatgcagatttccggaaaagcctcttgaaagacggcttcaccatgctacaatattccgtgtacgttcggcactgtgcgagtgaagaaaatgccgatgtccattacaatcggatcaacaatttcttgcccgacgatggtgaagttcgcctcatcaccatcaccgacaagcagttcgggcgcatgcaaactcactggggaaaaatgcgaaaaccacccccgccgacaccccgacagctcgaattattctaattcagccgtttcgcaaacccttgaacatcaagggtttgcgaaacagccaattgtaactgatccgcccctgagggcaagccacaacaaagtaacggaggtttcggagcttaaattattgtaactgatccgcccctgagggcaagccacaacagagaagctggtggaaccttgtttgctggcattgtaactgatccgcccctgagggcaagccacaactaccccgg

SEQ ID NO: 3949 - DNA, 4168 bp, synthetic construct
  source 1..4168: mol_type = other DNA
  misc_feature 1..4168: note = Synthetic
gctggaaattcattatactccgaaacatggtagttggctgaacattgccgaaacagaactaagtgtgttaagccgacaatgtcttgatcagcgaattgaaagcatcgagcggctggagtcggaatgtagtgcgtggaatgtggaacgaaatgaactacaaaagggtgttgattggcagttcaccaccgctgatgcgagaataaagctcaagcgactctacccacaaatacaatattgacagactactagatggacaaccaaaagcattgagagcgtgttggaaagcacgacagttttcactttggcagaagataaacaaccttcggacggagaagagatttgaggaaccagaagtattgggcaacaaacatcgcacaaagatttacgagttgctgagtacgaagaaaaaggtgtctttcgatacactccgttcggaacttggtttaagtgatgatgtaacgttcaactttgaagaagaggggaaaaagaaaaatatcggaggagacgagttgttgtgcgatgtaagaaaagctgtaggcgaaaaatggtgggatagattgaaagaagaagatagagaatttataatcgacctgatcgtcaaggaagaggatgacaaaaggattattgattccataaatggtaaatatatagcggaggataacaaggcacaagatttgttgaaagtgcatattccagaagggagagcagcattttcggaagacgctttaggaaaactgctgccctatgtcaaggatggtaagcggacagatgaggcaattgacttagcatatccacctgagaaccaaataacaaaagatgcctgcgatgaacttccagccattgctccaattgagaaccatgtggttatgaaagcaatgtgtgagctgagcaagctcgtaaactgcattttgtcaaagtatgggaaacctcgcgacataaagattgagatgggaagagacctgaacaagtcaaaaggtgaaaaagagaggatcagccgagagataaagaaaaacaccgagagaaatgatagggtcagagaagaattaaaagatttagaaagggaatacaacctgcaaattccggggaggcgagaaaacatagtgaggtaccggttgtggaaagaaacaggcggaacctgtgtttactgcgggacaatgatacatcccacaagactctttggcatgtatcctgattgcgaggtggagcacatacttcccaagaaaagaagcctgcaaacaaaggaatacaataatctgacgctttgccatgtcaagtgtaaccacctaaaagataaccaaatgcctttcgaggcatatgccgacaatcccgaggtataccaacatttattgaacagagtattcaaatcggatatgccgagggcaaagaaattacgctttataaggaagacactcgaactcgaggggtcggttaagagatttctcaatgacgccaggtatattacgaggcaggctcaagcacatttgcgcaagttaggtgtcaaggttttcggaaccaaaggaatagccaccgctttgctgcgagagcaagcaggatttgaaacgctacttgaaagtatggcgattgggaagaaacatgaagataatagaaaccactgtatagacgcggttgttgtcgccatgactacccctgatttacttagggatttggcgcgtgggtgggaaccaaaccccgcatttggcttggccgagaagtgggggagtctgagatcgcaaattgctgagaggctgccgagaatatctgtttcgtatcgtccacgtcacaggatttcagatttttttcacaaagcgactgcatatgccctaacagaagaagttaaaaaagtattcaaggcgggaagagtagaaagagtcggtgagcgtgcgtggctctgccgagataaactggcgtatatcacaacaaaagacatcagtgatgtggtaaaaactgtgggagatattgaaacagaggtgccgcaaagtgcatccaatataaaaaccgctattcgcgagcggctaaaaggcctaaatatagatattacaaacaatgacaccgaaataccatggggcaaaatggtgagtgaagaagaaaaaaaagacgccggttttgcgggagataacaccataaggttgcttctcaataacagaaacggcaaaaagattcctgtcaggaagattaggatcaaggagccacacagttatatggttctgatgggcggcaaaaatggtgaaccatacaaagcatatccatcagaaaacaaccatcatatagaaatcgttgaatacgggaagaacgaaacaaggggagttattgttccacaaattgaagctgcaagacgttgggctgagaaacaaccgatagtgcaaacaaagcacgataaaggaaaatttctttactcactatctcgtaatgatatgtttatggttcagttcgatgacggaaaagaaatactgcaccgggttgagaaaatgagcgaatcattgataatccttcgtcctcacacgtacgggggagtatgcaaagattcggataaagaacccttggttctaaggaaggggccaaatactttgaagggttacaaagtccgggtagaccggctaggggggattcatcacacgaatgactgagcggaagccgtttttgtagggaaagttggcatgtccttttgccgatataaggggtagtgtcgagagattgccacccgttcgactgtgctcagggcaggctgcctcgcaatgacaagacggacggagaatgatcaagcgtattgtcgagatatcgtctgcaaggacgcatctatcgatgaggtacggacagcttgtaatccgggagaatgggaacgagctttcgcggataccctgcgaagatatcggggtgctgcttgtggatcatcaggggacgagctatacgcactgcgtattcacggagcttcttgcaaagggggcggcggtggtcttgtgcggaagggaccatcacccggcggggatgctcctgcccatcgaaagcagcagtctgcaaacggagagataccgcgtgcagatagaggccaaagagccgattaaaaagagactgtggcggcagatagtgcgcgcgaagatacggcatcaggcgaagatagtcgggccggggagcgatgcctataaacccctaatggcactgcgccagcgggttcgcagcggggatccggagaatatcgaggctcaggcaagcaagaagtattgggcggcgtatttgcaggatgtaacagattcctcgactgcgctcggaatgacaaaaactgcgctcggaatgacaaccagcacgctttcagagatgacatttcggcgggatgtcaacggggcgccgccgaacaatatgctgaactacggatatatggtgatgcgcgcggcggttgcgcgggcactgtgctcggcggggctgctgccttctctggggatacatcatcgcaaccggtacaacgcattttgcttagccgatgatatggttgagccgtttcgcggttttgtcgaggcgaaggtcaaagagatatgccaggcagagggcgcgccggacgagcttgaccagcaaattaaagcaaagctgttggaggtattgtacgaggaggtgcaaataggcggatacaaaggtcccttgatggttgggctgcatcggacaatggcgagcctccagaggtgctttgcgagggagcaaagggagctggatttaccggaggtttagatggacgttttcaaatagattcctcgacttcgccccttggcggggcttcgctcggaatgacacacaatgttgttgagcgggtatagagcggtgtggatatttgcgatgtttgacttgccgaccgatacaaagcaggcccgaaaagactatacccattttcgcaaaaatctcttgcgagacggctttactatgctacaatattccgtgtacgttaggcattgtgcgagtgaggaaaatgcagatgttcactacagcagggttaagggggttttgccgccggacggcgaggttcggctggttaccattacggataagcagtttggccggatggagagtttttgggggaaaatgcgaaaacccgcctctccagcaccccggcaactcgaattattttaacgcgagccgtggggcaggccctgggtagccagggggtggggacgggcgcgagttagag

SEQ ID NO: 3950 - DNA, 14740 bp, synthetic construct
  source 1..14740: mol_type = other DNA
  misc_feature 1..14740: note = Synthetic
cggaacgcgggcacccattcgatgagcgtgtcctcaataccggggaaggcctccagcaactctcctactttggtttgtggtgtgatgtcgaggttcatcaggtgtctccggttggatcgttggaaggctaaccgtgcgaggggtagccgttcgattcgtgcggatgagactgcgcggctgacgcggcggccgtgggcggcggtgcgtattcgagcagacgccgttcgccttcaagggcgcgaatctggctgacgtcctgcgtcacctcgagcgtgcccaagtagttctgatccttgtcccggacggcaaaataccgcacgtgcacaaagcggccgtggaagttgatccagaactcggccacgctctgtcggtgagcccgaaaatcatcgacaatccggtcgacgatatggacgctcttgggcgggtggcagtgctgcaccttgcgcccgagaatcgcccggcttcgcgcgaacacgcggtccggcccttcggagaagaacgcgacgcgattgtcggcgtcaacgaaggtcagatccacgggcagcgtggagaaaatattgatcaactgctcaagcgaaagtgtgccggtggggagcgcaatgccttcggcggcggggagttcaacgcctggtttcaggaacggggctgccgggcgatagccttcgagcggtgcaaccaggcaccagccgtagcgaggggaagcattccagatctccgcccagtcttcatccgtgaatgtcgacaggcacatagggaagagaatgttctcttccttgtaaatcatctcggaaactgcgttgaccacgctttcccccagcgtggaagcaaccaccttccaatccagtgccgtggcgtcggtaacgctcaacgccccgcccatctccttgaggagagcgcgtacttcgtcgtccttgccccacatcaccttcgaagggccggtgatgccatgaacttcgaggcggctgaatacggcatgttccttgcgctggtaatgcttgtcaatatccatcaggtcgttgaagcactgccgccaggggagcagcgcgctcgatgcgtcggcgtcgtccggcagcgccatcacggcggaaaacactgcccgcatccgaagcagcacggcattgatcgcctgattctcccgccggaacgtatccaccggatggccgggggggagcgcgggagcgggcacttgcaccagcacttctcgagtgacctccgaatgcaggtcgcacatgctttggacttcttccaccggcatgccgtccgcgatcaactcctgttccatggcgaagatctcggagtagtctgtttctccaaccaggcatttcatttgctcgcgaacggcttcgggcgcttcgcccgcgtgcaaatgacgaatgatatgtttcagcgtctcgatacggtgggcacggttgttgatgatctcgctcaaggggaatctccttcgcacggccttgccgaccgatgcttccatcatcgccggattccggggccgcgttctgtgccaaaagtcacacgtgtccgatttaggggacttccgccgagtgctacggacgggcgcgggcggctctctgttgcaactcccgaggtgccggtgaaagaatgagtgcggttcctctgaagttccgatagtctggagaccgccgatgaaacgaagctcatttttcattgcattgtttgccttggcagcgctggcgctcgccaacggcgcaaacgcccagccggggccgcgcccggctcagaagaagcgtgtgatggcggtgggaatgacggagggtttctaccacgattccaccaccgaggcgctcgccaccatcaaacaactcggcgatgagtccggcctctgggaaacctacatctacacggatgtgagggccatcaccaaagaaaaacagaccgcgaaccgaaagaacctggatcagttcgatgccatcttcttcatgactacgggtgaacttccctttacagcggaacagaaggccgcattcctcagcttcatcaaggatgacggcaagggtttcgtgggcgcgcactgcgccaccgatacgttttacaaatggcctgaatacggcgagatgctgggcggctattttgatcatcacccctggggcacctttgacgcccccgtggtggtggaagatcctacgcacccgctcgtgaagcacctccccaaggcgatgacgctgcacgacgagatctaccagtttaaggattgggaccggaccaagctccgcgtgctgatggcactggacgcgtcgaagctcgacctgacaaagaagaacgtcaaccgggcggatcgcgatttcggtgtcacctgggtgaagaagtatggcaacggacgcgtcttctattccaccctgggccacaccatcgaaagctggcgggatccccggctgcggaagatgtggctggaggggatgcgctgggcgctgaagttgggtccggacgtgcccgtcacgcccatcccgaaaccctagcgtgcatagacgctgattcgcacatgcggaattgccgggaggtgatcccggcattttccatcctggggctactccgtcgccgaatcccgcttctttgagtggcgctgcaggaggcgctgggtgaggcttccgtgttccggggaaaactgctcgagagcaccgcggatgtaagggcggaattcctcgatccaatagtgcaggaacccggcgcggtgaatctcccgcagagtttgctcgtagtggttcagaatcggcatcgcgaacacgtgcccggttgttccggcggcaaggcgcgcggaacggccaagccagcgcagattctccggaatctggctgatggcggagaaggcgatgagcgaggatatctgaaagacagatcggttctggacgcgagcctcgtccgtaatgtcccgccagcgcgcctgcacgagttcaacggaagggcgcttgtcgtcgggaatacgcgagaattccgcgcgaacctgtcgcaactcctcgcgtaagtccgcaatattcaacggaggcgtgttgaagctctccgccaggcggccggacccttgctccaggcgtgtcagcagggtatcgacatcgtcgatcccctcggtcttctcgatcaatccatcggctgcaagcgccgccgcgatctcgcgaagaagcgccctgcccgcacctgtcacatcggcaatggcggcgaacacccacaccggggaggcccgaaatgtcagcaagccgatcgcctcgatcccgttgcccgccgtacggcgcagcagaaaatcttcgccgaggcggccctgcaccggaaagactccctttacctggccgacatcctcaatgagaaaacgtagcgtgaggtccaccatcgagcggtaaacctgggtgcgtcggatatgcgccggaagggtggtttcgcccacttcgtgaacgatccccgcgcccaatgccgttgccgagcggacgacccgctccggcagcgaaaccacatactccgccagctccgaacgcgacattttccagggaaccggcagcggaacgggaagcgtcgattcgagcttcttctcgattgtttcgcgcaatttcatgcaattccagaaatgctgaacctcttcaagtctatcagtgggatagcggcgaggcactgcgatatcctctatggcatgcgctggcccaccctgctcgccgccggtctctgcctcgtgatttccgcctatggctggctggaacccctgccgatggatcggggctcctccggtctgctgcagcaattgcgaaagctgcaaacccgcgcccgcgtcctctatatcgtggcccatccggacgacgaagacggcgctacgattgccaagctctctcgcggcatgggagcggaggtggtgctgctttcgcttacgcgcggggaatctggcgccaacctggtgactggtgacgcttttgaccgcctgggtttgttgcgcaccgtggaactgcggaagggagcgcaatggtacggcgcacggctgcgcttcacccgtgccgtcgattacggatactcgaaaacgatcgaggagtgctggagccagtgggaccagaacgagatcgtgcgcgacgtggtgcgggtgattcgcgaggagcagccgcatgtggtgatcgcacgctggcaaggcaccgcccgcgacggccacggcaaccacaccgcggccggtattgtctcgcccatcgcataccgcgcggcggcggatccgcaacagtatccggagcagatcaaggccggcctcagcgcgtggcgcgcctggaagcactactccgataaccgcgcggagcgcgacccgtggacccatcaatcccggaccggcatctacgatcccatccttggcatgagctacgcgcaggcaggccgcgaagggctgcgccagcagcgatcgcagagcgccggtgctgccatcctggggccgggcgaggttagcacttactatctgcggaccgatccgccggccacggaaggcgagaaggaagagagcttcttcgcgaacatggatgtgtcgctcgggagttatcccgcgctcgaagcgccactggccgaagccatgcgtgcgtttgatgcgcagcatccggagaaagtggcgcccttgctggccagcgctctcgggattgtgcggcgcttgcgccgggaaagcgatgcccgcgatcttcaggtgaaggaagcgcagatcggagaagcactgcgcctcgccctgggcgtcgaagcggaagcgcttgtgcaaccggcgaacgccccgtccgggccgatggccgcgttcctgccgtcttccacttttcaggtggcggttcccgggcagagcttcgaggtgcgggtgaactatacgccccgcctgtcaaacgaagcgcgtcttcgagacattacgctcgacgcccccgccggctggacggtggacgctctgggggaagggaagttccgtgtcaccgtgcccgcctccgctgcttcgaatgctgccttctggagccgcgattccgtgcggcagaccctttaccattatgcgagtgacgccgtgttcgggcagccgctccccgaggctccgttgcacgcgcgcgtgagctacgaattccggggcgcgctggcgtctgtgcgaactcccgtgcttgtgagctacatggatgaacggggcttgcagcaccgaagggcgattgcgacgggcccggcgctctcgctggaaaccgaaaccgaggccggaatcttcccgatcggcaaggcggcgtacagcctcgatgtgcgcttgcgccatatcggcagtgaaccgatgtcgggaaccgtgcgtctcaagcttcccgcgggctggcggagtgatccggactccgcgccttttcagttcgggaaagagggagaagcggccagcgccgcctttcgcgtcattccacccgacgggctgaaggccggccgcatcaccgtcctggcaatcgcgcaggcggatggccgcgagtaccgaagctccttccgcgccgtcacccaaccgggtttcgaagtgatttatgaggaacggcccgccacgcacgagattgcccttgtggatgcgaagatcgcgcctggccagcgcatcggctatgtcatgggcgcgggagattcggtccccgcgggattggagcaactgggcgcaagcgtcgagctgctggatgcctccgccctggccgccggcgatctctcccgctacgattcgatctggcttggcatccgcgcctatgccgttcgcccggatctcctcgtctacaacgcgcggctgctcgactatgcgaagaacggcggcgtgctggtggtgcaatacaatacacccgagttcgaccacaactacggcccctatccttaccagatgacgcggaggccggaagaggtgagcgaagaggattcgcccgttacgatcctcgcgccggaagctccggtttttcgctggccgaaccgcatcacgaccgacgatttcacgggctgggtggagcagcgcggctcgaagcaccttgtatcctgggcccccgagtatcagccgctggtggaaatgcacgatcgcggacaggccccgcagcggggcatctggttgcaagcgaaatacggcaaggggctgtacgtctattgttctctttcctggtaccgccaattgccctttgccgtgccgggggcggcccgcatcgttgccaatctcgcttcgctgggggcgaagaatgcgccctggagatgaatcccgcggtacgcctcgcgaacttagttgtagcgccgccggttgcggcgctcctcttgaatttagttgtagcgctgccggttgcgcttgcggcggaattcggtggggtcgatgtccggtgcttcgtcttccacgaaatccgtgccgcgcttttcctcgccgcggaagcccagttcctcgtcccggctgatgcgccgcaaggcgtggagcccttccagaatgaactcgcccgcggaagcacgcagggaatcaggttcactttcctccaacccaagatgccgcgtcttctccagcagcccgtccaccttggcaagctgcgccagtagagaggcggacgtcatcggctcctccaccttcacgctgcctccgtcgtcaaaccacttcacggtcgggccgagagtggcgttgcccatgtacttcttgtaaacgcgcccgatggcattgcgaatgatctcgcgtgccaccgcgtcgccgccctttagttcgccttcatactcgagctccaccttgccggtaatggcgggcaatgcggcatagacgtcgctcacgcgcggcgtcacgatgtcgtcaccgctttcaatcgcgcgcctctccgcgttcgagatcacgttctcgagcgtcgtaatggccaggcgctggctcaccccggagcgcttgtccacgcgccggtcttcgcgggccacgaaggcgatctgctccaccacttcgacgagataaccgggcagcagcagctcgccgcaaccttcgcgttgccgccatgcctcctgcatcgtgatcgctacgccctgttccacattcagcggatagtgcgtgcggatctcgctgccgatgcggtccttgagcggcgtgatgatctttccccgggccgtgtaatcttccgggtttgcggtgaacacgagcagcacgtcgagcggcagccgcacggggtagcccttaatctggacgtcgccctcctgcatgatgttgaacaaactcacctggatgcgcccggccagatccggaagttcgtttaacgcgaacaccgcgcggttcgcccgaggcaccaggccgtagtggatggtgagttcgtcggagatgtcggcgccttgccgggcggccttgatcggatcaatatccccgatcatgtccgcgacggtgacgtccggcgtggccagcttttcgacgtagcgatgctccggcgtcagccaggcaatgggcgtctcttcgccctgctcctcgattaccgtgcggccgtagcggctgatcggctggtaggggttgtcgcggacttcgctcccagcgatatagggaatggcggggtcgagcagcgtcgtgagcatgcggatgagctttgtcttcgcctgtccgcgcaaacccagcagaatgaagttgtggcgggatagaagcgcgttcacgatctgaggaatcaccgaatcgtcgtatccgtgaactccctcgaagagccgctcgcccgaccggagttttaggatgaggttctcgcggatctcgtccttgatgcttctcgtccggaggcgctgctccgtgaaccggcggtcgcgccgcaatgctccgagcgtatgcggtaaatcccaggtattcattgcccagccactctcccctatttcgatggtcctacacgatggacccgttcgggggagcgccggtttcgttcgcgccgggatcgcccgccgtgtctgcctcgttcccccggcaaccattggagttgccatccgtgtttgctaccattgcgaaaaacgcgaagcggggctctaaggatcatggcggattttgaacggctctggcccagactgcaacagcttgggctgaacgcctatgaggcgcggacgtatctggtgctgctcgggcatccgcgcttcaaggcgatggaggcggcggcgcgtgccagcgtgccacgccagaaaatttacgaagtgctcgatagccttctcgaaaagggcttcgcggaggtcctgcaggagaagaccaaatcgttctcagccgtggagccggcgatcgcgatccccgcctatctggcgcgaaaagagagagacttcgcggagcaactgcgtgagtcgcgcaagcgggcctcgctcgtcgttcaggatctggaggcgctatgcgagaacggcattgcggaacgaggcaatctcgactatgtgcggctattcaatgagaccgcccagacggcgatgcacttccgcgccatgctcgaaagggcgcggcacgagtacgtggagttcgcccgcccgccgtacgcggtggatccgctcgacgagcaactcgtcaagcaggcctgcgcgcgcggcgtccgcattcggctgctggtggaagagcaccacgagatcagcgagaactaccgggagcgcttgcgtgagtacgccgaagccggcgtggagatccgggagatcgcccagctcccgatgaagctggcgctgtttgaccgccagcatggcattctcgccctgctcgaccccctcaccaccaggcaaagctggacctccgtctggtttgaccacaaaggattcggttccgccatggccgagcttttcgattcccgctggcaggccgccgccgtctagagcgcggtgagcggaggctggctcggggggcggattttgcgaaacgaagccacttgctggttcggtgccctcgtccgcagaatcaccggcattgggaatctccggcatggggaatctccggcattagtaggcgttgaggtgccgagggcggtgcggaggcgtcgcgccggccaaacggggccgtcgcgacatggccccgccgacggcgggcggttctctgtttttggccgggggcggggggccgagagcaggggcgggatgccgtggggagtgcgtgcttgcgctaggggccgggagtggccgggttgtccgggttgtgcaaaaaatacggtgtttttcggtttggtgttcgtttcactaagttgcctgaatgcagctagttatgtgcttttgtggcccgctgacattgtccggattgtccggatggatccggacaatcgggcggagcgggaggaggcggcatctccgccggaagcgcgcccgatccgttcgtttttggcccggaaggcggagcgaaccggatgcggatttcgggcggggattggcccggaagggcgggcggagttccgcttgggccgtattcacggacgggcggaactccgtgtccgcgacgtcatggctcctggctaagcttacgcatgagcgtctgggcttcgacccacttctctacgctgcgccgcatttctccgggatcggccttgtggagatccttgcccttgcggagcacctcgcgctcggcgcgctgttcgatctcgccagggcggacgtagactgtattggcctcgatgacatcgaggatccggggcggctcaccgagcgcgcccggggtttttcgcatgatgccgagcacccgccgctcttccgcgcggctggccgcatcacgtattgccttcttgaagttctcagacatgcccgagtatagcggcggggagtggggaagacggcttgtttgcgcgagcgcgggcggtgcggcgggccggggagggcgcgcgaagatgttgcgcggcaaggagataggcgcgggtgacggtggcgggcgaaattatttgcaatgttcgtgaccgggtgatggtgcgtccgggatcttcgcatgccggatcgggggggggagtgcgccgtgagcgccatgataaaggaatatgccccgcaccgggcggggcatccctaaaggttgcagcttgcgcggcagagcccttcggcgggattaccttactttgaaaagggaatccctgaccttgatacactatctggaccttaacatttggaagccttcatgtcaatcgaaacgaacggtctggtcttgggaattgacctcggcgcgagctcgcttggtgtcgcgctgatcgatccggtgaacgcgcggatcgtgcatacgggtgtgcgcatttttgaggcgggggtgaacagcctcgatacggccaaggagacaccgaagaatgcggatcgtcgcgccgcacggcaagtgcgacgccagacagagcgcagacagaagcgctacaaggcgctgtttcggattcttcaggattccggtcttcttcccgccggcaagcgactggaagcactggaggctctggacaagacactatccacgcagtacgccgagcacacaaagctgccctatttgctgcgcttccgcgcgctggacgaggcactgactccccacgcgcttgggcgtgcgctgtatcaccttggccagcggaggggctttctttcaaacagaaaaacggacaaaaaggcagaagaggaaaaggagcgaagccggatgttagcgagcatccggacgctcggccaaaccattgaggaaacggggtgccgcactctcggagagtatatctatcgtttcgtcgacccccaccaggaacgcatccggcagcggtttaccgaccgcgcaatgtacaagaaggagtttgaggccatttggaacgctcaagccggattccatccggaattgctctccgaagctctacgggcggccttggaacgtacaattttttatcagaggccgctcaaaccgcagaccgacaaggtgggctattgcgatctggaggagggcgagaggcgcgcgccaatggcgttgctggaggtgcagcgcttccgcatgttgaccaccgtaaataatctgcggttagtggagaagacgggcgaacggcgcaaactaacccctcaggagagggagatcattctcgcggaggccgagagcggtgagcggctggaaatcaagaaactgaagaagcaactagggctaaaggatgcaagtttcagcctggagatcgggggagagaaaagcattcccgcgaacgcaaccgcggcacagatgcgcaaggcgatgggcccggcctggggcaaactcacgagtgagcggcaaactgagcttgtcgagtatctggtaacctccccggccgacgatgaaacacttgcccgttcgctcatgaaagacttcggttttgatgagcgagttgcgaaggctctttccgaagtgaagctgcccgccggatatttctcgatatcgaggaaggccgtcctcaagctgatgccgctcatggagagcgaggagatgctcagcttcaccgaggccaaggaaagcgaagatgggtacgggaagccaaccccaacggagccgctgccgctgttgcgcgcggcggagacgggaatccgctcactgcgaaacccggcggtgatgcgcgcactgagcgagttgcgcaagacagttaatgccctgatccgggagtacggaaagccggaggcgattcacatcgaactggcgcgtgacctccggagaagccatgaagaccggatgcagcttcaggacgcggcacgcaaacgggaagcgcagcgggatgcggccgccaaggatctggccagctactacaactgttcgccggaagatgtgaagaaacgtcacggttccgcaatagagaagtatttgctatgggaggagtgcaaccacaaatgtccctattccggtgagcccatcagcaagacggcactgttcggggagacgccgcagtttcaggtagagcacatcatcccgctttcgcggtcgctcgacaactcattcaacaacaagacgctctgctcgaatgcgatgaacgcgcgaaaaggcaatcgcacgccgtgggaagcgttccatgacgacgatttcgagaggatgcgcaaggcggtggccgagttcaagaaccccgcgaagcttagccgttttgtgctgaaagaggcggaccgggacgcactgctcgaagaattcacgacgcgccaactgaacgacacgcgctacgcatcgaagctggcggcccagtacctcggaacgctctacggaggcgtctgggacgagggacgcaggcagcgcattttcacctgtgccgggcaaattacggcgcacttgcgcagggcctggagactcgattccatcctgaacccggttgattggacgaagtcgcgggacgaccatcgccaccacgcagtggatgccgttgccattgcgctgagcagcccggctatcgtgaaaaggctcagcgaggcggcggaacgcgcgggcagcgagcgccgcttgcaaattcgggattttgatccgccatggagcggcttcaaggaagatgtgcggcaagcgatcttggcgacgcaagtctccctgcggcccgcgtacaagctgctggcgcagatgcacgatgaaacactctatagcaagccatgggacgggagcgatgggaaacgatacgtcacggttcgcaagccgctcgacgggggcaagttcgagattgaagatattgtggatccgcgcatccgggagattgtgcgggccaagattgaggcggcgggaacgcggaagaaactgaacgacgatccaccgctcgatgcggcggggcggccgatccggcgggtgcgggtaaagatcggcgttgccaccgatcccacggtggtgggagaaggaccccgggcgcggaatgtgatgcccaattccattcaccattcggtgattctgcgcgatgagacgcagaagggcaaggcgtgctaccggcatgaatccgtgagcacgatcgaagcgatgcggagacaccggctggggcttcccattgtgaacaaggagcacggcgaacatgtggcgtttgtctgcacgctgcggccgggcgatgtgctggaggcggtaaaggcggcgggagagccgagacaactttggcgggttcgctctttgaatgctacagggcaatttacgttgcaccttctctgcgatgcgcgaaagaaagcagatattcaggcggcgaaatccgtttggaagcctgtagtcaatactgcgtttctcaacggtgcccgaaaagtgactgtcacccatttaggggcggtggtggccgcgaatgactgagcggattctggatttcagtatgcaaccgggacgccttcgctatggcaacgggttgctggtgctggaacgccgcgaagaagcggacgtgacgttcccgctgggcgagattgcctgcgtcattctcggccacccccagatcacggtgacgcaggcggcgctcggacaactggcgaaagagggaatcgcggtgatctgctgcgatgagaagttccggccctccgggatgctgctgccgctcgaagcgcatcaccggcagagccagcgcttcgaaatgcaagccaagctcacggttccccgaaagaagcgcctgtggcagacgatcgtggtggccaagatcgcggctcagggccgcgtgctggaggaattcctcggactggactacggcctggcccagtatgcccggcgcgtggggagcggcgacgcggcgaatgtggaggcgcaagcggcgcgacgctattggacgctgctttttgcggggagcgacgcgcgattccgacgcgcgaacgaggacgacccgcgcaatcacttgctcgactacggctacggcgtgcttcgttccgtggtcgcgcgcgccctgtgcgcttcgggattgcacccggcgctgggagtccaccatcggaacgcctacaacccgttcccgctggcggacgacgtgatggagcctttccggccggcagtggaccgggcggtgatgggagagatccgcgcgtgggaagggggagaggaatcgccgctgtcgctgaccccggaacgaaagcgcgcgctgatttccgcgatcacggcgcggtattgggtggaaggcgaaacgaggacgctgcttgatgtgatcggcatcgcatgccagcgcctggcagccgtgatcagcggagagcaggaaaaatgggaatttcccgaatggaggacggaggtgaaaaagcgtgccgttcgcgccataccgcatcatgtggatgtttgcgatgttcgatctgccggttgagacgaaggcgcaccgaaaagccgcagcccagttccgcaagaaccttctgaaactgggcttcacgatgctccagttctccgtgtatgcgaagcacctgccgagcgaggatgctgccctgcatcttcaccgcattgtggaactggcggtcccggtggaagggcaggtgcgaatcttgacggtgacggaccgacaattcggcaaaatggcggtctatttcggaaaaaaacggggggaggcggagcctgctccggagcaaattgggctgttttaggaagttgcaggcggctaagtcacctggaatgggtggcttagccgcctgctagtgtatcaaggtcaggggttccggccttccaaagctcaactgctctctcggttgcacactctacgagtgtatcaaggtcaggggttccggccttccaaagctgctggcctgccgccacgcccgcccgcaccagtgtatcaaggtcaggggttccggccttccaaagccgatccgcgcagcctcctgcctgatcgcctagtgtatcaaggtcaggggttccggccttccaaagcccatggtcaccggcccatcgcccaagtcgaagtgtatcaaggtcaggggttccggccttccaaagcgacgctgtgcaatgcggttgcaagcttgcaagtgtatcaaggtcaggggttccggccttcca

SEQ ID NO: 3951 - DNA, 17442 bp, synthetic construct
  misc_feature 1..17442: note = Synthetic
  source 1..17442: mol_type = other DNA
tgcagggcggaaccgtcaaagtccaaggactggacagcgccatcctcgccgggtccgacccggcatcgcccacgcaagctgccgccgttccgctgggcgccgggcttgccgtccacgccttcggcgcggaccccgcaggcggctacgccctctgggtcgccgaccaaggccagattgccgccaacaccgtaggtgacgccagcctctccgccgtggcaggctcctccgtcggcgtcaccgggggggccaaagtcaccgcaaccaaccggggcgcgctcaatgtcgggaccgacggcggcaacctcacctccaagcaagtcagcgtcatgttgggcggaaccatcgaaaagatcgcaggaggcaacaccatagttaggggtggcaaccttttgctagatgggggaggttccaaaatttccactaccgtggattccattggcaatttgaccgtggaggcaacaggtggcaatacgtctgcccaaacagccatcactattcgcaatggagggcaactcaacagcggcaacacaggcgacatgagcttgcagtcaaactcgggtgacataggagtatctggtgagaacgccatccaagcatccaacattgggaatgtgctaataagtacacccaacctggaggtgacaggtatgggcgcgaacagtgaaatcccggtaatcgttttaaacaatacgggatcggcggaaatccaagccaacaccatcaagggagatgcaggggcatgggtgacggcgagcaaccttggcaatttgacattgtcaccgtttgactcggacacgttgacgatagaccccatcagttttgaaaaatccaatcctgtgggcaatatcattttgggggcaaataacatcaacatgaccgatacccttgtcgcgatagactcacaaggaaccgatggaggcaatatactcgtcgccggcattaactttgatatgatccgctccatcattcgtaataaaggcgcgggtaattttgaaacctccaataacattaagtttgacttgcttaatctgagaatggccaatagtgttgtggaatcgaaaaccattcctagtggcaggggaggtaatatctccatcgtcaatggcaacgaatttaacacccgaattatttttggtacggtaaataatggcacgtttatcgatggaggttccgccgaatggagagtgaccacacaattggagcccgacttagtgatcagccccttggggcaatccatcttcgccgcgacccaccagttcaagctttccgaaaacattcgactcagtgcgaccgactcggttcaagcagcggtgaaagcggtgattggtcaatggagcttggccgacaggcaagccgatttgcgcagcaacccttgtgaaaaagaaggcagttctttgtccagcaatggcagtggaggctacgcagtggcatcaagtatgactctgccattgccggttggctatggcgatacatccaagcagatggctcatgccaagaatgtaggctttggcttgcaacagccttacaagctggctgctctaagccggacaccggaccgagaatgtaattgataaagtgacaattgggaagcaatggaatctatcatgaagaatacaaataaagcgatagcattcagcttagccatgttgctttgctcgtggttgcatactggatttgcggatccaaacttgcaacaactctttgatcaaaatgccaataaggttagggaaccaaatctttataatttggatccgttaagcgaccccagcaaacccagtaataaacctttgtttgagggcgttcctgaaccaggcgaaaggccaaaagaaagcactttaaaactacccggcaagccagcagaaggccctatcgacgaatcggataaagaagctaggattctagtccaaaagatcgttttccaaggtaataatactttttcagatgaggaattgagcgaagtcacaaacccgtatttgaaccgtcgcttgagtggcagtgacttggagcaattacgctatcaactcacgctgttttatgtagataaaggctatatcagttcgggtgctgtaatcgaaaaccaaaccttcaaggatggtgatttgaaggtcaaaatagtcgaaggccagctaagcgatgtacgggtcagtgggaacggatggctgagggagcaatatatccgtgaccgcttaatgggtgatccagacgagccactcaataccaatcaattgcagaagcgctattcccgcttgctaaacgaccctctgatagaccggcttaatggcacgttgttgccgggtgccaagcctggtgaggctatcttggatttaaaggtaacgagaaggcgcaattatggcttggcattgagtgctgacaacttctccccgcctgccattggcggatataccgggcgcatagacacttggattgcaaacctgactggtttcggcgaaacgattaattttaactttaatactttatcaggtgctcaaaactattatgctgggattgacattcctttaactccccagggtacccgttttgcctttcactacacgaatagcaatacagtattggtggaacaacctttttcagtgctgaatattgcaagcaacatcattagttatgatgcacaattgttacatccatttatcctagatgtcaaccaaatattgacggtaggttttaattttaatatccgtcaagacatcaccactatagatggaaatgacccaggacgtcctggctcacataatgggaaaaaccaagaaaccgtgttgcgcctctggcaagattatatttatcaagaacgcaatatagccttaaacctacgctccaccgtatcggttggtgtcgatgccttaggtgcgaacattaccactcaagtgggcgatgggcggtttgtcgattggattttacaagcggcagggcggtattcatttccatccacaggcgcttatatttcgctcagcggtgcgctacagttatccgatgatgagctattgcctttggaaaaactagccattggtgggtttttcacggtcaaaggttatcgccaaaactatttagtcagggatgaggggttttacaccgcgcttgaagcacacttgcccctattctggggccaaaccggtcttccctatggcatttatttagtcccatttttgaattatggcggtgcttgggattatcgacaatctggcactaatctattctccaccggcattggcattgacggtcaatataattgggtaggatttgatggtgccaaccaaagcctgtcggcatccttgtattgggccaatcgtttgacagactataagatgacccccggaaccccttatgatttgcaagataatggcgttaattttcagatgagattgcaagtattttaatcctgtttgccctgccggaatttgacaagaatccaatgccgcgattgataacatttaaaaaactacttcactggtgtctatgcctgggcttactgcttgccagtgttagttgctcggtgacgaagccaacatcatcgacgattcaaaccgctgggttcaatagggaaccggttgcgtccaattttgttgcgaacagtccgcatttggcacaaggctatgccaacttggaggctggcaaataccggctggctttgcttgaatttgatctcgccctggccgaggccgaagcacaggccgattcaactgtcgtcaccccacagctttccaactgcacggctttggaaaatgcacccaaacccgttgccccgtcccgattggctgaaatctacggtgcatcaggatataccttatatttattgcatttgttgacctcagaccaagccaacagcgcccatcaaaccctgatgaattttgccgagcctcgattgacgtgtgcattggaactggcccagcaagcaaagaatccgtcgtcggaagggcgtgtcagggcttatcttggtttagtctatgcccggttgtcacaagataatgccatcgaagccaaaaacgctgaaaaggattcaaggcgggaagaagagaaaaagtatctggaattggaaaatagatataggcaacaggcgataaccgaattcaataatagccagaggttagccaaagccagtggggattcggccttgctttatgcatccgatctgcaattggccaagttggaaaataatcctgcgaaaaggttgactcagttaaaacaggtggatgcaaacttgggcaatgtggccgatatcccttcccgcgtcaacttgctacttaatatcatggatcagcttgaaagcttgcaaaaggatggcagggtggcaaatcaatcggcagacatttcaaagtttgggtgcgaactggcggcccaatccaatcaattggcagcacaagccaaaatgcctcgcgccttgtcgcaaggcgaaggctttctggctgcctgttttgaaagggtgggcaagcgcgaagaagccattcaacaaaccgaagccgccattcgtcactcggtggaatccaagtcaccggatttgaccatgaaatggcaatctcagttagggcggctgttggcgctggaaggccgcaaccaagatgccatgttggcttatcggcgagccatgttttatgtggatgagattcgcaatgacattcctatggtttatgccgatggcaaatcgtcctattccgaaaccttggaacctatctatcgcggtttggccgatttgctcttgcgcacggccagccaacaatccaacccgcaggatcggcaggcattattgtttgaaacgatttattcattggaaaaactcaaacagtctgaacttgaggactatttcaatgcccgttgctctttacaagccgcctccgaagacaaggatgcaccgcaacaatccccactcaatgggctatcgccactttctgcggtgggagggttggctgatttggataaaaccctgcgcaaagccactggtaaaacggctattctataccccatcatctttgacaagcgcttggaactattattggttcatgacgggcttattgttcaaaaaccctcggtcgctgtcaccgcagacaggatcaatcatgaggcggaagaactgaacaggcaattgaactatggtgataaagacagccatggcaaggaaaacaaggaatggaagtcaagcagccaaaaattatatcaatggctggtgaaacccttgcgaaccgaattgcaagctaatggcattgaaaggatagtctatatccccgatggcaaattgaggttggcgcccatcagtgcattctacgatgatgacagtcaatccttctttgccgaaaactatgctgtggtcatcaataatggtttgttattcaacagtgcagggcgggaacaaagtgctttgggcaaaaccctattggcagggttgagcaatcctgacggagattcggtggatcagcttccgccagaccaccaagatatatgggtcaaacaggcagccaaaaagaacccaccgaaacgaggttcgcccgaatatcgaactgctttggttgatgccatgtctttggaaagtgtgggcaaggaaattgattcattgaatggcatgttggaaagcaaatccttgctgaataaaattttcacccactcaaacttggaaagcgacttgcaaaccggaaattatgaggttatccatatcgcatcccatggacattttggacactcggccaatgatagttatattatgacctatgataaaaacctccggctcgacgaagtgcagaaagtcatgcatgtgaatccagagcaaggccgccaactggatttggtgactttcagcgcctgcgagacagccaacggggatgaccgggcgccgctaggcttttccggcatagccatcaaagccaaagtccgcaatgccttaggcgcattgtggccggtcgatgatgaggcaacctaccaattaatggagaggttttatacggcattgaaagccaatgaagcggacaaagccaccgccctacaacaagcacagaagggtatgctacaagataagtcaaaacctcatgcacatccttttttctggtcgcctttcatactggttgggtcgtggtgattccagtagccgaccatcagcagcgatattttattagactataatgttttaccaaagcgggtatgccatttcatcaactaaaactccgcatggcgggggagggaaattatgaagaaaacacacgatcaaaaccaatatctcgttagcttggaaaggcttaatgggattttccgcttagcgctgatcgcatcagtaatgatggcggcaatagcctgttcaacccagccaaaatccgtggcatcaacggcaaaagccggcagcgcagcagccactgcacccgccgaaaaccgccttacctatgaccaataccttgctcaaggcaaaagcgagttagccggcgggaaacccggtaaagccattattgttttcaaactggcattgcgggaagccaatggtgatgaggcaaaacaaagggatgcctatggaaacttaggtgtcgcctatgaagccgccgcagactaccctagggcgcaagcctatttggaaaaagccggggcgaaagagcaagcgcccgcttggataaaagatgcctacaaacatctgttgtcttcgcaaaaattcatgaccgccgactacatggaaaagaagctccaagccgagcaggaaattgaacaggaacaagcgcaaatgctcgccgccgacgaaagcgcttcggaagaagccgaaggaaccggttcagggacaaaaaggcgtggttttagtgtaggaaaaccagcggctccgaccttagccatggtggataaggatgcttacaagccaaaaccggctgaacccaaagcaagttccaaatcaagcccaaaacccagtgccaaaaccgccaagcgttcaacacgtcccggacccacaccggtagcctccagcagccaccgggaagaagctccgatctcctccgagacaacgttggacattcgtatcaacttcggcttcagaagcgcagccctaaccccggacggggagaaacaagccgacgaactgggcaaattgttgcagcaaaaactgcaagacggcaatttgatggccgtcatcgtcggtcataccgatatcttcgggggcgaggaatacaatgaccatctgtccgaagaccgtgccgccgccgtcatggcctatctagtcaccaagttccccgatttgaagggcaaactgtccgagcgtggcatgggcaagcggcaacctctctatctggaagaggacgatcagtcgcaaagcctgaatcgccgagtcgaagtgaagttgaagagcctgtaaagcaacctaagtcaattatcccgggttccgcgtgggcagacgatagagccgtctgcccacgttactcgactggaaaggttttttagtgttaggttgaacaactgttttatcgttgcctaaccattttagggcagttagtgagtattgggcaacagaaaagacgttgcccaacctacttcagataacttatttgtagttatttttagagtgaaacgggagtaaatcaaggcaaataatcataaatttattggtgtcaaattcgaattcacctattatttcacaaccgactttcttcagagcatttaaagatcttaagttggattctgatgcaaaagaaattcttagtctgggcggatttgacatttgtttaagaaaatcaaacactgccgctacaagttgtggaaaaataccttgccctcgatattttttatcaatacaagtaggcccagcaatgaagcaatcgtactcagaaatattcttacctttgtaactaatctgactaaattgctgaatcatagctgttagcaatggtgaagatttattaaattctagtgtagttgcaacctgatatccacataaatccatgccagaaaaacatgtcatgatacaaatattgtcattcattgatcgaagttcatccacagtaaacgatgcagataaaaaaccatcttttaaatcactctcacttaaagatgtcactagattattattttgaaggtcaaagatttgttgaaaatcctctgttgtttctgctcttctaaatattaagttattatttagcgacataggtttacaatctcctgatgatgtgtcaacttattatcaacgggttaccaagctccagctttgtaaccagagcaaaaccgttgcccgacctaccaggcttaactgtaaaccatggttcacactttagcaaatctagcgttgtaatccgggtttacgggcggatatactcggatacccaaaatcataccgcatgggcaaaacagcggtatccatcaggttccgttccatgtccgacccggtttacgcctcagtcatgtaggtcgggcgcattttttgcgttgcgcccgacaatccgaatgtcgggcaacggtgaagctgttgcccgaccttggataatgagtgggttggcgctaccttgcagcccggcttgttggttgagtaagcgtcctgccgggtcgtagtcgtagcggctgaagagcttgccttgttgtcgggcggtttcctgccccagttcgtcgaacttgtgccgggacagggcttcgccgtcgaggtggacggctttcacccggccttgtccgtcgtgttggtagtcgatcctgcgcccgtccggggtgactgtggcgacgcggttgccaagtgcgtcgtattcatggcggacggtctcgccgctttggttttcttgggtgacagaacctaaggcattgtattgccaggttgcctaatcgggtgtgatcaaaatgatgcgggagtgcaaggcttgccttgcgagggcgtttttaggcaaggcaagccttgcactccatccgtgcttaacttattggtagggaagctcctgcgtgggaacgagagaaatcattgacgttgaagcagttcatggttcgcccttcgacaagctcaggaggctcaccacgaacggcttaagttaatggctttgacgctggagcgttggaacaagcaaacggttgccgaactgataatccgctcggcgcaactgcgaaagaaaagccgtggcttgcactttacctttgactacccggaaaccgacgaaagccacaaatgaggtgatacgattttggagcttaggtaaacgtaatggcatatccaatcggataatacctaaaacttaagcagccaatatacataacaaaaaaaacgaccacaacacgaatgaagtggccgttacatttttacatgtatcggtgactttccccccgaaagggtactcgccttgttgccgatagtccccaccatcggaaaagctgatacgatatctatgttaattggaaatcttaggagaagcaagcatgcattaccgtcttgcccttgatttgggcactgcatccattggtttggtggcttacgaattaaacgaccaaggcgaagccatagccattccctatcacgccgtccgcatatttcaagagcctctgcaagcagcaaaaaatcaaggtgtaggggaacccaaaaaagcggctcgacgggctgctcgccttgctcgacgacaaattgatcgaaaatcccgacgactcaagcgcattgcctattgcctcccattgcttggacttgaacccaaagacattacccccgatagcggacaaaacattcatcgactccgtgctgaagccgcgacaaagcgcatcgaactggcggatttggcgagtgtgttgttaaaaatgtccaaacggcgtgggtatttcggtggtttccgccctgacaaaaccgaagagccaaccgacaccaaccaaaaacccaagaggggaaaaaataaaggagtagtgccaaaattggaagataacgacagccaagatgacaaagctgaaaaggacgaaaaggaaaaaggcatcgtcaaaacgggcattggcaagctgaaggaagaaatggcgaaatgcggccctgacataaccttggggcagtatttggcgtatcggtttgcaagcaagttaagcctcaaattggcatctaagtactctgaagaaaagctctatgcccatcgcgatttgctggaagcggaatttgaaaaaatctgggggacgcaagcaaaacatcatctcattctgaatgaaagccgtattgacaacaatcaatcaaaaccgatcaagcagatttttcatgacgtactgtttcgtcaacgcccgctgaaatctccggcggcgatggtgggccgctgcccgttggaaaaggatttgccccgtgcgccgatggcgcaacctgccgcacaagcttttcgcatagaaaaacaattggcggatttgcgttggggtatgggaagcaaagccaagccgctgtctcccgaacaaaaagccatcattcgtgagttactgcaaaatcaacaaactgtcacctttaagtccatttataccgccttggataaagccggttgcccaagtgaaccggggcgcggcttgaacatggatcgcatcagccgggaagaattgaccggcgacaaaacccgtgccgcgtggcggagtgccaatattaacctattgcatgagtgggatgcgctggatcggacgacccaagtgcaagtcatcaacatcttggcagatttaggttcgccggaacagataagcatggataactggcacacgcaattcgtcaagccagtccgcgatgggaagaatgccaagggcgaatggcgctatcgcaacgaactccgtcaattttcaccttcgtttgttggctttatcaacgcactcagaaaatgcccaggctacgaccggctttccaagatgggtttcgagtcgggtcgctcggcctattccgtcaaagccttggagaaactgacccggtggatacgcgaatccacggcagaaaacccgattgatgaacgcaaagcgatagaactggcttaccctaagtattacgcagagaaaccacccttgaccgaactgccaccgccgccactgaccggcaataccgtggtggatgtggctttgcatcaagtcgaattggaaatccgcaaagccattaaacaattgggtagcttgcctgcggaaatcatcgtcgaattggctagggaaatggcgttaggggtttctcggcgcaatgaaattgaaaatgaaaacgacaagaacaaccgagcgcgaaagaaagcagctaaggagttggagaatgaaggtttatctgccagcaagaccaatatcttccgctataggttatggcaggagcaagaatactattgcccctattgtgaaaaaagaatgctgagtctgagccaagtggtcgatggccatgaaacccatgttgaccacatactgccgcgttcactcactcaagtgggtcgaaagcgcgaccaattggttttagcgcatgccgcttgcaatcatgacaaaggcgataacacgccttgggaggcatggggcggcaacccaccaaaatgtcctgaacgttggcgagcggtggaggctcaagtcaaacgctttagagaaaaaagacattttggcaaactggctggcaaggcacggttgcttgaactccaagactggactgacaatgaaaccgtagaagggtttagtgaacgccaatttcaagaaacggcttggattgctaaacataccgcccaatggcttaggagtatctgcccactcggcaaggtacaagtttcacgcggtgagttgaccgcctatttacgccgcatctggcatttggaaaccgttatccccgaggtgcgttttgaaaccagcttacccgtttttgataccgatggactacgcatcagccaagaggattttttcaaacataaacccttttgggaaggccgaaaaagcgaggaagacgaaaaccgcactgaccgccgattggataagcgacttgaccatcgacaccatttgattgatgcactggtcattggactatgtacgccaaagctttaccaaacaatggctcatgaattcaagcagagatcaattcgtcgaaagcataataagacggaaaaagtcagtttggcgattgacccgcccttgcacgatttgcgtaaaaaagcgttagaactagtccgcaattgcaacctgactcacaagcatgaccgcttcccagatgggccgctgtttaaggatactgcttatggaatagtagaaatttcgcaagatggtaaaaaaacccgctggcactttgacccggaagaattgtttagtgaacaaaacacctctgaaacagagcgatttctaattttgcgtaaacggttggaaagttttggggtgaataaaaataacaaacccttgcccgtagataaagtacgcagtgcattaaatgaaatagcgagtaccgaagtacgcgaatatgtattaaggattgttgaacaacgtttacttgaaggcaaaactgctcaagctgccttacgagaaccaatcgttcatcctatacacaaaacgataattaaaggggttaagacgaaaagagggattgcaaataaagcttatcccataattcatagcagccgaagtggaaaacattacaaatttttgccacatcaggaaaattcatatgtggaggtaattttgagtgaaggtgcaacaaagattcgaatggttacacccgttgatgccatgaaggaaaaaggtttaaaaccttcccagggtgttatgcgctttagcaagggtgacagtgtggttgatattcgagatcagcagcggtttgtaattagacagatattagataatccatctaaacgtttggctttagtaccaattactgatacccgaaatgccgatgatatgactacaaaggagggcaaaagatttgccaaagaccatgatattctcaattttaaactcatataagaatgtccgaacaccgcgtcttgctgattgaacacccggcctatctgtcggttgatttaggccgcttgcgcatccgtcgcgaaggccatgatgatgcgtttgtgttgccggaagatattgccgtattgtgcttgcatcatcacactgtcacactaacggtgcatgtattgcgtgccatggcagaagccggggcgatggtgttagtgacggatgaataccaccaaccctgcgccatgcaatggccttatctgggcaagacccaaatcgtccagcgtttgcgccagcaaatcgcattgcccgaaaaccaaagggatgcattgtgggcaactattgtttccgccaaaattgacaggcaagcggctaatttgcgctgtttgggactgaaaggcggtttgcgcttggagcgtttggcaaaacaagtccagcccgccgatgcttcgaacctcgaaggccaagcagcaagggtgtactggaaatgcctgttcggtgataactttacccgccgcaagcagggtgctacggacaagctcaatgccatgctcaatttcggctacgcggtgttacgttccctgattgcccgcgagttgagcatggcaggattgaaccccgcgttgggcctaggccatgtcaataccgaaaacccgttcaacttagctgacgacttcatcgaaccttaccgttgtggagtggaaaaacgagttttcgccatacacgctaaccatgctgaatttgacggtgcttgcaggttggatttgcttggtttcatgaaggaagaaatacccatgaaccgacaaaattaccgtctcccctccgccatcgcagaaaccattggcagtttttgccggatattggagcgaggtaaaggcgaattgagcctgcccagtttttcactacaccatgaaaaggcataacctttacagcgggacattcctgcaaacaagccagatgcagaggaaaatattatgcctggaaacggttggcggattatgtggatagtagcgttgtatgattgtccgatgctcaccccggaagagcggcacgattataacgcattccgaaagttgttgttgcgtgaagggtttacccggcatcagctttctgtctatgtgcgtcactgcccgactttttctcatgcagaggcattggttagccgcttgcgcggcgatatccccgacagcgctgaagtgacctttttctttttgacggataaacaatttggcatgacaaaagttttcaccggctccaactatggcaaaaacaagcctgtaatgcctgaacaatttgaactattttagtgaaaacgccgcaataatagaggcttgcggcgtttcgattgtatcaggtattccgacggtggggtatcggaactaacttgtcgctggcttgcccatgtcgatcattgtatcaggtattccgacggtggggtatcggaactgtgcctgatgtcatccccaagcaagccgattgtatcaggtattccgacggtggggtatcggaactagggggttgtatggtttccctacagaaaaattgtatcaggtattccgacggtggggtatcggaactgacaccgggggtgatatcggtcgcggtcgattgtatcaggtattccgacggtggggtatcggaactgtgcgctcatgggttgcatcaatcagggaattgtatcaggtattccgacggtggggtatcggaactgttggcagtgctggcattgcaccaggtcaattgtatcaggtattccgacggtggggtatcggaactgtccatgcgtcggtcgtgtcattgcccagattgtatcaggtattccgacggtggggtatcggaaccaagcggcaagatggcgctgaacctgtttaattgtatcaggtattccgacggtggggtatcggaactgtttgagcttgcggcccttgacggggtttattgtatcaggtattccgacggtggggtatcggaacgcctcaatgcggcgttaggcttcacgtcatattgtatcaggtattccgacggtggggtatcggaacctttctgccatggtggtctcctgtggtaaaattgtatcaggtattccgacggtggggtatcggaacggaaggtacaggcaatgcacagccgggttgattgtatcaggtattccgacggtggggtatcggaacggtcaaattcaaggatgtcgcgcatgatggattgtatcaggtattccgacggtggggtatcggaactggagcaccgattgccacatgctgccagcgattgtatcaggtattccgacggtggggtatcggaactggtttcggtttggggcaaacaccaccgttattgtaccaggtattccgacggtggggtatcggaacgtaccggggtcaatgtcccctttctttgcgattgtatcaggtattccgacggtggggtatcggaactgcggggtcagggtcacatgcaacacggtgattgtatcaggtattccgacggtggggtatcggaacacacacggacatcggacacgctgccgatttattgtatcaggtattccgacggtggggtatcggaactttcgagtgcagataaagcccgccgcctggattgtatcaggtattccgacggtggggtatcggaaccgtaatccagcacgttaacattgtaaaattattgtatcaggtattccgacggtggggtatcggaactcgtctccgcgtgaagcgtcaagtgccgcaattgtatcaggtattccgacggtggggtatcggaacaaggtgcagagaggaatcctgtaggcttatattagacgttatcggaaactggcataatattatttcgaacaatcacaaaccgacgaatcgacatgctttcttacgaggacatcaagcacaagccaaagacactgatggccatgaccagcctgagccggtccgaatttgacgagctgctgggcgattttgccaaggcatgggacggagagacgggccgtgaactgatgaacccttcaaaaggcgggcgtccactggcgattcaaagcatggctgaccggttgctgttcatcctgttctacttgaagacctaccccctgcaagaggtgattgcgcatttgttcggcctgagccagccccaggccaacttcacgatccaccagttgagcgcggtgcttggcaaggcgctggacgccaagggccacaagccggcccgcctcaccggggagatgctggaacggctggggaaagagcttccgcaggatttggggattgacgggacggaaaggcgcatcaaccgccccatcgacgacctcgggcagcgcctgcactacagcggtaaaaaaaatgccacacgttgaaaaacagcgtggtcggcggcttggaagaccggctggtcaagtacttgggcgcgacccacgagggcaagaagcacgacaagaagatctgcgacgaagaggggacgacattcccggacggtactgtcctgtatcgggacacggcctaccaagggcatgaggtgccgaatgtcaccgtccaccaaccgaagaagaagccgcgcaacggcaagctgtcggacgaagacagggagaacaaccgcctcatatcgagcatccgcgtgatcattgaacacatcatctcgggggtcaaacggtgtcgcgtcgtcaaggacgtgctaaggaacaccaaggaaggatacgacgatgtcgccatggaactggcttgtgggctgcacaattacaggagccactgccgaaaccaaagttattgacggtctgtcattttgtcagctattgagtatgaaaaacagtttccgataatgactattgtatcaggtattccgacggtggggtatcggaactgcttatagtagccgtcaaagatcgcggcaattgtatcaggtattccgacggtggggtatcggaacgatcggtcaagcgtcccgtctggcttgacaattgtatcaggtattccgacggtggggtatcggaacagactgagcgcagccccccattggtagagtattgtatcaggtattccgacggtggggtatcggaacgtgttgctggtatgccctgcccacagttcgattgtatcaggtattccgacggtggggtatcggaactgttcctagcccatggaagccacgcctcagattgtatcaggtattccgacggtggggtatcggaacgcttttggcgcgctaacgacatctcgcagaattgtatcaggtattccgacggtggggtatcggaacgtggccgtgtacttggcggccgcactttcattgtatcaggtattccgacggtggggtatcggaacttccagttgttcatgtcgataacgacattaattgtatcaggtattccgacggtggggtatcggaacgattagcgggcgatgacggccacggcggcgaattgtatcaggtattccgacggtggggtatcggaacgcgtaggtggcacagtccttcgcctcattcattgtatcaggtattccgacggtggggtatcggaacataactaaagctgcgcctcctaatgatctgattgtatcaggtattccgacggtggggtatcggaacagttgaaggaaattaaccaacgggtcatttattgtatcaggtattccgacggtggggtat

SEQ ID NO: 3952 - DNA, 7283 bp, synthetic construct
  source 1..7283: mol_type = other DNA
  misc_feature 1..7283: note = Synthetic
ggctacaacgagaaaaccgatttgccagagattgtcttgtgcgcgcagcatgacgagttcggtccattcctcgacgcgatcaccaaacagcatgaaaaccacgattaccgcgacaatcacagtaaacagcaacaatagggtacgaatcggtattttttcacgtatggacatggggggcatcttgcgaacgaatggccgcgctgacaatctaaaagctaataaagggtcgaattgatggattgacagattattgaaagcggacgcgcttgtaatgcaatataccttggagaatcgaggtaggagtgttctgcattcgattgtacatgtcgaaagccaaagcggaatatacgcgcacaaaaaaatacgtataatatacttgattgtgacaggaatgtgaatatcatataaatatgaaaaacggggcaatagaggccaaagaactcggcaagcgcattcgcttgttgcgccggagtcggcattggacccaggcccaacttgccgaaaaggtgggcatccgtaccggccccatgaactatctggaaaacgggcatcatctgccatctctaccggttttgtgcaaactctctgccatcttcgatatttccgtggatcagttgctcggcaaggaaccgcagacgtatgtcgtgcgggagtcgaagtctccctgcggacagctcgtccgccagagtgaagatgtgaaatgggtcggggcgcaagactatcgtgcgtatcatgccatgctcgtgcgttttgatcctgtaaaggagcaattgaccgatgcgcagctcgcaagcctcgaaggaatcatcgatgcctttctggcgttggaagatatttgtggggtgcagaaacaggcacagattcctttgcaaatccgcttgccgatgcgcgaggaaggattcgagcgatatgtgggacaagtgcgcgcattgctcggggtcaatgaagccgtcatttttgattatctggaactgctcgagaatgccggactgcggatcgtgtttcttccgttgccggaaaagatcaaaagtctgtcgtgctatgaccgtgccaatgcgaacgcgtttatctttgtaaatagtcaggggttgagtttggaacgtcagcttttccggctcagctatgagctgggacgcgtatatctgtataatgggggaatgcagggtgccatgcatattggctcattggatgccgagcatgccgcccgtcggtttgcggcgttgttcctaatgcccgccgaggccgtgctatcttcggtgcgtcaggtgggtgtggggccggatcagtggacatgggatatgctcatgcgactgaagcaccggtttggtgtttcggcagagacatttctctaccggctggaagagcttgagctgataaccaaggctgtccgtgcgcgcctcaaagccgacatctatgcctattacaaggcgcatgctaattccgagcccgatgcatcgcgccgcattcttacgcccaatggccgtctcggggatcttgttctctccgccagcatccgtgctcctgacaatgccgaactcgctgaaattcgccagcttttgaaaacccgcaaaataaaaatgccatgaacgcacgaggcaagagaaaccattggatgcacgctgttggcacaggcgagctacacatgcacgccggtaaacgcctcatctcgctctaccccgcagacaagaccaggctggatgcaaagctggggggggggattgcagcaaatgccaacaatgaaagaaccaacaggaggagacacatgcgcacactaggattggacttgggaacgaatagcataggctgggcggttgttgaatcagtggggcggcgcgtatcgctcgtggataaaggtgtttacctgttccccaagggagtaggagaaaacaaaagcggggaatattcgctggctacccaaagaacgggataccgctctgcgcgtcgtttgattatgcgtcgtcgctggcgcaagcaggctacgctggaaacccttgtaaagcatgatctatgccccggcttaacggttcaagatgtcaaggactggaaacaggatcgccataaatacccggcaagcgaagcatttaagcaatggctcaatatcaaaaccgaaacaccggatggaaaaccggcggggccatattactgccgctggcgttgtgcgacagagcaactcaacctatcgctgccggaagaccgctattgtcttggtcgggctatctatcatttggcacaaagacgtggttacaagagcaatcggatttcgggagaggaaaaggatggtgcggtaaatgccgagatctcgaaattagatgttgcgcggggatcgaaaacattaggtcagtatttttatgaagaatgtctgggcaaggaacccgtacgcggtagccaacactacactagtcgggcacagtatgaacaggagtttactataatctgcacgaaacaagcacttcctgcagatttgaccgagactcttcggtataatttgtttatgcagcgtccgttgcgctcccagaaaggaaccgtgggcaagtgcttgtttgaaccgacgaaagcacgagctgccgattcgcatcctttgacagagcggtttcggcagttgcagatcgtgaacaatatacgggtagcttgccccggggaaaccgagatgcgagcactgaagcgcgccgaaagagagaacgcccttgcttggctgcaaaagcaatctgcgactgttaattttgacaagctggccagagtgctaacccccagaaaggtttctctcatatttggaagtaatgaaaagtgcgcagagattgatttgggggcttggagatttaattatcgtggagacagcgggttgcctggtagtccgttcacggcccgcatgattaaattatttggagaggaatggcgcttcgaacttcaccggcgatatctcaagactggcagcaaaacggaagcgcaagttgttgacgatatatggcatgcaattttcagttttgatgatgagcagaaactgaaggcatttggtgttgagcagttaggcttggttgaggagcaagcggcgttattcgcaaagcgcttggccgggggatatgggcgcttgagtcttgcagcgatgcgccggattatacccttccttgaaaagggagccatttattcgcatgccgtattcatggccaaacttccggatatcctgaaacgaaaggggattgattggaaacaaatcgagggcgacgtcgagcaggctatccgctcagtgcttgatagtcacgaacagtcggcatggtcggagcgggcggcaaacagtttgatcaagacatatcgcgagaatcacgaagacccggctcatttgatgattacggaggcaaccaaactgcgattcatggatgaaatcgaggctgctgcaagactagaggcaggagcggcacgttggggagacttggctgcggatcttcgcaaaggcattatcgagaaaacggcagcagatgttttgcattgggcatctcgcagagaaggctttgtagccgtaaagcgactggatgaacgcgttaaggatatgctgatagaacgctttgatttgcagccgaaagatatcgaagggttgtatcatccttccgaagtcgaatcgtataaagcggccgaaaaagatcatgatggtgttttgcagttggggtcaccgcgaattgattcgattcggaatcctgtttttatgcgggccatgttccagttgcgcaagctcgtcaataccatgctgcgggaaggaatcattgatagtgatacgcgtgtacgaatcgaaatggcgcgtgaattgaatacggccaacatgcgtgcagcaatagaacgcgatcagcgtgagcgccagagggagcgagatcgaattcgttcggaaatcgcgagtctgccgtgtgcccccgccatggttacggatcgggatatcttgaaatatatgctatgggaggagcaggatcgccgttgcctttatactggcgcaacaattgaagtgagtgcttttttgggagataatccggcctatgacatcgagcataccatgccgagaagtcggaggcttgataattcgcgagcaaacctgaccctgtgtgatcgagattttaaccggaaggtgaagcgcaatcgcttgccggcggaactcccgcaggctgaggaaattcagcaacgggtggggctcctgtgggatgataaaattgaagcattgcaaaaaagtatcgagagaaggagatcatcctcgcgatcggcccaagacaaggagacgaaggatagagtccgccgatccctgcattacgaacaaatccagctcagctacctgaaaaccaaacgacgtttgttcttcttaaacgatgtgccagaaggattcacgaatagccagatcgtggacacaagggtaatttgcaaatatgctatggagtttctgaaaacggcatttccaaaggtgtattcggttaaagctggcgcggtgcatgccgttaaggaaatctgggggctggatgaaaagttccggggtgatcacgtgcatcatgcaattgatgcaattgtaaccgcttgtttgagtccatcctggtacgcggaactagctgcgtactaccacgagtatgagcggtatctttacagtgaagccaagcgacccgaggtgccgcagccgtggccgggctttgatcgcgatctgaacgagcaaatcagcagagagttgctcgttgtgcattacactcgggacaatcttttgaagcagacaaaaaaagttgtgcgcagacgtggcaaaatcgtgcgtgagaatggaaaaccgcgatacgcgatgggtgattccgcgaggggatcactccatcaggatacgatctacgcaaaaatcaaggatccgtccgagcagaaaaatggggaatcaggcagcttaaaggctgttgtgcgccggaccttggacaagaacttcaaagaaaaagacttgcgtaatatcgtagacaagcagattcaggccaaggttatggcacagaaagagaagctcaagaagggagagacgatttggttcgacgaatcgaatcggattccgattcggaaggttcgctgctatgcgagtaataaggcaaacagcctgattgaactcaatgcccaccgggaccagtcggcgcatgaacacaagcagcgcagatatgcagccaacgatgggaactacattacggctctttaccgtggtatgatcaagggcaagcttaagccagattggaaggtagccaataatttcgatgcaattcaggcgaggaaaacaggcgactgggaaacgattttgcctgaaatcgatgaaaacggcctgacaagacgccacatcttgaagaagaacacacttgttatattcaaacgtaccgaagacgaagacctgacttcactttcgcaaatggaattgtcgcgccgattgtatcgggtgacagtgctggagcgcgaacgtatcaaagcgatgcatcaccgttgcggtcagccagacaaagaaattgaagatacctccagcaaaattgattttgaaggttccgctccttcaaatttggtgaggctttcagtcaatactatacacatcgctgtagccggtgctgattttaccttggaccccatgggacatattcactggcagaaagtggaagaagatgcttaaacgcacggtagtattcggttcaactgcatacctttcgatgcggcattcgcagctcgtgtaccgttcgaaagccaccgatgcgaattccgaaccggaagaagtcacgataccgatggaagatatcggtgtggctgtgttggagagcgaggcaattaccatcaccgcacgggcaatgcaggggctggttgcgaatggtgcggcagttgtgatatgtgatactgcgcatatgcccgctgcccttgtcttgcctctggacgggaattcggtccataccgaagtgttgcgaatacagacaagggcatcgcaaccattgatgaagcagctctggcagcagatcgtgcaggctaaaattcgaaatcagtctgctttgctgcgtcagttggagcgtggcaatcccgccgctgtgaatgcccttgttgctcgtgtacggagcggggataccgacaatcgggaggcagtcgctgccaaactgtactgggaagatgtattgggtattgaagagtttcgtcggcagcgcgaaggagggggagccaatgccctgctgaattatggttatgccatcttgcgagcggcctgcgcaagggcactggtcagttcggggctgcactgtgctttcgggttgcatcatagaaacaagtacaattctttctgtcttgctgatgatatcatggaaccattccgcccatttgtggatcgcgaagtgaatgcatgcttcgaggccgggagtcaagggcgcattactaagatggaaaaacaggctctcttgggtgtgcttcgtgtagatacgcaatgtggtgatgtaaaacggccgctgatgaatgccatatctttatgtacggcctctttggttcggtgtcttcgcggagagtccaaacaaatgatattgccggagttcgtgtgagccacggtttgtgtttagcagcagatgcctacaggattatgtggttatttgttttttttgatttgccggtacaaacgccagcgcagcgaaagcgagcgacgcgctttcgaaaagatctgctgaatgatggatttgcgatgatgcagtactccgtttacattaggcactgcgcgagcaaggagaatgccgaagttcacattggccgcgtaaaagagtttgttccgccggatggttttgtaagtattatgggaattacagacaagcagttcgggcatattgtcaatattctgggtcgaaaggctgcgcctccgcgaaggacgccagcacaactggaatttttttagaaaagagttgcaacatgtttttctccgtggcatatttacagcgaaatctattcacaataaggctatatgccgaaggatgatttcctatagcctcgccgctactcggtggggcttttttattatgtgtctttgaaaatagaataggatcggtacatttcgatggatgattttactatttattcgcaaccatttcgcatgcaatcctttcgcatacaaatggttacatacggaaggttgtgaatggatttcaatttccgatagggaacacccaggtaatggacatggttcgagacattgtagttgtgaatggatttcaatttccgatagggaacaccttgatgtcgcgggggtagttacagactacgttgtgaatggatttcaatttccgatagggacagcttgg

SEQ ID NO: 3953 - DNA, 16880 bp, synthetic construct
  source 1..16880: mol_type = other DNA
  misc_feature 1..16880: note = Synthetic
gctggctgatgccgtacgcgatagaggcataagcctcccgatgcgaggcgctttcaaaaaagaattgcggctcgctcgtcgcgttaaagggctttttcctgaacccgtaatgcttgcagtacatcggctctaccctactttctccggaaatacttttctaccgctgccgtatccatgaactccggcgcgatctgttcatcggggcccatgatatgcgcggtgatgaaaatgaccagttcgactttggtcatccccttgacatggcgcttgaacaaagcccccagcaacgggatccgcgaaaggaccgggatgccgatgacctggtcggacgccacgtccttgataagcccgcccatcatgaccgtgccgttgtccggaatgatcacctgggtctgggcttcgcgcgtgtcgataatcgggtactggaccagcgttgtggtcccgctggcgccccccaggactttcgcggtcgtcgaataggacgagaccgccgggtgcacgatgaggttgatataattctgcttttcgccccagatctgcggcaccacattgagctggatgccgatgtccttgtactcctgcagtgacccgccgagaatatcgttcgtctgcgtgctcacatcggtcttgatgatagggtacttggtcccgatcaggatggtcgcttcctggttgttcaaggtcgtcaggatcggcgcggagagcatgttcgtctttgaattctcttccagcgcgtgcatgaccacctcgaactgcgcccccgtcaaatgctggaacatgaactgcccgcccccgttacccgtcgtgaggcttgtcgtcaaagggccgaacatcgagggcgtcggcgccagcgcatgcgccgcgaactgggtgttgctggggccggaaaccccctgcagggccgctgtctcagcgcccgtggcacctgtaccccagtcgaccccgaggtccctgagcaggtcgtgattcacttcaaggatccgggtcttgatcatgatctgccggggcatcacgtcaagctcctcgatcaatgccgcgatcttctcgatatgcgcggccgtgtccgacaccacgaggatattggtccgcttgagcttgctttccgacgccgccgcctttttcccggcttcggacccgaactcccagcctgactggccagttgtctcgagcaccgccatcctgccgcccgcggaggcgatcggctggatggccttgagcgcgtcgttggcatcgaggaacctgagattaaagaccttggtcgtgatctccgtctttgccgcgcttccgcccggaccgatggggcttatcatgatcacgttcttatcgcgggtcgcttccaggttataggttttgaggatcacacccagcgctgtttcccagtcaacctgggccagatcgaccgtgaccatccccatcacatcggggcccaggacgatattgacgtccttcccgtcgttcacggcgagctgtttgatcgcctgcagaacgaccctgatatccgtgtccctgaacgtcagattgctgacgctcgccgcgcttgcgcccgtggggttgaacgcgctcaccgcgcccagcatcacaagcacaggcaccatgacccgttgtatgatggttctcatatccgcgcctcctttaaagaattgtcccgcctgccggctaaagccccagctgaaggcacttgtccgccacggcgatgtcgcacaatcgcgccccatgttgagatatttccatgaccttcatcccgctgatcacatcgccggccttgagcagctgcccgttgatcacggccatgggcttatctttgcccgagatgatcccgctcaacgcaaggccctcgacgccccccgtggtgtgcggcctgacacgcagggccgggaccgcggcgatcaacgcctgcctgcgccgcaaggccttcaccgcaaggccatcgacgatcatcatgtgcaatagaacaaggcatacgccaacgccggccagtgcaacgcagcaccagacccggaattcgccgtctttgaaaaatgagtacacgtatttattttccatgatccaaccgcctgtccttcttctgaagctccatggccgcctgatattcattggggccgaccgtggagcggatctcattgagctcctcccgggtcttatggacccccgcgcccaggagcacgcccgcggcagcacatcccagggtcaggagcatcagcgcacggaccgtggccgcgcgcgtgtcatacccgagtacccgggattcgaaaaggtccggagccctcatccttaccgcatgcggcaagctcaccggcaattggacttcgagctgctccggcaggaccgtcagcttttccaccaggctctccctgccccgggtctggcctctaacgaagatggggcccatccgcttgctggcgctgcggctgcagacataacggacagcgttgaggatcttttcctgaagatcatcgtcgctgagatcacaggcttcggcaaacaaggctggtgcgccgtccgcaacgaccataatgcaggcgacattgggcatcaggaaattgaccacgcaatggtcggggcccgccaggggattttttttcaggaaatccacggctgtggctgcggcggcggaagtcaggcccacggggatcagggcgctgtcatggaaacactccaggtattcctccagctccatgcgcgggatagccacacacatgccgttcacaccatcggcaccttcatgggtcacatgatacgcaacggcgatctcgcgcgcaggtacggagaggatctctgaagcttccacgcacaaaccggaacggatatcaccccgggttgccgccggaaaatggaacacccgggtgaggacgtgcggcccaaagaccctgacagccgcaaagcgccgcccgttcactgcgtgcccggccacaaccgcacggagcgcgtcgggagaagctacttcaaatggcacaatgttatccataaacgctctcaactttcctgccacgatggcgcggcatccaggcccgtactcccgttgctctggtctgtcgccatgtattgccctgtgtagggataatataacggctgcgcgccgttcgacatcctggcatcataggtgaaatcacggccgtagccggtggaggaccccccgcccgaactgaatgttcccaccacgccgtacgtctgggatatcaggccgcccaaaagctggatggtaccccgtaaggaccccgaattgtaattatcaacgtacagcccgttccctgccggcgccatcagcaccccctggatgaccaggtcgttgggcgccgtggtggccacacggatatcaccggtccaggcaataagccccaggagattcggggcattcgcattgccggcaagccgcggatcagcttcatacctgacgtggcccgagataacaatatcgttctccgccgtgacggtaagcactgtgtccctttcgacggtcccggcaaaccccgtgatggtccccgcaacatagatgagggtccctccggtctgcgtcatcccgtcggggatcccgctgtaggtcttggtcgtgccgcccgccacggtcgtcgtgcccgccgtgttatcgaccgtcaccgtcgtgagcgttcccccctggcacgcgaagaccgagttgggtgtcccgcccaccctgatgttgtacacagggttgctgttggtaacgcccaacgtcatgcaggcgttacccttgacatagatcccccccgtcacggcgccgccgacattgggaacgtaaaccccgttcgcgttcgtccatttgttgccggtattcggcctgctgttgctgttattgctcacggcgcggtaaacatccgcattgaaggagaccgtgttatcgacgatgtaacttgttgagttgttccacgccgttcccgatgcctcgatcttggaactggcttctgttgtgccgtcggtcggaagattgacgaccgcctgccctcttaagaacccctggttgaaccgcggcacatccgtgccctgggcatactgccagtaacctgtctgcgtatcgggctgcctgttggtgttcgcgacgctgcagcggtatgtcaccaaattatatacaacgttatcattcacggcgtacgtgaaggtattgtcccaggccaggaactggggccgccaatacgcggcctgcgtatcgggctgcctgttgacgttgccggtctgaaggccgcggtagatcaccgcgttgtaggtcacataatcattgatggtatacgttgtcgtatttctccaggccacggcattcacaagtgccgaactggcgcagggattctggtcgcaatccagcaatacattggagccgttgttatagaaccttgccgtggtctgggactgggccaccgggccgtcgaatgtccccccgggaatgcccgcgaaattgaaccggtcattggtatggatcggccccgtataatgcgtgctcgacgtgaaccacacaggatctccgccgctttcaaatacctgggtgctggtaaacaccccgtagcgcgcaaaattctccttttggacatcgacagtgaacgtcgcgtcccccagtttgaggctcctgaccgatgaggtatggtccacgcggcccacggcggtaatggcgtatttgtaataaaaaatgtaatcccctgcgatcagggccggattgttcccgttatgcgcggggtccgctacgaccgtgaccgtggccgcgtacgtaccctgctggcctgatcctaaagatatcgtcatcgcgttagccagcgtgaccatgcctgacctgcccgtaaaaccgccgtacgccgataatatggccagaggatcctgcgcgctctgataggaagtgcactgggcaacgacagtggccgccgccgtcgtgttcaacgcgttcgataacgttgtccggacctgcgttttcaacgcttccctggcctggacagcccccgcctccgcaagccagaaagcctgggccgagctcacgtactgcaccgatgactgcccgagggaggtcgccatttgcagggcccccaggccgatcatggtaaataaccccatgaaactcaaggccatgggcaggatcacgcctctggatcttttcatgggttcctcctcatggcatcacctgacagcgcgaacgctgtcctgcccttgaccccgctgagctccacatggacccgctgtccgtagatccccgcgtcaaaaaccagccccgtcacgcctgtgatcatggcggtattaacggaactgccgcacgacgccgtgccataaaccaggttgccgccggtaatataaaaatatttcgtgtcaacctgcaaacaatgcacggtcggcaacgtcgggactgacgccgcccggcgcaccgcgccgctgataaaatcaatgacgaactgggcgtcatcgtaaacgcccgaccggctccgcaattgggaatagaaagacgttcccacctgcccgatggcaaagatcagcaggatgacgatcgccccgaccaccaggccgaccatgagctccgttaacgtaaacccctgcctgcgcatgatggtcacggccccatataggtttgtaaactgacagaccgggcaccccgggcgggatcattccagctgatcgtcaccgcaaccagtttgacggtgccgacggcgctgaccgcgaccgtccttgttcccgccaataccgccaaaggcccgctcgtcagcgccacattggtctcggcagggcaatccccgccgggaagcaccgcaaaaccggcattcctgcatacttccatcctggaggaagcgatcgatgccgccaggcgcgcattcaggccgctgaaatacaacgcgttcgcctgaaaatagaaagccatcccgcccgcgaacacaatgccaaggagcaggatagcgatcagggactccacgaccgtgaatccccgaccgccatgtcccgaagaatgaggcgccaggggcctcaatacttggtccaggagcttccggcatcggtcgacaggcatatataccctgtgttatccatctcaagccgcaggctggtaatatccccatccgacgctttacgcgcaccatcggtggcattcgtgccgcccggacccgcgatcgccagccccttgctcttggaaccgtcaaccttgatcagataatcctgtccggtaatgctgtcgcacgacatgctgccggccgccgtcacggtgaacgcctcaggagagaaatacgccattttcgtgacctgcacgccgagcaactggctcttgttgcctgtggccgtaccaaaatacaccgcgccgtccgtgatcggcacaagataagcgccgttctgcgaactgtaaacacgctcaccgccgcggatcgaccccaggaccgagaccgcttcggccgcctttgccttcatggtattccccaggaacatgggcgcggcgatcgcggccagaacaccgatgatcagcagcacgaccagcaattcgatcatcgagaaacctgtactcccgctttgttgttctttaactgatctcatcatgatgttctctcctttgttatggtccggctcttaatgtgcgcccgacgacagtttgaatatcggcaaatacagcgcgaccgccacgatcgtcacgactgctccgatgatgacaataaatatcggctccagcaacgagttgatgctgcccaggaacgcgtccacttcctcctcgtagtatttccccatgcgcttgagcatgtcgggcatggatgcggacttttcccccaccgcgaccatcttgacaaggacccggggaatgtcctcgcgcgcccacaaagcttcgctcaaggcggcccccgcggtgacatcacgccggacctcggcgatcatctgcttcaggaaaagattccccgtcacttccatcccaaggtcaagggcccggatcaatcccacgccgccttccagcagcatggccgttgtctggcaaaaacgcgcgaagaccgccttgcgcaggatcttgccgacagccggcacgcgcaacaccatataatcaaccatgaaccggaccttaaagacctgcatcgctttccatgctcccagcccggccacggcaaagcctgtgacgatgagccacccgtggcccaggacaaactggctcaggtccacgacgatctgcgtgatgagcggcaatttaagcccggccccttcaaagatcgtctcgaacttggggatcaaaaaaaccacgatcccggacacaatgcagaacacgaaacacatgagaaagagtggataacggatcgcggccatgaatttctggcgcatggcttcggcgtcttccatataggaagcaagtaccaccatggtcttgcccagggtcccgatctcttcaccggaacgcgtgaccgcgacataatacgccgagaagatctgcggataccgggccagcgcgctcgaaaagttctcgcccccgcggatacggaacaacaccgcctgcaggaccccggagaaatatttattctcaagatcgaccgcgatcgtttccaggcacgagctcagaagaacacccgcgctgaggatcgcaccgagctggcgcgtgaacaccactttttccttgatcgagatccgcttgctgtcaaagatcgccagccagggttctttgcgcacgggcgtgatgctcagcggcttcccgccaagggtccggatcgaatccgccagcgcggccgccgaatcagcgctcatgaacgcccgctcgcgcttgccttccctgttgatggcaatgaattcaaaatccacggtctgctccctggaattcctgggtaacgcgcaggacatcatcgatggtcgtgatgcccgccttcattttctcaaggccgcattccgagagcgtcttcatcccgccggcccgcgccttgttgcggatcatgtcgctggaggaacgccgggtgatggcctcgcggatctcttcattgatcgtcagcacctcgaacagcgcggtgcggcctttgtaccctctgttgaaacatttcgggcagccggtgccgtgatacaccttgaactgcccttccttcaagcccacgcggtcccagacttctttggccacatgctgctccttcttgcagtcaggacagatcttgcggaccagccgctgcgccagcacagcgatgagggatgaggccagaaggaacggttccacccccatgtcgatcaggcggaccggggcgcccgccgcgtcattggtatgcagggtcgaaaaaacaaggtgccctgtcagcgacgcgtggatcgtgatctcggcggtctcacggtcgcggatctcgccgaccatgatgatatccgggtcctggcgcaagatggagcgcaacccgcgggcaaaatcaaatccgatcaccggattgacctgtgactgctggaggaacggcagccggtattcgaccggatcttccagggtgatcatattcctttccgaggacttgatctcattgagggacgtgtagagcgtggtggtcttgccgctgccggtggggccggtcaccaaaatgagcccgtacggacggtggatcgcgcgcttgaattcaagaaggtcttcggcggccatcccgagcagttcaatgcccagcaagggaatggacgtgttcaggatgcgcatgacgatgctttcgccgtaaatggtcggaaagcacgacacgcgcaggtccacttcatgtgccgccacatccatcttgaaccgcccgtcctggggcaggcggcgctcggaaatatcaagcccggccaggatcttgatgcgggtcacgatggccgcgaacatgctcttgggcggggggtcgacatcgcacaggaccgaatcaatgcggaccttcagctccacggctccctgtttaggaaggatatggatatcgctggcttccaggttcacggcctggataacaagctggtgcacgtatttgacgaccggagggtcgctggcctccacccggagctggtcgatcgactcgttttcccaattctgccggaccgcctggtccatgaaactgtcgacctgctcccgcagctggggaagctggttataacaataatcgatcgcctcgtgaagatcagcctcgaacgcgaccacgcgcttgatcttcatcccggtcttgatccggaccgtgtcttccgccaggatgtccagagggtcgaacatgacaagggtcaggatattgtccttcaaggccagcggcaggaccgtgaaccgccgcgcgatctcttcgggcacaaggtggatgacgtcaggggtgatctctttatataatgtcctcaggtccagaaagggcaggtggaaataatcggcaataaagcgggtcatgggctcggggttgacaaagcccatcttgataataatgtcccccaggcgttctttgctctttttctgcgatgcaagggcgatgtcgacctgttcgcgcttgagcaggccttccgcgaccaaagcatcgccgatccggaccccggtcatcttttcaaaagcagccacaacatgcggcgggcccatgacatctgaagttgaagcgttcttgtccactgtttaaccccccagatacaggttaaccttcccgtcacacctccactttgaaggcaagtttgatgtcattttataaacatacggggggattcagcaattgtaccggggtataatagaaaatccccgtcccggacgcgcgcggcatccggaacggggacagggcttcagttttacgggtcgatcacttcgcgaagaacgcctcaaggcctttctggttgggcttcatggcctctatacccggcacttcttcactcatacaaccgaaaatatccaggaactaaagcaattggaattagatttccctcccccgcgagcgaagcgagtgtggggagggacgaagggagggggttacttcaggcaccacaaactgttgccaaataatctacatattcctataatgaaaaaaaggcggaccggaatccgccttctcatttggcgtcgttaacacgacttgttaacgactggacgacttcttaatgttatcaagattatggagaaattcaaatgaaatatcgattaggcattgatctcggaaccacttcgctcggctggtgcgtgttgaaactggacaaaggatcgccaatcgatattgttgatatgggcatcaggatcttcgatgatggacgtgatgctaaaagcaaagaaccccttgctgtcacgcgccgtacagcgcgcagtataaggcgccgtctcgaacgctataagcgccgccgccaaaatttgatgaatgcgcttatcaaggccggacttatgcctaaggacatcctggaaagaaagaacctagagaaacttgatccttacgccttgcgtacccgcggacttgatgaaaaactcgcactttttgaattcggccgggccatctttcaacttaaccaacgccgcgggtttaaaagcaaccgcaaatccgacaaaaagatgaaagaaacaggtcctattaaggaaggaataaaaaaccttcgcagccagcttgaatcaaccaaagccagaacactcggtgaatacttgttccagatcaacttgaacatgcctcccgaagaacagcatttaaaacaacccatccgcataaaacacaacatccctgaatggaatgtttatcctgagcgatctatgtatgaagatgaattcaacaaactctgggagtctcaatcacgcttccatactcaattgaccgattccttacgcgccaagctacaacacataattttctaccaacgccccctcaaaccgcaaataatcggcctgtgtacttttgaagcgggggaaaaacgtgccccgctcgcacatcccctaacgcaaaagttcaggatcttccaggaagtcgccaatcttgaactgaccggcttctcggatacaggtttacacctgacaccagaacaaaagaatcacatcgccgatatgctttgccgaagaaccgacctgttcacaaaagacgggaaattcgctttcagcaaaatacggcgcgaactgaaacttcccaaagacagccgcttcaatcttgagaccgagtcgcgcactggattacaaggagaccataccgcctatacgttggccaaagatgattgttttggggaagcctggttcaggctcaaggacattgaccagaacgctatcgtggaaaaactcctgtctgaagaaaacgataaggagctcgtccagtggctcaaagatcattgccagcttgaagagcagaacgtccttaccattgccgacgtcattctggatgacggttacggccatgtgagtttgaaagcgatccaaaacattctcccgcacctgcgctccgggatgacctacagcaacgcctgcaaagcggcaggttatcaccattcagaccaccggcctgatgagatcctgagctcgctaccttactacggcgaagccatgcccaaagctgtcattggaggaagcttcaatcccgccgaaaaacagcttccggagaaatacttcggaaagatcaacaacccgacggttcatattgccctaaaccagttacgaaaattcatcaactcactgatcgccacctatggcgcccccgaggaaatcgttgttgagcttgcccgcgaattaaaacttggtcaaaaacggctggatgaggtcaacaagacgatccgcgacaacaccgcgcgcaatgaaaagatcgcaaccaggcttcaggaattaagtgttcccaattcatacgaaaaccgcatgcgttaccgtctttgggaagacctttccctcgttccgacacagcgctgctgccccttctcaggaaaaataatatcccagcaggatgtgttctcccctgaattcgaaatagaacatatcctccccttctccaggaccttcgatgacggagcctccaacaaggtgctttccagccgtcaagcaaatcgcgacaaaggcaaccgcagtccctttgaagcttttggaacaagccccacaggttatgactgggaagctattcaagcccgcgcacagcgcctccccccgaacaaacactggcgctttgaaccttccgcgatggaaaaattcgagaaagatgatggctttatcgcccgccagttaaccgatacccaatacatggcccgtgtcgcgaaagaatatttacaatttatctgcaatgccgacaaagtctggggaataccaggtcagcttaccgcgctcttacgcaccaaatggggcgtcaacctggaccacgcgctgggtgcggaagaaaacataaaaaaccgtgatgaccaccgccaccacgccatagatgcctttgttgtcgcgtgtatcacccgcaataatcttgaacttatttcacaggcatccaacaaccccgagcgcagggacaggcttgtcaccaaaatgccgccaccatacgacggatttgaagatcaaggaagggtacggctcacccgccttcttgaaggcatcattgtatcgcataagccagaccataaagacgccccggcggccatatcaaaacacgctgccgtggtcggcttgcacaatgataccgtctatcgcatcgaaaagaagccggaactatttattgatgcacctgtccccaaaggcaaggtcctcatcagcgtcaagaaacccctggttcagctcaactacaagaagatcaaagacatcgctgaccgcaggatccggaaagaacttgaacaattgctctcaaaagctgaagatggcaacgccaagcaatccatcatccaaagctatgctgacgagctgaatatccgcaggataaagatccttgaaatggtatctgaaacttcgatcgtcaatgtgaacgcgggaagcccgaaaccggcccgtttcatggcaccgggtgggaattattgcgcggaaatatatggcatcaacaaaggcccacgcgccggaaaatggggtgtcgaagttatcacgaacttccaggcccacgatgttacgttcatccctacctggcaccgagaaaatccgacggcaaagctgatcatgcgtctttttattaatgatatggtcgcctgggatgagaatggctcgcgcgttataaaacgtgtcagaaaaatgaatcaggacgggcgtctcttcttcgaagaccataacgtcgcttttaccgaagaagacacttcacctgcatctgtcaaacagttgcaagaaaggaatacacgaaaaatatcagtagatattcttggaaagatcaaggatcccggaaaggcgccaacttgtccattattgaaataggtcaggaaaacagacatctccatattgaacgaggtttcttagttatccaggaagaaaacaaggaactcgctcgccttccattcgacagtgttgacgcgcttgtcattacttcttttaatcttacctacacgcatcatctgttaaaaaccctctgcatcaacaacatccctttggtcatctgcggcgacaacttccatccgctcggcatgttattaaattcaaacgggcactaccgtcaagccgaacggcttcaggatcaaattaacgcttcaaaacctttaataaagaacctctggcggtccatcattgaagctaagatcgttaatcagggccaattgctccaacatctgaaagaaaaggccaatgacttgtttgaattggcaaaaaacatcccctctggcgacagtaacaataccgaagggatagccgcacagcgttactggccgcgccttttaggtgagcaattccggcgagaccccgcaacacccggattaaatagttgcctcaattacggatataccatcttgcgcgcagcaatggccaggagtgttgttgccgcagggctaaacccggccattggcatccatcactgtaatcaggctaacccattccaacttgtagatgacttgatggaaccatttcgtccttttgttgaccgagcagtaaaaaatcttcctttaccatcccatgaattaactcccgaaatgaaacgcaccttggctggtgttctaaattgccctgtcattctcaatgacaaaatattcaccctgcaaaacgccattcaggaatcagtttggaccttcgctgcatcattatcgcagggaaagaatctgttactgcccccacgtatggtttttaacaaggttcttcctgatgatgctgattgacgaaagcaaattaagacttatgtggatgatggtcatgtttgatcttcccgtcgtcgaagaaaatgaccggaaacaagcaacaaaattccgcagtcaccttatggaccttggctttgaaatggcccaattttccgtctattttcggttttgcggaactcgggaaggaacagagaaattcgttcgtgctatccgcgcaagcctgccgaccgaagggaacgtctcaatattattttttacagacaggcaattctcagaaatcatcaatattcaaaataaaaagaccatgaaaaatcctgaaaaagctgatcagtatatgcttttctaaccaccttatactggtttttctagcaccacacataaagaaccccttggatcgcaaggggttctttatgagagattctaactacctaaatcttgtcgtccagtcgtaactggccggccgtgcgtgcgttatctggccagattctaactacctaaatcttgtcgtccagtcgtaactatccgaagcggatagacctagaacaagccattctaactacctaaatcttgtcgtccagtcgtaacttcttctgttcgttctcgtttcgacaatgaattctaactacctaaatcttgtcgtccagtcgtaacaaaagaacgtcgcagagcatgaagccatcaattctaactacctaaatcttgtcgtccagtcgtaacgtgcttggtattggtaagtatcagactgctattctaactacctaaatcttgtcgtccagtcgtaactgtaacgtcctcattataaaacctttctttattctaactacctaaatcttgtcgtccagtcgtaactgtgggggaggggattgctattgttgtgagattctaactacctaaatcttgtcgtccagtcgtaaccgcctcgcctgcaggcccacatacatggcgattctaactacctaaatcttgtcgtccagtcgtaactcgggtagaactcgcttgaaaatgtcgtctattctaactacctaaatcttgtcgtccagtcgtaactctgatgggtatcgcggctaacgccgtcgcattctaactacctaaatcttgtcgtccagtcgtaacccagcggcgagtgtgtatgtataaggctgtattctaactacctaaatcttgtcgtccagtcgtaacttgctcaagggtggatctgacacggcgtatattctaactacctaaatcttgtcgtccagtcgtaacgaactcttaatagtcttaaccacggcgtccattctaactacctaaatcttgtcgtccagtcgtaacggttcaaacatacttattaaaactgaatccattctaactacctaaatcttgtcgtccagtcgtaactaatcgtaaccgccccgtcctgcccataaaattctaactacctaaatcttgtcgtccagtcgtaactgcgttgcgttttgcctgtcttgcctgaaaattctaactacctaaatcttgtcgtccagtcgtaaccagcgagaaggtggcgattgaccgtcaattattctaactacctaaatcttgtcgtccagtcgtaacttatggtgttggacaaaaaaatattcaacgattctaactacctaaatcttgtcgtccagtcgtaacgtacgcagaatgtaagaaacgtgccgatctattctaactacctaaatcttgtcgtccagtcgtaacacaaagacccgggcgtatccgtgtcgatccattctaactacctaaatcttgtcgtccagtcgtaacaagttgggcatagatccattgagctgatctattctaactacctaaatcttgtcgtccagtcgtaaccctggcatcattgcgaacagactccaccatattctaactacctaaatctcgccccctcccattccctccccacagagggggagggttttaattgtgccagccgtcttgatcccgtaaacattatcaaaatccccgtcccggacgcgcgcggcatccggaacggggacagggcttcagttttacgggtcgatcacttcgcgaagaacgcctcaaggcctttctggttgggcttcatggccttgtcgcccttgcgccagttggcggggcatacttcaccgttattctcgaagaaatccagcgcgtcgaccatgcgcagggcctcatccacactgcggcccagcggcaggtcattgaccacctgatggcggaccacgccgttcttatctataaggaagagaccgcggtaggcgatccccttgccctcgaccagcacatcataatcgccggcaatggtcttgttgatatccgaaacgatcggataccccacaccctcgatgccgcctttgaccctgggcgtcttcagccacgcgaggtggctgaaatgcgaatccacgctcacggcaacgacctgggtgttgcgtttcttgaactccgcgagcttctcggagaacgcgtgcagctcggtcgggcacacaaaggtgaaatcaagcggataaaagaacaggacaacatactgccccttgaactggctgagcgaaaaatcctggataaccttgtcctcctgaaccgccacagccttgaaatcaggagcctttttgcctacgagtactgacatgaccttcctcctttaataagttgtatgaacgatgccgcgcaacgctgattggtcgatgcaacccttgccgaattacaaaaaataagttatggtgttaccacgctatgctaatgaccttgtccccccttataaaaaagaccgccctgacgctcgctattatcctttttatcttctcagccgggctgttctacgtcaacaagatacttct

SEQ ID NO: 3954 - DNA, 23717 bp, synthetic construct
  misc_feature 1..23717: note = Synthetic
  source 1..23717: mol_type = other DNA
gtactatttttctttgttaatgagtttttcttttattgcttttataggatattggatatataacttttctgagatttcgcttaacttagcttggtatctttctttactcattgccgttcttgcttggttttatacggcacatagtattattgttcctgtgttgttacatcaatggcttaagccctatttttcgcgctttgtttcgctttgttgctttgcgtctatgcttacgttaagccttagcttattccctgccgtttttccttatacgtttagttcaacgcaacttagcttccttactgttttgcaaccgattgatattaccggcgaactagggattgattttttaatactacttgttaatattacgttatttgattttttctttttatcacaaagaaaaacaaaaaactatcatttccttgttggcactttcttagtgatttggctagctataggcgcaggaaaacaatattattggaatactaaaatagagtcgtggcataacataaaaacaattggactagtacaaccaaaccaccctattcaatatgatgatactcctcatagattaggtaataataaatgggatatgccgttagaaatggaaatgagtcaacaagctacggcaaagcaaaagtttgattttttagtttggccggaaggttttttctatcgtactttttataatataccgataagaaatgcgtttggaagttatgttcgagagatgcaaacacctattatttatgtagatatagatcacaaagtaagtatagataaattcaaagaaaatcattatcttgcgtctgtgtatatgaataaacaaggagtcattcaaaataaatactataaaatgaaactagtgccgtttggtgaaaaatcgccttttattttggagattccttttataagagattggtttgctgattttattgaagatggcttgactgctggaaaagaagcgcaaattttccctattgaaaacgtaaaccttgcacctgttctttgttatgagtcgctatttcctttttttgttgttaaagcaattcgcaaaggcacgacacacggtaaaatgttactagtacaatcgcaagacgtttggtacggtcacacaatcgcagcttggtcgcatatgaaaatgtccgcaatacgagctattgaaaatagagttcctttgattcatgtaattaataacggacctagcaatgcatttttacctaatggaaagctaatagcgcatgcccctatgtttaaacaggttgtgcaaactattgctatgccgtttgacgaaacaagcggcggtagtttctttacacaatatccatatacgtttatttctattttagtgctttttactttgttttatattatacaaggattagttgcaaagtatgttaagaagcaataggcttacgatctaaaagtgagcagaagagcgcttaagtagtcgataagttgcattaagaggcaaatctacctggcaagtaaaagcggggcaaattgcttgctttattcgctaattagaagtaataagcaaagcaataaatttagtgctttttactttgttttatattatacaaggattagttgcaaagtatgttaaaaagaagcaataggcttacgagctaaaagtaagaagagcgcttaagtagccgataagttgcattaaggggtaaatctacctggcaagtaaaagcggggcaaattgcttgctttgttcactaattagaagtaataagcaagacgacaaatgtaatgctttttattttatactctacaagaattagttgcaaagtatgttaaaagcaataggcttacgaactaaaagtaagaagaagagcgcttaagtagccgataagttgcattaagaggtaaatcgcaccggcaagtaaaagcggggcaaattgcttgctttgttcacttttcaagataacgtaaaaaggctttacaaaaggataaagtaacccgtccattacacgaataaagtgatttccaaaattagaagtaataagcaaagcaacaaaataaacaaggctaagaattaagaataattgtaaaactgtttgtatgaccctagttaatccaaggataaacagcaaagtaacttgtttagtaacaaatatggcaggtaattgatgagcaactgccgcagtgatagattgaatcgttccaacaagaaagatttgcaggaaaataataaataatagcgatacgtaaggggcaatgctatgacgtaccggaagatgatcgccaatccaacgccatactggtaaagttagtttttctataatttgaacgaaaggacgacgtggatccggttgaaaccaagaaagtaaaaaggcaattaaatgtatccataagtaaacttctagagaaacagatactaccgtttttaaaatagaaaggctagaaagaagcatagtttataatcttaaaagttctaaagcttgcagtaaaggcgaggttttatttagcggcgtagtaaattcacaaccaaataaatattgattgttttttcgtgtaatatgtttaattcgcaatgggaattctacttttgtagacccgccttcttcctgaaaaatagcttgtagttcgctgtctatggtaaaaagttttgaactaagaaaacttaacccggttgcagaataatcttgcaatctatattcttcttggcttccgcgtattttgatagttccaataatattatatctattgtgttgccttactaagatggcagaatcatcaatttcatctgaaaagtcggagttttctaaaaagtcgtctagctctgaatcaatcaaagcgtggtctaattcatcgtcttctatgtttaattcttgctgttcaaagtttaaactatgtgttaaatctttttctaacgacgcaaaatcaacggacggaacaagagtaatatccggatattgcgtttctaacgaaggctcgttttgttttgtttcatctagctcaaaatcaaccggagtaaggtcaaattcttttttttcttccatttcatatagcaattttgaagcaatttcaagatcttttttgctaatagtttttgttttagcaataggcgtaacaacgactttagcattttttgttaagtataacggttcttgtaaatgtatggtattatttgcaaaaatacctttaatagagaacatagataacacctaagataagtaaataatttataagataacctattctattctactttggcaagcaaaacaaaaagaaaattatagatgagttaaagtatagttttgtccggctaaagcttgaatatatccttttaactctaacacagttaaagcctgcattatttcttgatacggtttgttaagattggcaacaatagtatcaatttgcgttggcgttgcttctagcatggaaaggatatctttttctataggcaataaagtttcttttgttgctgccgttgctgtagctggcgtttgcatctgtgtttgtaaaaaagtatattcttcaaggatatcttccggatctaagacaagcttagcgttgcctttttgtatgagtcgattagaccctcttgtaaaatgagaattaggtgcgcctggaaaagcaaatacttctttgccttgttctaatgcaaaattggaagtaatacgagatccgcttttttcaccggcttctacaacaacgactccttgcgagataccgctaataatacggtttcgtaaaggaaaattagaagggataggtgattgtaacataggaaattcagaaatcacggcgccgccttgctcaataatttgccttgctagattagtgtgttgctccggatagacaaagcaaagaccgttgcccagtacggcaatagtaggtaatttcgcctctagcgccgcttggtgcgcaatagaatcaatgccataagctaacccgctaacaatgaccgttttagaatgtattctagctagctttataatagtttcgcgacaagttgttttagcaatatacgaagcttttcttgctccaataaaagcaagcgttaggtattcagctaggttaatagaattccctttttgatataatacaacaggtggagacgcaatattttttagcaaagccgggtaattgtcatcgtcaaagcatataagcgttacttgctctttttcaattaattcttcttctttagcaagtagaggcgaagataatgcctctaagatagcgtttttagtttcggcagtaataaaaggaagcggttctagttgttgccttgaagcagtaagcaccgcgttaatagagccaaattgtgaaacaagtttaagtatttttaccggacctagtttaggaataagccacaaagcaagccattgtttttgtgtagttgaaagcataagtataattataaattatttaacgtaatttgcgctttattagaagaaacgctatttgggaaataggcggtggtttgttgaaaataatattttgcttttgctaggttgtttagttttaagtagctttttcctagcataaggattgcatcaggcgttttatatccgtctatggtcttgccgtgtttatagttttgtaagactgctctaaatgcggcaatagctttatgatagttttttaaatgatactgtgcgcagccaatccaaaattgactattgtcagcatcttgcgagttagggtattgttttaaaaacttagtaaaaagaataatagattttttatatttaccaagagaatagcttttgaatgcttgattatagctagtttgcgcctctggcataacccacaaagaaataggcgccggactttcttctagtaaaggatctataaacttaggaacagtcgctacttttttattaaatgccggtacaggaagaataggctgcttttttttaataggtaccgtattggttgttacggcgctaggtagtggcgtgtttgccgtattaggatatagaggcggtaaactagcttgcgttgttgtcggttttgccgttgctttagcttgctttgttggttgtttctgtgttttgctagctacttttgttggtgttgctacttttttttgttttgctgctaatgcttgttgctttttatgtgctttttgtttttctgaaggcaataagaacactgtttcaattggttcttttgccggtacgttcgtagctaatttattttgtttcttaggcgtttctacttttttcttgcttgttgtgtttggtgctttttttgccggtatagtaggttttccttttttagaaagcaatgaattaaaagcttgtttttgttgtgcttttggtaaagaatgcgttccttgttctacaaggtttaattcgccgttttgtaaaggaatttcgccaatagtatcttttttttgaatttgcggcgttttttcaatttgatcttgtctttgtagatttttttccattagttgtaacgtgatttccatacgtcgcaactgttgtttatattgtttcttatttttttcttctattgtatgtaattctttaattttttgattcagtcgatctatttcttttctatgttgtacgtcgctttgcgtcgtttgacgcggtgcaaaaccagcgcaactagtaagaaaaagtaaacaacaaaagaaaaaaacaatgtttttattgcgtgacattatgatttaaagaagcatattggtttaaaattgcttgccatttttcagcttgtttaggttgcttgatttttttataagcaaggattattttttttaatactaaatttttatctttatatccaggatagtactttaataaatataaataacgagcaatagcagatgcgtatagttcttgatcatagtaccaattacctatattatcttcatgttcggataagtattgttttgaaagagtaaggtacttttgcgaatcttgtaaataaagattatgtggatacattaaataaaaacgttcgtatgcgttgatgatatttttaaatggttcgctacttcgtttagcagcgtacgaatccccaaaaagaatactttttgttttatcaaagttaagttcaataagcttcgcaagtgcataaggaacaagatgactagaagcgttttgccgtaaaaaaatcttataattctcttctgccgttttaatgtcgtctgcggaacttccttcgcgcatagcaatatcaccaagttttaaataagcataatttgcatattttgtttcaggatagttttccgtaatatcagaaagtaaggttttagcctgggtatagttttcaatatcaatataatataaagctaagttatagttagctacaatagtttttgcccctacttgcgtttcagcgcaactatttagcaataaaaaagaaaatattactaataaacaaaaaataggtcttatacgtataggcatcattttaacaagcataaaaaaagaaagttagttaactagactatgatatataaaagagtttaaatttatatatatacataaacatattatatcatgtatactacaaaaatacttttatgtatagttaaattctgttatatatgttaaaaaccattgtagattaattaaatttttgcacgctaatgttattttcttatttcctttcttttttatattttatcattcctattgccataatgttatttattccctatttaactttactccatatttcgaaaaatgaaaaaaagagagaatgggttaaacgacaattttggctacaacctaattttttaagtgcttcacgttatcctatgggattcgtatctattttaatatacttttttggagaaatgagcgggcatgtatggataaaatattttgctatttattggttttctttttggttagtaactgatttactagacggcgtaattgctcgtaaatttgaattgatttcagagaagggaaaaattttagatcccttttctgataaattaatgttgtttccagcgttgttttattttgcttggtacgacgatattagtatgtcttggttattagtattttttgttattgatattatcgggcaatcgtcacgttattttattaaaaataaatcggctaatttatttggtaaagcaaaaacacccatggcggcttttgttttgttccttgttattgttaatgatctagatattatccaaattactaagttaagtccggatttgatttccgtttgtttatatgcaacgattgttctagctttatgtagtttgatttttaaggttattcctacttattggtatgctaatatactgagtttgttaaatatgacttgtggtattattggtatttaccttattcttttttacaataaaacagaacttgcctttgccgcttgttttattggtcaatttttagatttgtttgacggtcgcgccgccatgaaatggggaagtacgcctaaaggcgcttggtttgacactgtcggcgatgccgttaattttggcggtaccggtagtttgcttatttattactcgtttcaaaataaaacaatcgctcttatccttgctttaatttacttatttgctactctttttagattaattcgttatactgtgaataagtctactacaacgtatcgtactgaagaagaaaaacaaaatgccgcgttaagcttttcaggcttgcctgcgccggcaggtatgctttttattggaagcactgctctacttgctttaagtacgtacacaaaaataggcttgcttattgttgcttcttttttaatgatttctaaaataccttttgctcattttgggcgacttgttcttcctaatctttcaccgattcagactgttgtcggcttattactttgcttttttattacggcacttagcttgctaactaaaaatacgcagtggttatatagtttccttttgtttgctttattaatctattttgtctatggttttgtctttttacataaatataaaaaatctaattaatacgtaagcctatgtctgttataaagcaaattcaagacgtccttgctttagaagaaaaaactttgcaagacgttcgccttcaagttaattcttcttttgaaaaagcagttaacttattatataatacaacaaatatagtttgtttttttggcgttggaaaatcctatcatattgcggcaaaaatagcttcaacgttagcttcaacaggaacaagggcagtttgccttcatccttcggaagcgcaacacggtgatcttggcgttgttcgtgaaaaagacactgttgttttattaagtaaatcaggggaaacagaggaaatgcttcagctgcttccggcattacgtttattacaatgttctattatctctatagttagctctaaagaatcaaagattgctaaactagcggatattgtgttatacgtccctgttaaagaagaagcttgcgccttaaagttagcgcctacttgttccactacggcaatgttagccgttggcgatgcccttgcggttgtgttaatgcggaaaaagaactttacaaaagaagaatttgctttacgccaccctgccggttctcttggtaagcagcttttatacactgttaaagacgttatgagtaaagacgaaatgaatcctaccgttttattatccgcttcgtttgaaacggtgcttgatcttattatgcaatataaaatgaacgccctttctgttgtgaacgaagcaaacgaatttcaaggcatgattacaagttatgatattcgtaaaacgttaaaacaatatttacatacaaaaacaaatctagaagagcaaactgccgccactattatgaataagcaagctactaccattgacgttactatgcttgcgctacgttgttttgaagcaatgaaacgaaaacagctacctaaaatagtaccggttttacaagagggcaaaacagtaggcatgcttagtatagatcaacttttattagtcggcttttaacaatgaaacgtatattttatattctcataggacatattttagcatttcctttttatatgctaacaattatacttccctataaagcgcatattactataggaaagttactaggtcttactttgtataaatgtaaattaagacgctctatagttgaaaaaaatctccaaatcgcatttgaaaaagagaaaacaaaagcagagctgaaagaaatttgtaaacaaaattatatagttaacggtattcaaatatggatatatgctatacatgctttacgttttacaaataaataccttgccgctattttagatctagaaaaagcgtgggaactggtaagagaaaccacaaaagatgatcccggatttgttggtttaaatatgcacactactagcttgatttcaagttggcttacgttaacactaccaaaaacaaagacacaagagctgtattatttatatgcttcacgtaatgtttttatagagtataaatattctaagtcagcatataaaagaggaaagaaaccaattaatcgctataataaaaagcaaatgatggatttaatacggaactttagaaatgataatacggtgatttatacggcgttagacacgaacgtgccgaataaagatttgtttgttacgtttttttcaaagcaagtttctattggtaaacctatgtttgaattgattataaagcataaaaaaccggtttacctgatgcatgctgaataccaagggaaaaatcagccttcaccttatattatacaaatgcagaaacttaattatactattacaggtgataaagagaaagacgtacaaaatcttgcatctttatatactagtaaaatagaagagtatgtaaaaacctgtccggagcagtattattgggttcatagacgtttcaaaacaagaccggacggcgaagccccaaggtattaagtaagtttataaaaactacgacaacatatgcaaacaattttttaacgtgcctttttttatgtaaaatcattttgttcctgttatttattaaatatctgtttacaaaatgttaatatattgttatataaagataaagttattatatatggaggaaaatggaatatattcttggcatagacataggaacggcatcagtaggcattgccgcttatgaactagataatgataaagataataagacaacaaaaaaattattacatttagatagctatatctttaaagaaccaacagagcacggacaatctggctatgctcttaaaaatcaaacaagacgggaaagaagaatggcgcgccgtcaaacccagcgaacacaaaagcgatataaaaaaatatatttattttgtaaacaacatggattttatggcaaagacggcacagatgattgccaacaagacgttattaccttacgtgctaaagcagtcagtgaaaaaattcctctagacggattagcaaaagttttgcttcatatggctaaaaatcgcgggtattacggtgattttaaacgtgctacagacggaacagtcgctaagtcaatccaaaaagtagaagcagagattcaaaacaaaggcgtaaagacgttagggcagttatggtataagcgcagagaagacgctaagcaagaacgtaaagcatggcgtaatattgagaaaaccggaacttatacaagtcgtaagatgacagaagaagagttcaacttaattttgcaagaacaacaaaaacaccaccctattcttaacgataatattaagattgttaacccttgtatttttcacgacctttataaagccggcgagtctgttcctatggcagacgtgttagcgcatattttactataccaacgtcctttaaaatgggatacagaaacaataggtaaatgtccttttcatgaagatgagctacgcgtttcacgtgcttcgccaattttccaagcgtttcgtttagaacaaacgttagctaatttacgttataaagaacttaattctaaaaatgaagataaacaaaaagcgtcttcttggcagcacttttcagcagaacagttacatgcattgcgacttttattaaatcagcaaaaagaagcttcatggagtaaagtatatgctacgcttaaactagatgacaaagaagttaaaattaattttgatcgtcgtccttcagaagataaacctttatcaggaaacgtaacgaattacaatatgaaaactttaaagcttactgataaatgggaagctttaaacgaacaagataaagaacttgcaatggcaattgttgctaatataagcgatccggaagcgttaatattgcctgaaatggtagattgtgaaaatctagaagagcttgtacttgaaggtagcgagaaatacagcttgccaatagctaacctagaacaggttatgacttttatacaagctatagctaatcataagaaattagggacagttacgcaaatgggctttactgctggacgtgcatcgtatggtcatacaacattgaaagaacttattgctcttatgcaagacggtttagctcctgatgaagcgaccgaggcattacgtaaaaaatataataaaagtgttaaacaagacgcccatttagaattattagacccgcttgctcaatacttacaaggcgatgatttacgcaatcctgttgtcaaaaaatcattagaagagtttcgtgttagctttaatcatgctattcgcaaatgtaacaaacaaggaggcaaattaacgcgtgtagttatagaaatgagtcgtgatatgaagcaatctattagcgatcgtagcgaagatgaaagggaaatgggtaaacgtcgcgctatgaatcaaaggattttgaaagagctagaaaaacacgggcgagcactagtagggaagactgatattttacgatatagattatatacagagcaatggcatcagtgtgcgtattgtgggaaaaaattcggtttaaatgaaatctttggttataatgcagaaatagatcacattatcccccgttctaaaggcggaacaaatagacaatttaacttagctttagtttgtcgtgaatgtaatcagaaaaaaacgaatcttacaccttttcaagcttatgaatcgcatattttttctgattctcagtgggctagtattatgagtctagctaaatcttggattccagacgataaacatacgcaactagaagaagataagtataaagctaagaaaggaaaaaattacgataatcaaatgcgcgctattttattagtgagtaaaaaaataccggaagaacgaactaatacgtttaatgattcgcaaaatcaagaaactgcatgggtaggtcgtatagtacgtgattgggtaggaacggtatgtgaagacgttcgtgtaacaagaggaagtattacagctcatttgcggcaaatatggggtgtagatcaaattttgcctgagttacgtagacaagaaggaaaaccgcttttgaatgaagataaaggattaattacagaacaagaatataaagcgtttatatctaaacgagatgaggtaacaaaacaagaattagaaacacgtcattatttacataagtttgataaacggtgcgatcaacgtcatcatgctattgatgcggctgtcattgcacaatctactacttctattttgcaacgagccaccgatcatcgtaaaaaatatgattcgctttggaaaacgactctttattttccagctagttattataatgctcataaagatgaatataaagcttatcgcgaagattattttacaagtaaagccggtaagcaatgggtaaagataaaagtggaaaaatttaatcccgggaagcctcataataattttgtactcaatttgaaacaggctttacttcattatacagtatggtcaaagccggatcgctttgcgtcaggtagcttttttcaagaaaatccatcaggttaccgtacgtttaatgatgagccggcattaacgcagcgtattacattacgtgatctatatgataaatgttgtaaaatgaaagctaaacaaaaagatatagaatcagatcaagatattactgaaaatcatttgaaagttttctttcattatattattggtgataatttacgtacttacttaatcggtaaagttaaagaacgattaaacgaaggtatgagttttcaagaagctttactaggtaaaggcgtctcattagaagaaaatacagacggaacagatgaagataaaatagaatcctttcttccagacggtaggcaagacggaatttattttccagaaaatacgcaaaatcgtttacataaactatattattggcaaggtaattataatcctatacagcataaaagcgttatatatggtgagaaagaaaaacaacgagctatatgggttgctaataattatgcagcattaaaagctaacgtagaaacaaaatcatggaagtttatttcccaagctgattttgaacaagaagtatatcaatatgaatcaccaaataaagatagtaaacaaaaacgtgtttataaaggaggtacgtttaagcaaaacgaaattatttttttcaaaagtcaaatgatttttcatactgaaagtaaacaattttatattattacagggttaaatagagcgcataattatatagaagctattcttactaatgaagattattctgcctttagtaaagcaatagcacaaacaggctatgtacatacaaaaaataagcgtgctggtgttacttttactaagtcagttattccaattcttatccctgttcactcaagggaagatatggttcgtataaaaaaagaatacggtatagcataataaaattatggcaaacaatcatattattactttatcttctccagcttatatacatgttgatttaaaacctgttgttattgaaaataaaaataattataagactacttataacgaaagaatggaaaaaggaatgttctatgaagattaatgtaaataatacaaaaaaaatagttttttcagaaaaagaggctatcgatatatttcaaatgttaaatccctattttgaagacaatgagaaatttttattagaatctttaagtggaccaaaaaaagattgtaaaagttctataatagggctttctcctattttaaaccttagagtttcaaataagaaaatatatatttcttctacatatctgttagatagtataaaaaaacaattagaagaaaaggttgaaatcaaagaaaaaggagaagaactacaaatagcaatacaaaatattcaagaactttactttacaatgaaagaaatagagaatatttttattcaaaaaaaacaaataaaaggtttagagtcattaggttggtttggttattttggttatgatactattttttatatagaaaatatcaaacaaagtattccaagagattgtgagatcccagaaatagaactttcaatttatagtacgattctcaattttgatataaaaactaaaaaagtagaactttatcatagttcaattaaggaagtaaataatgataaaaatattaatttaattgaaaaaatattggtagatgaaaaaaaggaaattgttgatacaatttcaaatgaaaaattcaaatttaatgtcacgccaacagtaaataaagaaaaatacaaagaatggtttaagaaagttaaacatcatatagatattggggatatctatcaaatccaaataggtcatgcactaaagataaaaagcaataaaccgccttatcttacctatttagatatgagagaaaaaaatccttctccttatatgtatttctttacaacaaacacaggtttaactttaataggagctagtcctgaagtttttattaatattgataatgacaaaaaactagttatgagacctattgcagggactataaaaaaaggaaattctcaaattgaaactgaaaataatagaaaaacattattaagtgatgaaaaagaaaaagctgaacatttaatgcttgtagatttatgtagaaacgatattgcaagatgttgcattcctcaaacgctaaacgttgatgagcttatgattttagaagaatattctcacgtcattcatattgtttctgatattcatggaacagtagaaacaaatttaactaaatatgatgttatttcaaatacttttccagcaggaacgatgacaggaacgcctaaagtaagagctattgagttaatagaagaaactgaaaacttagaaagaggcacttatgcaggaacaatcggattttttggatttaatgattttgtaatttcagccctttgtataagaactgctagttatagagataaagagtattctatcagagcatctggaggaattgtagaagactctacggctcttggagaatggcaagaaacgattagtaaactaagttcaccgtatttagctataacagggagggagttaagaaatgaagattttattaattgattcatatgatagttttgtttatatcataaaaaattatatagaacgtttaggtcacgaaactcatattgtaaggaatgataaagttaaattagaaacgttacatcaatataatttaattatattaggtccgggtccggggcatcctcttgaatgtggctatcttgaaattataaaaaaagttgaaggggaaattcctattttaggtgtttgcttaggtctacaagctattggttgttattatggttctaaagttgttagagccgaaaaaagactccacggaaaaactagtttaataaaaaatgatcaaaaaggatgttttaaaaacttgccttctatttatgaagtggcaagatatcattctttaattattgaaaaaatagaacctaatcaagaaattatatgtagtgctacctctgtaaatgataattatattatgggggtaaggcataaaacacatagcatcgaaggtgttcagttccatccggaaagtataaaaagtaattatggattacaacttatagagaattttatagaaaattcaaaaaaagggagtctttaataattattattaaaaataagaactatagaatgttacttggatttttagcatgtttattatggtcaacaggatttgttggtgttaagtttagattaaaatacatagattctcctttactttttgcaggagaaagattttttctagcaggtctttttattgctcccttttgttggggaaaagattttaaaattattatgtatatgactatatttaatacaattttaggttattttgcttatgctaaagcaacagcacaaacaggctatatacatacaaaaaataaacgtgccggtactacatttaaacaatcaatcattccagttcttatccctgttcacgcaagggaagatatggttcgtataaaaaaagaatacagtatagcataataaaattatggcaaacgatcatattattactttatcttctccagcttatatacatgttgattcaaaacgtgttgttattgaaaataaaggtaaagaccccatgttttttgcacctcatgatattgccgtgcttattctcgatcatccggctcttgtgttaacacatgaagtttttcgtgtattagcagaaagtaatgctattgttctatcttgtacacgtgaacatttgcctgatactatgactattcccttgtttaagaataagcagggagcacgtaatgcattttatcaaattaaagcaatgaaaaacggcgtttataaaaaagcgtggcaacaaataatccaatctaaattatacggacaggtttattgtgcagaaaagcttgcgttacctaatttatattatttgtatgatcgtgccaaaaaagttacgcttgataatgcttatgaacaagaggcatttgccgcaaaactgtattggcaagctatatttaaacaaattgaaggagctgatcgccgttataaacaaggagcagaagatattattaatacaagcttgaattatggttatgctgttgttcgtgctatggttgcaagaagcctttgtgcgcacggtttagtgttaaactatggtgtcggtcatatacgtaaagataatccttttaatttagtagaagattttattgaaccctatcgctttcttgttgattcaattgtgcttcctggtattatacaaggtaagatagtcggcgatgagctttctcctataacgaaaagatatattttatctcaaattgtagagtttcagcctgttttaggaaaggcaacttatcgccttttacatgggatagataaaactattactagcttttgtaagctattagaagtaggtcgcggtcaaattgaattgccaaacaaaccgcaaaaaggaagaccaagtaaaacctttcctactttgaagcatacagttgtatgaaaacaagtttcaaaattatgtgggttcttgcaacttttgatttacctgtaaaaacgaaactagaacgtaaacgttatatgcgttttcgtaaacaacttcttgcagagaactatttacacttacagttttctgtatacttaaagcactttcctacgtttcatgctgctcaatctaatgttactagattaaaacatagtatcccaccaaatggaaaagtatgctttttttatcttacagataagcaatatagcatgacggcaaattactacggaccttatatacaaagggaagctttgcctcaaaagttaacgcaagctcttttctttgataatgaacaaataacaatggacggagcattagaagaggacgtaacgaaagttactaatgaaatggagcaaaagttttctatagagcaagtaattggagaaagtgaagaagaaagtaatatagagcaacaagtaacgttaactgaattatgggatcaaaacgaggtagagcctgttactatacaaagtacgcaaaagaaaaagagaaacaaaaagcgattgtctcatcaaagcacaaatcagcaaataaaattttagtatatgactaaaggtagtatataaaataaaagactccatttacagaagccttttatttttagattgtaatgatatgaaatatcttatctacagagtaagcttacgctatctccttattaccgaaggcgtgttttcttaaatagtatataagtatagtactatatttatcaaataaaagataattttatagtaggaaatattttattactaaaatagaagaccccattttgtagaagtcttctatttttagattgtaatgatatgaaatatcttatctacggagtaagcttacgctatctccttattaccgaaggtgttttcttaaatatagtatactagtattatattatatatgtcaaataaaaaattatttattaaatttaactttaattttcagtgtttttgttatataaaaacagattatttaataaataaattcaacatgctacatatttagctagtctagcacactatttaagaaagcacaatcggaacgtatttgtccaggtctccagcctgattttgagtctagcacactatttaagaaagcacaatcggaactcattttttgcgaataattcgccgttatcaagtctagcacactatttaagaaagcacaatcggaaccagcaagggaaacagtacctaataatgttaagtctagcacactatttaagaaagcacaatcggaactatgatttccttggtaggttttataaatatagtctagcacactatttaagaaagcacaatcggaactttatatgaagaaagagacctacaacttttagtctagcacactatttaagaaagcacaatcggaacaaagccttgataacaagctcggcattggcaagtctagcacactatttaagaaagcacaatcggaactcgataaacaaaacaaatcgagaaagcattagtctagcacactatttaagaaagcacaatcggaactcaattaacaaaacaaaccgagaaagtattagtctagcacactatttaagaaagcacaatcggaacagcctacctcatatcgcccaccttgcatttagtctagcacactatttaagaaagcacaatcggaacgcttaagtcgtgatgttcagaattaatgccagtctagcacactatttaagaaagcacaatcggaacatcgcattgccgatcggtacgtacaataagagtctagcacactatttaagaaagcacaatcggaactaaaattcttttgtagttggattgtgtcttagtctagcacactatttaagaaagcacaatcggaacataaagttgcgtcaaatttaattttatggaagtctagcacactatttaagaaagcacaatcggaacctaaatatgttactatgaaacaacgtgctaagtctagcacactatttaagaaagcacaatcggaacttgtgtccttcttacattcgaaataattaaagtctagcacactatttaagaaagcacaatcggaaccgccaaataaaaaaggattgattttataagagtctagcacactatttaagaaagcacaatcggaacccgctggttctcttgctgattatttcggtcagtctagcacactatttaagaaagcacaatcggaacagttacgtcttgttggtgctattgacgactagtctagcacactatttaagaaagcacaatcggaacgacggtgctgttcattactttggtcaattaagtctagcacactatttaagaaagcacaatcggaacgatgtactctatttagaaagtctttttccgagtctagcacactatttaagaaagcacaatcggaaccgttaacaggtgttaacctgtttaatttaaagtctagcacactatttaagaaagcacaatcggaactaactaagtatgcaaagtttgattgggacgagtctagcacactatttaagaaagcacaatcggaactaaataatgttttcatttttagtctcttttagtctagcacactatttaagaaagcacaatcggaacctacaattttaatttttgaataaggtttttagtctagcacactatttaagaaagcacaatcggaactcttttcttttattaaaccagtcctgtgttagtctagcacactatttaagaaagcacaatcggaacagcaagcggaggtagcttaattaaagcagtagtctagcacactatttaagaaagcacaatcggaacatgggatttgaacccataataccggattgaagtctagcacactatttaagaaagcacaatcggaaccaagaaggaaaatggaaaaaacaactaaaaagtctagcacactatttaagaaagcacaatcggaacaagattacagagatatagcaccgcttgcgaagtctagcacactatttaagaaagcacaatcggaacaagattatagagacgtcgcaccgcttgcgaagtctagcacactatttaagaaagcacaatcggaacatatcttgtaaaatagcttcaatttctttgagtctagcacactatttaagaaagcacaatcggaacatagtagtatcaatttcagctccgctatttagtctagcacactatttaagaaagcacaatcggaaccccgtacttcttttatatttttttcatttaagtctagcacactatttaagaaagcacaatcggaacttgtggaaaacaaggcgatgtaataaatttagtctagcacactatttaagaaagcacaatcggaacactttaatagatcttacattccccttacgaagtctagcacactatttaagaaagcacaatcggaacaaagaaacgcccattgttttggacgcaacgagtctagcacactatttaagaaagcacaatcggaacagagttcatatatagttcagcaaatgctatagtctagcacactatttaagaaagcacaatcggaacaaattatcgttaagacttgccgcaactccaagtctagcacactatttaagaaagcacaatcggaactggggtacttagatagtatatattaaaattagtctagcacactatttaagaaagcacaatcggaacctttacgaacgtcactattatttattgttgagtctagcacactatttaagaaagcacaatcggaacaatgcggtgtcaagtgtgtaggtgttacctagtctagcacactatttaagaaagcacaatcggaacatagtagtatcaatttcagctccgctatttagtctagcacactatttaagaaagcacaatcggaacttgtttcacaaatcgccagtatagtataaaagtctagcacactatttaagaaagcacaatcggaacaattttcacaccaaacaacgcgatcccgcgagtctagcacactatttaagaaagcacaatcggaacacaacagatagcacatgtatataaaaagtgagtctagcacactatttaagaaagcacaatcggaactgtaaatttacctgtacgatttactattgaagtctagcacactatttaagaaagcacaatcggaacaagatagaaagaagcccgtctaacgacacgagtctagcacactatttaagaaagcacaatcggaacgactgttcttaagcttaaactaaagcggctagtctagcacactatttaagaaagcacaatcggaaccatcagcgctaaatgtttcgataaaataagagtctagcacactatttaagaaagcacaatcggaacattccttgtttaataacgccgccttcttctagtctagcacactatttaagaaagcacaatcggaacatgcgcctgaaataacgaatgcaagcatagagtctagcacactatttaagaaagcacaatcggaacaagtgtgtcttaattttaactataatttatagtctagcacactatttaagaaagcacaatcggaacatattataatgtcgttaaggtagcttaattagtctagcacactatttaagaaagcacaatcggaacgattgtctttcgctttttaatcctatttttagtctagcacactatttaagaaagcacaatcggaactcttttaatagcattttgaatggaaccagaagtctagcacactatttaagaaagcacaatcggaacaaattatcataatgaaaagcaaccggatcaagtctagcacactatttaagaaagcacaatcggaacaaggtattttagcggtcacatctatagcatagtctagcacactatttaagaaagcacaatcggaactaaaccactcatgattattcttagctacctagtctagcacactatttaagaaagcacaatcggaacctgtccaccacgttaaagaatagtcatagcagtctagcacactatttaagaaagcacaatcggaacataaactaatacccaaagaagcaacgttaaagtctagcacactatttaagaaagcacaatcggaacgcagtaggagaaattgttgctagcaatggaagtctagcacactatttaagaaagcacaatcggaacatataaaggagctcaagaagctaacgctacagtctagcacactatttaagaaagcacaatcggaactttgcctgttggcgttgttcctgatggcatagtctagcacactatttaagaaagcacaatcggaacaaaattcgtttcatgatgtgtgcagagtatagtctagcacactatttaagaaagcacaatcggaactcgaattgagatcaaaaccattattttttaagtctagcacactatttaagaaagcacaatcggaacaatctaaattaacaaccggcatgcgccataagtctagcacactatttaagaaagcacaatcggaacgtggtatttttagcggtgtaggcaatgcttagtctagcacactatttaagaaagcacaatcggaaccgcgtgtcggtgtctagctcgtagcactggagtctagcacactatttaagaaagcacaatcggaaccgattggaacatataataaatattcaaaacagtctagcacactatttaagaaagcacaatcggaacacctatcggatactgttgtagtctacctgaagtctagcacactatttaagaaagcacaatcggaacatatgtgcccgcgcttcgggcgataggtgtagtctagcacactatttaagaaagcacaatcggaacatggctattgaagcaaacacttaacccaagagtctagcacactatttaagaaagcacaatcggaacaaagcttatagtttagataaacaaaagaaaagtctagcacactatttaagaaagcacaatcggaacctttgttttgattgtgcaaatcgtagtacaagtctagcacactatttaagaaagcacaatcggaactcaacgcattttcaacgcgctcagtttgtaagtctagcacactatttaagaaagcacaatcggaactaaataaagggaatgcaagcggcttgtattagtctagcacactatttaagaaagcacaatcggaacacctaactatttattgtctaaatatgctgaagtctagcacactatttaagaaagcacaatcggaacttgcgctagataaatgttgacttgatttttagtctagcacactatttaagaaagcacaatcggaacagcgcaagcatttgcgcttctttttttaaaagtctagcacactatttaagaaagcacaatcggaacctcattatattttttcgaacggaaattttaagtctagcacactatttaagaaagcacaatcggaaccaaaatcaagtacgctattaatcggcaacaagtctagcacactatttaagaaagcacaatcggaacagttacatgatgtc

SEQ ID NO: 3955 - DNA, 23810 bp, synthetic construct
  source 1..23810: mol_type = other DNA
  misc_feature 1..23810: note = Synthetic
aaaatggataatacctgcgcggggtcggaaaaagccgattcattatccaaaatggatatgggcttgatatcaaggaagtctttgtctttcttacaactccctgcacccatcacggcggtgaacaatatgaattgaaatatctttttcatgtgctaatttttattttttatttgccacacggaattcgcccatatcatcttcttttctacatagtatctccatggctcatttcatgtgataatttttatttagaaggaaagatttacgccaaaattgaaaaccctgctttgcggaaactgcagcccgttttcctcatttacttccggatccacgccaaaatctttaaggttatcaatagcgaaaaggttatacgcgtttacataaatgcgggcctgctgcattttaatgcggctgatcaatgctaccggcaaagaataaccgagctcaacggtcctggccctgatgtattttacattgtgcgcccaaaatgtggagctgttgttatagttcctatgcccgccgtcattaaagcggttagcgggatatttaccggggatccattcgctgcccatatccttaacatcggcacgatgccaccggtcttcaaaaatggtattgaaatttccatcgttctgaaatgcccatttcatttcccagttctggtaccaggtatagcctgcacctcccgaaaaatcggcatgaaaatcaaaatcatgataagccagtgcgatattaaatccgaagttgatattgggctgcgtaccaacgccatagcctataggacgctcatcgtacccgtcaatcttcccgtccttattaaagtctttgtagataaggtctcccggcagcatcgttctgttgccctgtccgtcaatattaaccgggtagttattgatctcttccacagaagcaaattggccgatcacttcatagccccagttggttttcgtatatcgcccttcctgcgaccagcgatactgatcccaggaattgaagaaaagtgggttgtaggacgacaggaatttggagcgggagtaagatatatttgcccctgcagaaacggttatgtctcttactcttccattataattgagggaaaactcctgtccaaactgtgcatcgctgttcaggttttcacggggcagggtatagccgatttctataggcgtaagtacatcgtttttaaccgctatcagtccggagcgtttccggtaaaaatagtcgaatgtgcccgtaagctttccattgaacaatgcaaaatcgaaccctatatcggtgatcctgctttccagccatgaaatgttggtagtggcaacccccctgtctcttgagccaacaatgggtctgccatctaaaatagcaatgccctggttatagttgtatccttctatatactgaaaaggactgagccccagtgaagagccatcatcacccagaataccataggacgccctgagtttcagatcgttcagtatattcttatcacccagcaatctttgcataaaagattcttcggtaattctccatcctattgatgcggaagggaaataaccgatcctgttgtccggcggaaaaatataggacgcatcgcgcctgcccgccagttccaggaaatacctgtcattataagcatagttaaccctgcccacataacctaccctcgcttctttatcatcactgtcatcgtacctgtcggccgtactaaaataaatgagtggcagcgcattggtactgggaacagaatggatccagttgcgtaagcggttgttgagtatccgttcattaacaatggtggcagatatattatgcaggccaaaagaccggttatagttgatctgcaactgcgtggttttgttgatctgtttgatctgttcacgctcccgccacggattggtgctgcctccagtggctttataggaatcctcagtagcatcataggtataggtattgtacgtgtattcgtgattgtttaacaggtagtcggctatataataagaatacacaccgtttacagaaagtcctttgatccagggtatctggtattcggcggtaaaattgccctgcagcacccgccagtcgttccggtatttacccgcgttcttataattgaggtaagcccagttggtttcgttgtgttttatatcgttcaggtattcgggattatcgttggcgtaaggcctttccaaaggggtgttccttaaaatggcaaacctggccaaccagtaatcatccccaccgggaacaccggggttttcacgactttcaatcctgccgttaatactcatacctacttttaatccattggctactttggctgtaacatttgactggatattggtacgcatgaatttatattccctgcctaaaggggagttctggtataagttggtggcggataaataataattcaatttatccgtgccgcctgtaacattcaggttaagcgaattgagcggggcgttaggcttcaaaataaaatccttccagttaaagcttttatatcccggctctgttcccgctttgtatttttgcaattcttcatcggtgatcgtagtactgccatacctgttgatctctgcctctgccctgtagcgcatatagtcgtatgaattgttgagtacgtcaggaaaacgggtccagttctggaaacccaggtaagaatcaatattgatgcggttggccgtattcaatcttccctttttagtagttactaccactaccccattggcggcacgtataccataaatagcagcagaagcatcttttagcacagtgatgctttcaatatcattgggtgcaaggttattgaattggcccgcatcctgctgtataccgtcaataacaaaaagcgcatcgcccatgttcctgatctgtatattggcacttgcgcccggcctgccatccgccattcgaaaggatacaccgggcaatttacctgccagcgtagcgctaaccgtggaagcgccatgtacccttccaatatcatcggcggtaacggtagaaatagcgcctgttaaggattgcttcttgcgggtaccataaccaataactactacttcttccatgctggcattcgctgcctgcagtgtgatcatgaaattggttttgtttccggctattacttcgaggggctggtaacctacggaactgaatacaagaaccgaccctgatgaactgatgttcatcgtgaagttgccttccacatcggtgagcgttgaattttgggtacgcttttcagtaaccgttacattaaccaaccctgcgccgaggctgtcggtaaccttgcccgaaacagcaatggattgtgaaaaaacgggagaaagcaatgtaaaaaagatgcatgcggtaaccagcatttttttggagtgcgacagaaggatttcaattgctgaaatgcgctgccgcgaagttctggcaataacttgtacattcatatggcagttaattattattgacaatctttaaaaatggaaacgtttccattttttggcactgtgaaggacgaaagaatatttttaattgattcgctcaggcgtctcaatgtttcttcaaattgtatcaaatctcaaataattataccttcgtttacaaccattactactgtgaaaaagaaagtattactactggtaacgattgcatttgcttactgcttcggttatgcgcagggttattacttcaggcattaccaggtggagaacgggctttctcacaacaccgttttttgtaccctgcaggacagcaggggctttatgtggtttggcacaaaagacgggctgaaccggtttgacggcaccagctttaaaatattcaggaaagacgaccaggataccggcagcattggcaacaattttatatacagtttacgggaggacgatgccggccatatgtgggttggaacagggaaagggctttacgcatacaatgcagaaaaagaaaatttcaggcgggtacccacacttgagctttccgatgtgaatgaaatacaaacagacaacaagggtaatatctggttcttaatgggcgcaaaactttaccagtataaccccgttacctgcaacgttgcccagattgccgaactccgggatgaatggataacctccatttgggttaccgatgccggcatagtatggtttaccaccttcggtaccttaaaaaaatatgatcctgaaacagggatctacgcgtcatatgacgtattcagccattcaccccatacgcctaccaaatggatagagaaaatgttttatgccggcaacggaaaaatacttttaggaactacggggcagggtctcaaaatctttgataccaaagatggttcatataccgatgttcttacttataatcccgacaaaacaaacatatttgtgcgcgacttcgttcatatcacaaacaatgaatactggatagccagcgaatcaggcatttttatttatgatacggagaaaggtaccattgctaacctccacaaacaatacaacgatccttattccctgtcagataacgctatttattcgctttgtagggataaggaaggcggtatctgggcgggcacttattttggaggcgtcaattattttccgaaacaatacctcgcttttcaaaagtattttcccgataacagcccgcaaagcatcagtggtaatgcagtaagagaaatatgccaggaccggtacgggaacctctggatcggcactgaagacaggggtttgaacaagctcaatcccaaaacgggccatatcacacagtatatgccaacaggaaaacccggcagcatttcctatcccaatattcacggactgttggcaacaggcaaccagttgtggatcggaacgtttgagcacgggctggatgtgatggacatcagaaccggtaaagtaatacagcattacaactccgctactcccggactgcgcagcaattttccactttctttatataaaacacgaagcggtgaactgcttactggtacttcgattagccttacccgctatgattccatatcgcagagctttataaaagtggaacaggttccgggcgatcattttatataccatattatggaggatcgcgatggcacggtatgggtaagcactattggagacggcttatatttttataatgaaaaaacgggcagacggggcaatttccgttacaatccgcaacaccgggaaagcctgggcagcgatatggtgaacagtagctttgaggacagcaatggcaacctgtgggtagctacggaaggaggcggactatgcaagctcaacaaagaaaacaaaacctttacccgttataccagcaaaaatggcatgcccagcgactatatttttaaaattctggaagatggcaggaaaaacctttggatagctacttcccgcgggctggtatgccttaaccttaccacaggaaaaatgcttgtgtataccagggccaatggattattaaatgaccagttcaactataattcgggatataaaaacaaagaagggaaaatgtatttcgggagcgtaaaaggaatgatcagttttaaccccgataccttctcagcaagcaattttgtcgctcccgtttatattacagggctacaggtaaacaacaaagaagtgcaggttaaggacgaagattcaccacttacaaagtctgttctcctcacccggaaaataacgctgccttatgatcagtcttcctttagcattgactttgcggctttaagctataccgccccagaaatgaccgcctacgcctatatcatgcacggcgcggataaggagtggacacccataaaaaccaaccgcaaagtttattttaccaacctgttgccgggcacctatgtttttaatgttaaggcagcaggcagcaacggcgggtggagccggcaacccgcacagttaaccatacaaatccttccaccctggtgggcaagctcctgggcctatgcattgtataccctggccgcaatggcgcttgcattttatttggtaagacgataccacaatcatattgaggaaaagaacaggaggaagattgaatacctgcaccacgaaaaagaaaaagaattgtatgaagcaaaaattgatttctttaccaatgtagcgcacgaaataaaaacgccgctcaccctcataaaaggcccactggaaaaaataatcaaccaggcccataaccggcctgaaatacaaaagcacctgtctacaatggaaaggaataccaaccggctcattgacctcaccagccagttgctcgacttccggcaaacggaagcgaaaggattcaggctcaatttatcaaaaatgaatgtttcggcattgctcagggaaactttttctaatttcaaatcactggcggaacaaaagaatcttgcctattccctttccctccccgaaagcgatttgtatgcccgggtggatgatgatgctttgaataaaatatactgcaaccttttcagtaacgcggtaaagtatgcgcaacaggaggtaaaaattaaaatggaagccggtccacagggccattttacaacggagatcataagcgacgggtatgtaatacctgaaaataaaagagaaaagatattcgaacctttttatcggctcaaaggaacggaaaagcagaaaggtaccggcataggccttgcactctcgcgatcgctggctgcactgcacaagggcacactctatcttaaacaaacgaatacgcccggctataatattttcgtgttgagtttacccttatcttccaaagctgtaatggaaagtgcggataatgaatcaaaataaagttgatgatgacacctgctgttttattaatagacgacaatgaagatattcttgagtttctgacagatgaactgcaggaaaaatataccctgttcaccgctaccaatagtgaagatgcgcttgcactgctgctgcaggaatccatacaactcattgtaagcgatgtaatgatgcccggaatggacggctttgaattgtgccgcacaattaaaactgatttcgattacagccatatacccgttatattgctaacggcaaagaacaccctccaatcaaaaattgaaggtctggagattggcgccgatgcctatattgagaaacctttttcgccggcgcacctgcaggtgcagatcgccaatttgcttaacaaccgcagcaagctcagggaatattttgccagttcgccgctggtgcatattaaaagcatggcgcattctaaatcggatgaacattttttggaaacgctccatgaagccatttaccggaatatggataatacggaattggatgtagagcacctgtcgcgcattatgaatatgagccggcccactttgtaccgtaaaataaaaggcatctcccacttaacgccgcatgagctcatcaatattacccgtcttaaaaaagccgccggactattagccgaaggccaatataaaatatttgaaatagccgctatgacaggttttcaatcgcagaacaatttcggcagaagctttttgaaacagtttggtatgacgccaacagaatatgcgagggtgaagaaggaggagaacttgtaatatctgcctggcagaatctgcagcacagcgaacatggcaggttttggttcggacttagctcattttacctcaaccaaaccgtttgtgtaaacgcaccgttagcggctgcatcccaggcttctatgcgcacccattttctacccggcaaatttaatgaaaccctgaatttttgtttatcaaaaggaagcgtagcatccaggttcatcttatgcctgtatacctggtttccgtcacccgatatgatctccacaaagtttaaggggaaggtccactgcaggttaaaagcaatagctgctttcccgttttccgcaagctcagccgtatcgccagcctgctttttgttcaccgtaaatgatgggatcaatacttcgccggtggttgaaaaaaaacgccctttttgtaaaacatccagaatgctttgccagcctttgttgtaagtaggcaagttgtttaactgcaaatagtttacattcaaatgcgcatacatttcgttctccggctcaattgtaaatacatcagcttctgccagcactttcttttgaacgccccagttgttcatatcatccatcaggtctaacactctttttcccagccggggctgcgaaagatcagcaggcatcgctttccaggctgcacccaaaaaacgatccgatttaaagaatgctgatgtcttatatttatcaggataatctaccgagcctttggttctcgggtgcgctgtccatgccagccctttttcttcctttaataaatccaacatttctgttgcattggcaacgcggtaaaccgctccatacaccgggtgtaccgtcttataaggaacactgtcgctgcgcgacatgatccagtaaacaggctttggaaaaagttgcagccaatgcccgccaaaaaattcattgggctcctccccgggtaataataaaaaattctcagttgaaagtcttctgcattgttcaaacaaagcatgcaattctttcaaacgttgttcatcaggacccttaggatgcgcagtgtaatgaaactcagcaagatgaacaatatcaattcctgtttgtttaaatacattgataaaactgggtgtatcgggcaccggcttgccagccagtaccacattcatcacaaactcattgtgaaaatggcttgccattgttttatatcccggaagtgaaacataccgatcaccgttcgtaaattttttcacatcattcagtaatgcctccggaccagttgtacccagtaaacaaaaaaagtttaatcgctgttctgttccgggaggtgcattaaaccagggtacaaagcggttatcacccgttaattcctgccgtatacccaggccatagccatctgtgattttacggtaatggttgccatgccatgtaaagcgcaggttaaatgcttcatcgagcggatagaaatattggtgaggcgccggaaaaacagcgatgccgcctgtttttgtgttaccaatgatggtacgatattttaccatctcatttttactgctgtcggtaaattgtggttgaacagcctgcatttcatcgttcacatcggcccatgaaatgctgttccatttcatctctttgcttatcagtccggcatcatatacaatagcggtagaatctttactggtggatacaacagccgctatgttcatcaacgggctgccattatacagggtaatttcaatggttccgctaaagccgggtgttgtaatttcatgtatggtaatgatcgttcttgatccggaactgcttaccgatgccgattttttattgatctctgcaagatgtaactggtaaggcttgagatgcactttgtcgaaaaaaatattccatccgttttgcgataccaggtcgcgtttgccaaccgtaagcaaaaacacgggatcaacatcttccacaatattttttaccgtggcgccctccagtacgttaatgcttttaaacaggggttcattcctgtttacactcaatactacctgtgcacgttgctttttaccagagggccatgaaacagaaaacgtgttttgggcaacctgcacctgcgccccatttttatcgctaaaacctttcaggttaaccggcatctgggcatgcagaaccgaaaagcccattagtaaaacaataatgaatgcgtaccgcatgatcaatcgatggtttaatttcctgtaagataaagagggcagggcaattttttttattattgaattcaaaaaaaatgtaccttaaaggctgtgattgctgctattggtatagtaccccaacgataacctaaacccattgttccactctacataataatttagcaatagatagaaggaagattttaggaagtaagggcataaaaaagcgatcccaacctaagtcggaaccgctttaaatgttttcacaacgataaaatcttattgtgatttgcttcaaattaataagccaaatataaataaaaatagacatgataaataaaaaaattttagggatagatattggaaccacctcaatcggctgggcaatagttgaagcaaaaacagaaaaacccgtaaaatacaatgagtattttgaggatgatttgcctgaaacaagaactgacacaaataatgatagaactggaattcacataggcaaaaatggcttgcccgcagtgggtgtaagaattatctcacaagagggtaaaatgttaagccgtttcaatgaagggaaaaaattgaatgaaaaaactaatgaaactccaactgctcaaaggcgaagaatacgtgctggtagaaaactgaaaagccgttataaattgagaagagataagctttgcgccgtactggaaatattgggaatgctgcctgacgcttcttatagaaaagtgaaaaataaaaatgggaaggagatgtggaaagcgatagaagcaaaagatatagatggcaataacggaaaatggtacactaaaaaaagagagtatgaagttgatgaaatcggtaaaaagaagaagaaaagaaaaaacgaggagggcattattaccggaataggcgaagacttatataaactacgaaacaatgctgcgattgatcctttagaagatagaagagattggggtagaattttgttgcacttaaatcaatggaggggatatagtagcgatagatacagcagcaatgaagacgatgaacagactgatgatggtttttatacctcgcttgtagtagatgatgttgttgacataaaaaaaatatataaggacaagctcaataaaaagcttgataaaattcaatatcaaataaaatttgaaaatggagatattgggatagatgttgtgaaagttggtgaaagttccttttactcaaaatttaaaaaaggcgaggttgccacctataaaaaagtagaggatgaaaatgataaaagtataatttatattacgtggcaaaatctaaaaaaggaggcttgggcataccgtaagtggctaatcaacgatagtatagaaaagtatatccaaagtaaaagaggtacggtcggttcctatttttataataacttttttaatcaggaatatattaaaactattcctgaagaaaatcgtttaaaacgcattcgccataatgtggtaaacagaaattggtatgaagatgaatttgaaactatctggaaaattcagtttgaaaaacataaagcaaatttcacaaaggagttagttaataaatgtatagatgcttcatttacaaaagatgaatcggtaaaaaaagagttgcgaaaaattggcaaccctgaattacaacttaaagcattaatcagggataaaataatttattaccagcgtccctggcaacaagccaaaaacaaaggagaatgcagatttgaaaagataccggatattaaaaaggatgaggatggtaaaataattccacatagggacggtaaaatccattataaaggaagaaccgttattccccgcagccatcctttacatcaggaatataaaatatggcaacaaataaataatgtcaggatatggtttcatccgaaggatgaaaagcaaattgatttgtttgaaaattcagaggtttgctcaaagcttttaggtaaaacccctattgaaattaaagagcttctttatgaacgattgcaagacagaaaagagcaatcatggagaacgtttgtaaatgaaatatttaacattgaagtaaaattaaaaaaggagggagaaaaaaagaaaccaactgaaacggaatattattctattaactacattaaaatatcaaaaaaaggggaggaacaagacaacctattaaaaggcaataaaacaaagaaacaaattgatgatgttttaaatattaatgataaaagttggtatttagaaacagcgaaaaaaggtaaagacaggcataagccagatagaacaaacaaagatggaaaaacaatctcatcgttaaattacaaaaccagagaatatactgtttcaaacctgcaattactttgggaatgtatttatgatcttacgggatataaagcgggcaatgatagcgcaaatattgaaatgattaaaaatagaattcgtaaccatttcagtgctgatatcatttctgctcctcaatgcttatctcttgctaaaattaaatttgacgatgctggaatggggcaactttcggcaaaagctattcgcaatctattgccattaatggcagttggaaaatatgcagaacaatatcctatgactgaaaaggctgataaaaaaataaagagtttaattgagcttaatcagcaggaacaaaatgaaaccaatgatgatttgaaactttattccttaaaagaatttattactgataaaagtgcaaggataaagctttcttcaaaaatgtcggaagaggaatttaaaggtttgaattattgggaagcagcagccgtagtttatggaaaccactctaaagctggtattactaatataccatccgaagaaattgcgaacagaataaaaaacctacagcctgttccgttcggaaaaatgaataatccgatagtagaaaaaatagtcaacgaaaccttaaagctggttcaattaatttatctgacttatggaggatttgacgaagtaagaattgaattaagccgtgaattaaaaaattcaatagatgacagagaggcgatttgggatgcaatgaaaaagaataacgaacgtaatgattgggctaaaaaaatgttgcgtgaaatgttcaatgaagaggaatcggaaaaggtagatgtttctttaagcaatggcaatattgataagataaaaataattgaagaagtagttgctaaccgaaaaggaaaagaacatgaagaaaaaaggaaaaaagtaattactgagcctactaaagccgatattttaaaataccgtttatggttgcagcaagaattcagatgcccatacacagatgaacctattcctttttctgatgttttttcaaagcagttgagagtacagatagaacatattatacccagaaaacgctatcctgacaattcattttctaacaaagtactgacatggacggaagtaaatagcgctaaagcagaaaatggcaatagaacagcctatgaatttattataagtaaaagggatgataatgatagtatccaaattcctaacagagaacaacctgtaagattaatccccgcaaaacaatgggaagaaaaagtaaaagaaatgttcaaaggcagaaaagccaaaaatctgttaagacgaagtattcctgaagatccaattaaccgggagttaaaagatactcaatacatcaataaaaaaataagagaaaaaatcggggaagctattggtatggacaaagtttggactacaacaggacaaattactgatatgttgcgtaatgcctggcatttgaatgataaagtgatgaaagaactgataagagaacgttatgagaagtttcaagtaaattttggaagtggttcaacgcctttagaagctaatacaatttttgataatacagtttggaataaagaaacacagaaggccgaaatcagaaaagaatttccaagtttttcaaaacggcttgatcatagacatcacgctttggatgcaattattatagcctgtaccaaacagcagcatatacaactactgaatacactaaacgctcaatttgaattaaccgaacttgagcatgaagatgaaaaagaaatagctcaaaaaaagaaatacaaagctcttcaaagtctgctttatgaatacgttaaagacgaaaccggtaaaccaagaaaaaaatactttacaccatggaaatgaagatgaatttattccacaggtaaaagacgctttgagtaaaataattgtagctcacaaaaattcaaatgtgcttacaagcccaagtagaaacaaacaacttgataaatacaattacacatcaatttctatcaggcaaggattgcacaaggaaaccttaatcggtaagcgtaaattgtataattcaacacttgtcccgattgctgaaataattgaaagaatattttctgaaaagcgaaattccaaaaaacgttttgatgaaataattattgatattgtatttaaagaaaagtttcaaaaacagctgactttattatttgaaaaattcgcatcactaattgaaacggatgaattaaaatcaaaacttcttgatgaaataaataacaacaaatcgacctattttgaggcagcaacaacttttgactctatacctattaagcggggcaccgaaagcatcaataaagtcaatgtagataaggttattgacaaaaggatacaaaggtatataatttacaaaaacgaattggttgacatccttagtaaagaattaaatagcaagcctaatgacgaaagaaaaaaagaattggagaagaagaagaagcaatatctcgaaactcccatttactacaatgctttatatgacattagaatgaaggatggttttgtaatcaatgatgaagaaagaaggtggctccctttatttgaatttaataagtcaatgattgagcatattgaatatgttaaaaacaaaaagggtaaaaaagtaataaaccatgcccggacagaacaagtaaagcaatttatcaccggatatgagcatgaatttactcctgaaaatgtattgattaaatatccaataataataggtgaaaaaaagattgaaattaagaaagctactgtaagaaatactgcaggagttaatcaatcaaagaaaaatacagacaatacagaagaaaaggaggtcttggttgaaattcgtcccaagacctttgttgttttggaaagtaaattcagagccattattactcaagaaaaagagggtaatgaacgaaaagttaatttcatcgaatttaaagaagcattagattatcaaaaactaacatcagatttcattcaggcagaaataagaattcctaataaaataattccgccaagtcataagttattattcacacttagcaaaaatgatttggttgcactgccggataagacagacgatgtaatagattggaataacatttcctccctttcaaataaattgtatcgtgttttagattttgatagtactggtgttatccgttttgtaaaacatacaattgcttcccccattgaattgaaagatacgatgaatgcgacaggattaagcaatgaattagatttaatgagtaaaaaactaaaagatgaagaagaaaactataatattgaaaaagaaagagtagaaaatctcagcaataaccattctatttggaaaaagaatttaagcaaaaatgatttgaaatttcataagacaactattaaagaaaaagaagctgagataaaaagagataaaaaattacttaaagagcatttcgatgaaagtgaaaatctggaaaaggcaataaaaaatttagcagataaaattacatttaattcaaaaacagataaaaaaggtaaaattaaagaagctgaaccaatacaagaaccgtttgaaagaaaaactaaagatgatattcaaaaaataattaaagtattcacagacaagttaggtaaggaaattgttccttactgggagttcccgaatgggtgttggaatagagaaagagctgaagaactatgtctttgttcaccaaagacagataaaattgaaacacatactgatagttagctttatcgctagctcaggatcgaagaagatgagaaataaaaaattgtaaggagacgaaattgttattcttcatttcgttttttttagcgaagcgaaagtatgtttagcttttgttttgacaactgggcagggcaataatattatagtcattaaattacggcagaagagtgaaagcagtattaatgagcaaagggagatgtgtttgtaaaaaacaacaactatcgtttttatgccaatcttgcacatactaaataaaaccattatgcgttcatcatggaaaccctttatccatgataaagcgaaccctttatttcggcaaccccgcttatcttaaaaccaataacgaacagcttgttgttgaaatgcatggtaccggcgaaaccaaatcaacgcccatagaggatatcgggctactgatattagacaaccagcagatcacgatcacgcaggccctgctgtccaaattactcgccaacaataccgcggtcatcagttgcgatgatacgcaccaccccagcggcatgctgtttaatttagatggcaacagtcttcaaagccagaaattcaaggcccaggtagaagcatcggttcccctgaaaaaacaattgtggcagcaaaccgtaatgtgcaaaatagagaaccaggcggccctgctgcagcacgaaagggaagaatacaaactattgctcacctatgccaaagatgtaaaaagcggagacagtgaaaatcatgaagcaagggcagcggcttattactggaaaaggatcttccccgattttctgcagttcaggcgggagcgctacggtccgccacccaataacctgctcaactacggttatgccatactgagagcgctggtagcaagaagtttaacttccagcggtttattgcctacgctgggcattcatcaccgcaatcaatacaatgcatactgcctggcggatgatattatggaaccttaccggccttttgttgataaagtggtgtgccagattataagaggcaatggaaagtttttggagatgacacccaatatgaaaaaagccttgctggaaattccggctatggatgtgcaggcagacggccaaaagagcccgctgatgaatgcagtacagcgtacaaccgcaagtttggccaaatgctttgaaggaaagagcaggaagatattatacccggagctgagctagatctatcaggtctgccgggaagccgcactgcgccggagaccttatagatctgagcccaggccggcatccggaaccttcaattacgcttatatgttcaaccgcttaaacgcctatcgcatcatgtgggtacttgtattctttgatcttcccaccgaaaccaaaaaggataaaaagctgcatgcgaaatttcgcaaggatattatggcggatggcttcaatatgttccagttcagcatatacatgcggcactgcgccagcagggaaaacgccgatgtgcatattaaaagggtgaaaagctttctccccgccaaaggacatgtaggcatcatgagcattaccgacaagcagtttggcatgatggaaatattccggggtaaggaattaacggaagcccctgccatagcgcagcaactggagctattttaagggcagggcggcagacctataagatttgcaggtctgggagcagcagggcaagacctataagatttgcagcccaggaaagccgcgcggcaaatcttataggtctaagccagggccgctatgataatcttcaaacccttttattcccccaaaccagtccagcacctcaggtcgcaataaccaggctggctcatttgagcgcataacagaataggaagaccatttccatttactcaaatcgatgcaatagccatgatgaacggggttgttatgaatataatatacggtagcccgaaactgctcatcactttcaatctgttttcgccgtaaataatcaataaacagagcgcccttccggttatacattttattataagctttggcatagctgttgagcagattagagaatctttccatcacaaattcaggaagcaattcgggcgaaaattgtttattgtattttacttcatgaaagtgacgctccaattgcgcttcctcctttattttaacgatacaatgaaaatgattgggaagcaggcaatagcaatacgtgtccgcaaccggtgaaatatgtttgatataacgggcgagaaaaaatgcataattacccccgttccggaacaacttttcatttccgacagctctgctgagcacatggtatttttcgccgggtagtagcggcaggtggtaatcaggcatacagcaaaatacaaaatggtctgcgaaaattacccgaaacccgcaaagtcccggaccgcttttagcagaacaggaataaaaaaatggagccggagccccattttttcattgtaaaacttagtccaaatacattaaaatcaatcgcttaggcaattcgtgttgtataagagctaagctacataataatttgaaagcaaatcacaacatttgatgattacaggcgcccccggtcggtgttgtataagagctaagctacataataatttgaaagcaaatcacaacatacatggtattgttatttttggtggacagtgttgtataagagctaagctacataataatttgccgcgtagtgtttgatttttttattgtcgcggcgaactttggttgccgcgtaggtttttattcttttattgtcgcggcgaactccggttgccgcgtagtgtttgatttttttattgtcgcggcgagcttcggttgaaagcaaatcacaaacaagcagatgtcactacggcaactcctgcaagttgtaaaagaaataagctacttaataatttgccgcgtaggtttttattcttttattgtcgcggcgaactccggttgccgcgtaggtttttattcttttattgtcgcggcgaactcgggctgccgcgcagttttttgattttttattattgagcgcgcttcgattgattcacacctatctgccgggtcattcagcattttcttcttttgcaatattgcctgtactgaggttattgccacagctccagcaaaattttacattgtctttatccgacctggccccacagccgggacagataaatccagctttgtccaaccggctttcttttaccatagacgcagataatatacccgtaggcaccgcaataatcgcatatccgagaatcataataaaagatgccagtgcctttccccccgctgttaccggggccacatcgccacagccgactgtggttatggttacaatagcccagtaaatactttgaggaatagaactgaatcccgggttgtgtttgaactcaattacatacatcagggatccgaggaaaaaggttaataccaaaacaaagaacaggaagataaggatcttccggaaactctttatcagtgaaaataccaggaggcggctttcatccaggaacttaaccatcctgaatatcctgaatatccgtaaaagccggaatgaccggataatcatcagcatgtgcgactggggaaaaatgaattcaagataagaaggcagtattgccaacagatcaatgaccccataaaaactcagtacaaattgctttggccgttttacacataacaaacgaaaaacatattcaatactaaaaacaatgataaaaaaataatcgagcatttgaaaaacataagcatagcgtgccgaaatactttctacgctttcaagcagcagcagaaggatgttgaccaggattaaacaaaacaggctaatatcaaacagcctgcccatgggcgtgttggcctgaaaaatgattacatacagcttatattgccatgaagtgtggtcatcaggcttgttttgatcctgaacaacatcaattttgtctggtataattctgaataaactcatatacgcactggacaaatgtatataaatatgagcgttgtgcatataaattaaaaggaaaggaagcattagctaagcccattataaaaaccggctgcttaatacgttgcattataatatatcgccggtcaccataattagtttacccgatgcgatgatctccaatgttaccttaacgaatattgaaaataatcttgttttatcctgccataaaaaagattacagaacgactatagtaaccgatgacctgcaatactgcttcatttaaaaatgtaaaagtaaccgagcccggaaaaaataaaatgattcatacctataaatccaccggcataacgggaacaccggcaaggcagtagccgttgagcataaataaaaaacagggaacgaagattcatccagtttcttcgttccctgttttcataccaaaagcaatttatataagtctctttatacgccagctcaataaaatgcttctgcgggagtaactacattgataataaaaaaataccgtatccctttgctggtattccatttgagctcctgcccttttctcatgccaagtaaagcagcgcccagtggtctgaatacattatcggtattaataaccgtggttccggcttcgggtacggctaaacggtattgaaaatttctccgtcctgccttatcacgcaacagcaacagggaattaagccgcgcaacttcgtaatcaaagtcggcatgatttacaacttctgcatgctgcagcttttctcttatagcatcggagcccggaagttccgcatcagcttccagcagtttctttaacacatctgcatcttctttgaggagcatcgctttctgtatctttttcatgatagtgattattgatgtagtgattaaataaatacatgatgaccgggtaaatgaaggccctgccgtaaaatcaatacagctttacctgtattaaataatttaacagcaaacaagacctgatttcatttgaataaaaccggttattaaaaaatgaacaccccgggccggaattttattgggccggggccagcgtattgaagtctttaaaattggaaaagaagtacatcctctggcgggcgtaaagtggtttgccggtcaaatcaggcatacccgtcagcttaaaagataatatgtagaacaattttttcaccaatggcgaatatagcaaataaagccgtccgtggcatcccaaaaatgttaatcctgctggctgccgtcctgcatgcgctttaccaccgaacatggtagcgttaaccagtaaataataaaaaagaagtggtgacgctatactttgcgcaacgtattccgtacagatgccagtatttgctgtgcctgttcaggatcaaaatctccatgctgtatttttttcacacccagtctggaaagttctatgtgtactgcaggttcaataccatgattagcaagacacgcttttgcgcacgacaaaggacaaccatcaagtacaacaattttcctgtttgacaaagcggtctttactaactttttcacattgccccccacgcccacaatacacgacatttcagcatctccggccctgtcggtggtaacggcaatatagttggccatttgtgctgcactggaacatcctgaacaggaatagatcaatggttttgtttccatataagtacagttaacagaaaaacaataaaatgtaaatgttgcaaaactataccccggagtgtggaatggtatttacaggctactgttaaaacttaaactatatgcgtttccgcatttttaaaagcatagttgctcattaatttgcagcacatttgaaaaaatgttttaagatcaactgttcttaaaacactgtatacccatgcttatattcaaagattttacattcgatgcggcacattttcttccaaaactacccccggctcacaaatgcgcagcaatgcacggacacacctaccatgtaaggatttacgcgaaaggaacgcccggtgagcaatcgggatggatagttgattttggtgaaataaaagaaagtgtacatcttatactgaatcaattagatcataaatgcctgaacagtatacccggactggaaaacccaacctgtgaggtgattgcgatgtggatatggcagcgattaaaacccctgttacagccacttgcccgtatagaactacgtgaaacccttaccagcggcgtaatatacgatggaacataaaacctgcagcttcacacaccaatacgcgctgaccttgtatatattatattcttcgggaacttcttcctgcaaagtatcaaaacatgataaaaatcagctggcttaaccacggtagtcagttttttaaaaacatagagtgagaaactttgatagggggaagtctggccacaaatcctgtgtcaattgtttccggtatttcctgttatacacatatggcccaacctaatccaagatgcaatacctgtcgtgttagaaattgttctgtgctcagcaactgctccaacgatatcctggaagcactatctgaccataagaagtatcttcattttcaaaagggggaacgcctgcttattgaaggacaacgcggaggaggtatttattttatcagatcggggatagcaaaagttgaagtgaatggaaaaagcggacgtccgctgatccttcgcctggcgggagcagggtcaattctcgggcaccggatgtgtggcagtaagaatgaacaacccgtatcagtagaagcggttgaagatctgtatgtatgccatattacccttgccttttatgaacaattgattgaaaagagccctgcgcttcacaaggagatgatgcagttattgctaaatgaaatacggcaggttgaactgcatgccgtacgcctcacccatctctccgttaaagaaagagtagcaggagccttattagaaatcgcaaaactatatcattatcaacccggcagtaacggcattcgcgttcatttggagcgtcaggacctggccgatctttccggtactacaagagaacaggtatcacggatgcttaccggattacaacgtgctggtttcataaaactcagcgggaaacatttcaagtttttaaaccttaacagtttgcagaatattacagccttccactaaatgcctgacggtaccctccggttaaacccctttaaaattcttatcataaatccattcacttcccgtctttatttgtattttaaccgctttattatttcaaaaccagcttatgagcattccttcccaactgaaccgcacccttggacttcgtttagccattatagtggtaatgggcaatattatcggttcgggcgtatacaaaaaggtggcgcccatggctgccgaactgcattcacccgggtgggtgctgatctgctggttgctgggcggcattattacactcatgggagcgctcagcaatgccgaaattgccagtatgctggccgataccggcggagaatacgcttactataaaaaaatatacgggcgattcttttcctttctctatggctggtcaaattttgccgctattaaaacagcggctgtggcaagtatcgcctacgtttttgcgcaatcgctgcacagcattgtacatctcccaccgttgctggcatcatgggcggatatgaatatagcaggcgtattttatccttttgccggcttcaatgttaaactcacagctattgtgctggtccttatacttacatggatcaacaccaccggccttaaaaccggtgcaggactaagcacggtactgatgttgcttgttctggcaggaataacgcttattgttgtgctcggattaagcagtccggaggctaacgtacccacagtatttcatttagaaacgaccaacgcagcacctgtaaccatgagtgcggtatttaccgctatgctggctgcattctgggcatacgagggatggaattccgtaggcatgctgggcggtgaaattaaaaaccctcaccgcaatgtgccgctaagcatcacgatcggactgctgctggtgatcacactttatttcttagttaacatgacctacctgtctgtattgtccacaccaaatatggaacaagtacatgcatccaataacaccattgcagcggtggaagccgtaaaggtctttgccggaagtaccggtgtattccttatatcattattaatattggtaaccaccctcggctgtacgcatgccaccattctcagcaatgc

SEQ ID NO: 3956 - DNA, 24227 bp, synthetic construct
  source 1..24227: mol_type = other DNA
  misc_feature 1..24227: note = Synthetic
atcattaatgctgacggcaccatcatcaacgagggcgacatgctcaccatcagttccaaacggcaaagcatctacaaaggagaagccgactttaagcccgcccgcttcaccaaatacatcgagggtggcgatgttgacctcaacgatgaggaaaaactattcttcctccgtatgaagaacgcctatgaacgttaccagtctattgtcacctccaaagaaacctcgtacatcactgacatcagcaaactggcacgcctcatccgttgcaatctgcagaaccagcccaagaaagcatcttccatcgtcaactcatggtacgagtcacaccctgacgaatacgtcgacggcgtccttcaaagccgcatgggcgatcataatgaccaaggacgtctcttcgacctccttaccgtgagcaacaaagtagacctcttccgacgtctacacatcctctgccactcgcgcaacatttcgggtctcaccgccggaagtttcatgataggacgattcgtcgcacgtgcattgccacgaaagatgtggaacagtctttccgataccgtcgttgcattcctcatgaacgaatatgtcctctacgaaaaataccaacaggtgttgcaggaggtaggtgagatcaaactcgctcgcgcacattcccgcatcgagaccgaaggcatcgacaacatggtcgtccagaattttgaaatgaccactttcattccccttctctattcgcagcataactgggaaactgtcgccgaagagcttgagaaaatggagcatcaggacaacacacatctcctcattgagaaactcagccgccccgtcgacgaaatcttcgacctctccacaccttggaagaaggccattgttgacgacgtcctacgtgccaatccttaatagcctcaaaaccgatgccctatcgtccattcgataaactcgatgcgaccaccatgggcattcaaagccactccgacatattgattaccgaagttatagtacgcgccgacgcgttcataatagggtatcgaaatatgatgtgacactagcaatacgggaccaaaaccagcctttagactgatgggtccccagaaaaattccatcatccccatggcgctgaaatagattggaagcgcataggcataacgcagcgtttgcgacggacgccagtccttgccattataccacaggtcaacggcaccgccaaaagcgaaaacagggcttgtatacttctgataatagaatgtcacatcgtaacatggataatagctcttctctgagtgattacgcgacattaccagtcccccggaaaacgcaacgccccactcgtgcgtcttgaacgcaggggtctctatgctgcttttaggatgtaaagaaatatcatccagtctcctaacattgccaaaattgtaggcaatatcgagttggacaaaatttagcccctggttagggcgcataagcataccgttgctggtatggagaacacggcaggcaaccgcaaaacgatcgtcgatgcgataagcaatgcccgcatcaatcagacaattgaggaacgaaccaataaaaatattggtggtatcgcctgtgatgctgtatggacgggtgtagccggaaaagccaacacctatctgggcctcccaccgacgcgccacatcgaaacaaagcacgcccaaaagcccaaaacggtcacccgccgggctgttgggaatatgggaaaaagaggctttgaaaccaaatgaagggtaattccaatatcgcttccagtactcatcgcctgttgtgccccacaggacggaagcactcataccgaaagtggcggagttgtatctggagtattcactgttgttggtcatcatgtaaccagcatccagggatagcgagtaccgcggctgggcaaataccgacacctgacatatgaggagtgcaaaaaggaaaaacacaacctttctcattgcgcagtcatttgcaggtaatcctgttctgtaaggatcttcacgcccagtttttctgccttcttcaacttctcgggacccatcttctcaccagccaagagatatgtggtcttgctgctgaccgatcccgaaaccttgcctccgtgacgttcgatatccgccttgatgtcttcgcgcgagaaacgttcgaaaacgccgctcaccacaaaagtcatcccttccagttccgcactctgagagccaagttccacattcatctgaagacccgctgccttcaaacgggcaatgatgcccctgtgttcctcacacgcaaaccagtcatggacagcacgggccgtcacctcaccgacatcctccacttgtgccaactcagattcttccgcatccataagagcatcgatattcttaaagtagcgagccagcttcttggctcccacttctccaacataacggatgcccagagcaaagacgacacgctcgaatggcacctgtttcgatgcatcgatggcggccagcaaattgtcggcccccttttcctgtatcgttcctcccgtgcttgccttattctcttccacgctccccgaccctaatcctatcagctgttcacgcttcaagtcatagatgtcggccacattcttcacaagtccgactttgtagagcaactccaatcgctcggaccccaggctttcgatgtccatcgccttgcgaccgacaaaatgctccaatcgtccaataatctgcggatgacaaccgtcggcattgggacaatagtgtcccgcctcaccttccactctcaccaaaggagttccacattcggggcaacaaacgatatactgcaccggcatcgatccctcggttctcttctccatatccaccccaaccaccttgggaataatctcgccacccttctcaatgaaaaggtggtcgccgatgtgaatatccatcctggcaataaagtccgcattcacaagggtggcacgcttcaccgtggttccgccgagccacacaggtttgagattggcgacaggagtaaccacacctgtccttcccacctgataactaatgctctccaagggggtactgacccgctcagccttaaatttgtaggcaatagcccaacggggcgactttgccgtaagtccgagacggtcccaaagcggagtctggttcaccttgatgacaatgccgtcgataccgaacggaagattccaacgggcatggtcccagtagtcaataaaagcctttatctcgtcaatatccttgcactcctggatatacggctgcaccttgaaacccatctgcttcgcccactccaggcgaccgaaatgggtatcgggcaacgacactccgtcgggagccatcatgaagtacatgcagaacatcagcttacgcttggcgcattcagcactgtcctgaagtttcaaactgccactggcggcattgcgcggattggcaaagggctcttctccttccgactctcgctgctcattcattgcattgaaagcctcgaacggatacaccacttcgccacgagcctcgaaatcatcggggtactcccctcgcaaaatcaaaggaatcgtgggaattgttttggcattgagcgtgatatcatcacccaccctaccgtttcctcgggtgacagcctgaaccaacttcccatggcggtaggttaaaccgatagccacaccgtcatacttcaactcacaagtataagtaaacgggataccgtccagcaatttgcgcgtacggccctcgaaatcctcaatctcctctatcgaataagtattgcccagcgaaagcatcgggaaccggtgctccacctgccggaaactcttgttcacctcaccccccactcgcttcgtgggcgacaatggcgacgccagctccggatactgccgctccaagtcctgcaactcccgcatcatgccgtcaaactcctcgtcactcacaagcgagcggtcattcatgtaatactcgtaattgagcctgtcgagctcttcagccaaaaactccatccgctgacggataggctccgtatctatcgcgctgaacaaatccattcccctgtgaaattaagtgccacgggacctatcagacacacattctcataggcactccccgtcgaatcaaacgtaacgcggaaatcgccgcctcgggtgacaagcgaacggttcccgctcacaatggcgcaagccgtcacacctgtgccgcacgcccatgtctcatcctctacaccacgctcgtacgtgcgcacaaaaagacgtccgtcgggcaaatcctcaataaaatcaacatttgtaccttgagggaactcctctgcaatattgcgtatacgacgtccctcacccaccacatcaaaatgctccaggtccttcacccgctgcacatagtggggcgagcctgtatcaaggaagaaaccatccagacagcggcgcacatcatccacagccacgctgcgcatacccagcttcacaatacccacgcgctgcccagcatcccacatcacaatctcggcatcgtggggaccgtcataacccttgaaatgaagttcctttcccataccgagacagtgggcgaacgccgcaatacaccttccgccattcccgcacatcgaacccaggcgcccgtcactgttataatatttcatctcgaaatcaaattccgaattctcagaattctccagcgtcatcaacccgtcggcacccacgccgaaacgccggtgacacaggcgggctatctcttcctcatcaagtcgaaccgaaccgtcgcggttgtcaataaccacaaaatcgttccccgccccatcaaacttataaaaaggaatcttcaccttgaaccttaaactttaaaccttaaaccttaattaataatcaatcatcggaaacagtttccgcaactccatcatctggggattcttccccatcatggcggcaaacttgtcgtcgggagaataaaccacttcctccttgctcacaaaaagcgggttcaccctgcaatccaacatccgcatacccgtcttctcccgcaagaactccatcacgtcaatcttgtgaggcttgaactcctctgcaaaatagaccgtcgtcgcatccacttcaaacatcccattcgtctcacccatcttcggagtcccgttcaccataatttcctccagcttcaactccttggcggcttcattccaccatcgctccagtgtctcctgcgtcagcggctccacatcggtcacccgatgggcgctctcctcaacatcctccaccgttgtcttgatcgaaatacccgaaatcgacggaataccgggaggcggcaacgtggcagtatcctttcgtggcgcaacaggcttggactctgcagcaacagccggaaccgcaacaggcttggtcactgctgcgtcggccgaattctcatttttcaattttgaattctcaattttctccgtgcctgcctcgcggcctcttgcaatctatccctgcggcatcgagaccgtcgccatcttcatcaggcagacctcgacaaacaggttcttgttgttcgcctcgcggaaacggtattcataatccgatgcaatgttcaggaacttcaacagcaggggcaaaccgcacgcctgtgcctgctggccgtagcgcacctgcagcgtctgtccaccctctatcagcttcagcgtctgcgggtccaggctcaccatcaggttcctcacatgctcgcacagacccgtcaggaaatgctggccaccgaagcccttgccaatcacctcctggtatagcagcagcgactggctcatattcccctcgcgcaaataatccgtcaaacggaaataatagtccgaatccagcacgttcaggttctccagcacaccctgatacgtcaggttcccaccggtgaaattcaccagctggtcgaaaatcgacaacgcatcgcgcagtccaccctcagccttgcgggaaatcacctccagcgcaccctcctcatacttcaccccctcgctgtcggccacaaacttcaggtgcttcacaatgtcttcgttctcgatgcgcttgaagtcgaacacctggcaacggctcaaaatcgtcgggataatcttgtgcttctccgtggtcgccaagataaacttcgcatacaccggcggctcctcgagcgtcttcaggaaagcattgaaggccgctgcactcagcatgtgcacctcatcgatgatgtacaccttgtacttccccgtctgcggcggaatatacacctgcttcaccagctcgcgcatattgtcgaccgagttgttcgaggcggcgtcgagttcgaagatgctcatcgacgcaccctcgttgaaactccggcaactcgcgcactcgttgcaggcctcgccgtcggcggtgcggtgctcacaattgattgtcttcgcaaggattcgcgcgcacgtcgtcttacccacgccgcgcggaccgcagaagaggaatgcctgcggcagctgacccgtggcgatggcgttcttcagcgtcctcgtgatatgatcctgacccaccacgctggcaaacgtcgtggggcgatacttccttgccgatactacaaaattatccatcttactcttacactttttgggagtgcaaaaatacgaaaaatttacaaactgaccaaaaaaagttggcggccgcaggctttttcgcctgcggccgccattcattaacggtcaattcacgataatcaacgttctccttttgagttcggattatagaacacgaactggccgtcgatgacgtcgatgatgatggtctcgctgctgtggattttgccttcgagcagctggcggctcatctcgttgagtatctcgcgctggatgacacgcttcaccgggcgggcacccatggcggggtcgtagcccacttcggccaggcggttcacggcctcgtcggtcgccgagatggtaatctcgttctgctcgagcatcttcgccacactgcgcagctggatgcggacgatgtcctttatctggttctgcgtcaacggctggaacatgataatctcgtcgatacggttcagaaactcgggacgtatcctctgcttcagcatctccatcacggccttcttggtctcgtcgaggtcatattgcgagggtacaccgttctccagcttctcgcggataatctcgctgcccatgttcgaggtcatgatgatgatggtgttcttgaagtcgcacgtgcggcccttgttgtcggtcaggcggccgtcctcgagcacctgcagcaggatgttgaacacgtcgggatgcgccttctcaatctcgtcgaacagcacgatgctgtagggtttgcggcgcacggcctcggtgagctgcccgctctcgtcgtagcccacgtaccctggaggtgcaccgatgagcctactgacactgtggcgctcctgatactcagacatatcgatacgcaccatcatgttctcgtcgtcgaagagcacttcggcgagggctttcgccaactcggtcttgccgacacccgtggtgcccaggaagatgaaactgccgatggggcgcttgccgtcactgaggcccgcacggctgcggcgaacggcattggctatcacgctgatggcctcatcctgacccaccacacgcttgtgcagctcgtcctcgaggtgaagcagacgctcgcgctcgctctgcagcatgcgcgtcaccggaatgccggtccacttcgagaccacctcggcaatctgctcgctgtccacctcctcgttgatcatcgcgttgtcggcctgcatctccttgaggcgtgccttgagctcctcgaccttcttctcggcctccttgatgcggccgtagcgcagctcggccaccttgccgtagtcgcccgcacgctcggcctgctcggcctcgaacttgtagctttcgatgtttttcacctcggcctgtatctcctcgacgatgctcttctcgttctgccagcgggccttcatctggtcgcgctgctcgcggagggtgccgagttccttgtcgatctgggcaatcttgtcctggtcgttctccctcttgatggcctcgcgctcaatctccaactgacggatacggcgctcaatctcatcaagctcttcaggcaccgagtcaatctccagacgcagcttggctgccgcctcgtcgatcaggtcgatggccttgtcgggcaggaatcggtcgctgatgtagcggtggctcagctcggcggcggcaatgatggcctcatccttgatcctcacgcggtggtgcacctcgtagcgctccttcaggccacgcaggatactgatggtgtccggcaccgacggctcgtcgatgagcacactctggaacctgcgctccagggccttgtccttctcgaaatacttctgatactcggccagcgtcgttgcgccgatggcacgcagctcgcctcttgccaatgcgggcttgaggatgttggcggcatccatagcaccctctccgccaccggcacccacgagggtgtggatctcgtcgatgaagaggataatctcgccgtcggcctcgttgatctcgcggatgacgctcttgagcctctcctcgaactcgcccttgtacttcgcgccagcgatcagggcgcccatgtcgaggctgtagatagtcttgctcttcaggttctccgccacatcgccgctcacgatacgctgcgcaagcccctcggcgatagccgtcttacccacgcccggctcgccgatcaggatggggttgttcttcgtgcggcggctgaggatctgcagcacgcggcgaatctcctcgtcgcgcccgatcaccgggtccagcttgcccgcctgcgccagctggttcagattcttggcgtacttgcccagggcgttcatcgtctgctcctggttctggctcgtcaccttgctgcccttgcgcaggtcctggatggcagccagcaacgccttctcgctcacccccgcgtccttcagcagctggctcacgcggtcccttccgccgaggatgcccagcagcagatgctccacgctcacgaactcgtcgttcatcttcgtggcccgctggctggcggccaccagcgcctggttggcgtcggagctcagatagacctgcccgccgctcacgtgcggcatactgtttaagatatcgtccacctgctgcgtcaggcggggaatgttcacctccatcttcttcaggaggtagggcgtcacgttctcgtcctccgagaggagccccttcagcaggtgcgccgtctcgatggccggatgctgccctcccagggcaacctcctgcgccttctgcacggcttcctgcgctttgattgtgaacttgtctaaagtcatagttatttggtttttatttgttacttttttcaatgttgttttcactgaccctcaaagcaacaagcataccaaacaaaaaggactgacaaattggcagagaaaatggcagtaaaaaaagttttgccagttcaaataagttttgtacatttgcaacagggaaatcatttcgaaaatcaaaataaaagctgactatcagcaagatagctattatcagtactgattttcaaaacaatacattcctttaattcacaaaagactatggacggtaactctatactaggtctatggtacctctattgtaactctatggtaggtctatggatgatagtatatcgctcctatgtcgctcctatgatgcacctatgcaaaaggtatgtgaccacaccccccgcagaagggattcttggatttcatttatgatgagcttaacggttgtggcagtagcattgtcatcaacccttgtaatagtttttcttcatttgtacggcagttgttcaaaatgatttgatgactagtccagcccgtacaaaaaagcactttgggaatttgtgccaattcaaatggcacaaatttgtttgatggcaattgtgtcgattcaattggcacaatttctcctttgcttttggatacacttgatttggactttacaaaaaaaatataatccacgaatcaatattttttcgtaactttgcaccatcaaaacgcaaaaataaaacccacgtaatcgcgggtttcaagaaaactcttcggcttatagccttattgtgaaaagcttgaaaagttttgcaaaattacgaataaaaaagaaactgacaaaaaaaatcttcgacatggaacaaaaaactcttggcattgacctgggaaccaattcattaggactatcattaaggaatatagacaatggaggagatatcattgatcaactggtgtattattccagtacggtttttaaatcgggagcaaaaggagagctctcctatgccgctgaacgaacaaaataccgttctagccgccgtttgtaccaagcacgaagataccgcatctgggctactttaaaattacttattaaatatgattgctgtccactcaagaaagaggaacttgaaaggtggagcagatatgacaaaacgaagggattaaaacgagaataccctgttgatgccaatctgtttgagcaatgggttcggttggattttgatggcgacggcatagccgactacagcagcccctatcaactcagggcagaactcatggagcgacagttggattgggacagccaaagtgaccgctataaattcggtcgagccatgtaccatatcgcccaacgaagaggattcaaaagcaacaaaaatgatactttaaaagatgccgctgaagaggaagatttttccaacattgatatgaatgccgtcatggagaaatcagaagaaaaaaagatgaaaggcatcgatgattatatgaaaaagaacaacctgctaaccgttggttgtgctttcgccaaactagagaaagagggcatccgcgttagaaatcatcccgaataccaagccgttcaatctcaatacattgatgaaataaaaagaatttgccaataccaaaaaatagattctacaaagccggatttatttagaagactcattagcaaagacaaagatgtaggcacagttttctatcgccgcggtccacgcaaacagacaggcaatattggcaaatgtattcttgaaccttctaaacgtcgttgtccaataagtcacccagactatgaagagttccgcgctctttcgttcattaataatattaaatacagaacttctcccgatgatgattggaaatccctatctattgatgaacggacccaattgttcaattcccgattctgtcttttacgaaattcattcaagtttgttgaaataaaaaaatggattgaagacaatgttgtcaatgggactcatctggactacactactcacaccatcaactaccgtgactataccacagtagcgggctgtcctatcattggtcgtctgaaaaacattcttggcaatgaatggaaaagcaacacaatagaaacagtcagagaaagggtcaacgccaaaactggcgaagtccatactatcaactacgggtacgaagacttatggcatttatgttttagctatgacgactccgaaaccatggaagaattcgcacaaaaacggatggggcttgccggaaagcaagtaaaagagatgtctcagatgtggaaaaacatgagggacggttataccacgttaagcattaaagcaatccgtaacatattgccattcttgcgtgaagggttaatctatagcgatgccgtctcgcttgcaaaaataccagacattattggaaaagagctatggaatagcaaaaaagaagtcatcctcaccgccatttacgacctaaataacaccacagcccacactcgtcttgtttacaatctagccaacattttaatatcaaattacaaatcactttcattcgacgagcaatttgcctacaaagataccgaatacgaattatccgatattgaccataaagatattattaaatgctgcaaagatgtttttggtgaagggcgttgggagaagaaatctaacacagagcaagaagctctcataaacgaagtatccacactttatcagcatttttttgccacatcaaaaagagactattacaaactccccaaaacaagcgacactctcaaggtttttctttctacaatattccccgacatagactccaacgaatggaataagctataccaacattcccaaaccaatccctttccacaaggaaaacccaaactgggcactccgaacattggatccatcaagaatcctgtggcattacgtgcactctacatattgcgcaacaccatcaataccatgcttgccaaaggtataattgacgaggacacccgcatcgtggtggaaactgcacgcgacctaaatgattccaattggcgtctcgcaattgaccgataccaggaagagcgcaaaaaggaaaacaccgccattgcaaacagaatcctcgaatattgcaccgactacaccgattccgatatagaaaaaggacgtctgctatttgaacaaggtattattcctcagagcaataaggaggaacgaaatagagcagaaccatttgctcttaatctccaaaaatataaattatggaaagaccaagattttcggtgtatatacacaggtaaaccaataagtctaagcacacttttgaataatcaatcacgagtggtagacattgagcacacgatccctcgaagtatttcttttgatgactcattaagcaacaagaccttatgttatacttatgcaaatcaagaaaaggggaatagactgccttcagaacttccaaattataatgatatactgattcgaatacagccatggatagaccgattagatcacatacgttcacaaattgaactgtggagaggcaaagctcgttctgctcccacaatagaacgcaagaacgaatgtttgcaacagatgcatcaatgggaactggattgtgactattggcaagcaaaagtcaaaacttttaccatacaaaaagaggatcttgacatcggtttccgcaacagccaactgattgacacccgcattatcaccaaatatgccttccattatctcaagtctgttttcaaccgcgtagacgtagagaaaggcaacgttacctccaccttccgaaagatactcggagttcaaagtgtctatgaaaagaaagaccgtaacaagcattcacaccatgccattgacgccaccatactcacacttattccacccgctgcccgccgcgataaaatgatggaactattttacaaaatagaagagagtccatatagtgagaaagacacccttataaaaaacttacaaaaagagattcacaactgtcatattggttccgtaaacggactgattgactcgattgaggacaacatactagtaaatcatatttccaaagaccaaactcttacgccagcaaaacggaaacggcgtataaatgggcacattaaagaaggacagtatcaaaagggcgactgtatacgaggaaacttgcatgatatgacattctacggagcaatactgtctccagaaaacgaaacttcgattgtggttagaaagactttagccagtggtggaattttgcaactaaaagaaggtgacattcccaacattgtcgatcccaaagttcgtgatacaattgaaaaacattggaaaaaggaaaaacaagagggagtatcattccaaaaagccatggagaagaagatatatcttcttgacaaaaatggcgaaccaataacaagtgaccgtaacggacgaccgatttctcacatacgacacgttcgttgctatacatccattaaaaatcctattgccatcaaaaaacaaacatatgaatcaaaaaagagccataaacagtattatctagctgtcaatggtgaaaatgtttacatggcaatttattgggatggcgtcatgggaacgaagctagactatgaagtacgaacattatatgagattgcaaaaacaaaaggaaacattgaaataaaatttcttgaagacctctttgaaaaaacaaaaaatagcattcctttatttgcaattgtgcgtcgatggacaagagtaattgtttttgacaaaaatgaggtcgacaaagattttgaggctattaaaatcatgacagagcgtttccttgacatgaataacgaagaactcaggaaacggctttatgtcgtaaataattttgaaaatgatggaagaattacacttatccacaacaatgaagctcgtccatctgacaaacttggtaaaggcaaagccctgattgatgtcaataatcccaatcctaaagatagagtctctgtaaaaagcagatacatgcttattgaaggatatcacttttccattgacaatatgggagtaatacattttaataagatagcaccatgatcaagcgcacactctgtttttcgcatcctgcgtatctctcgctacgcaacgggcagctggtggtcaaactggaaaagcacgatgacgagccggagaagcaggccacgatacccatcgaggatatcggcgtcgtggtgttcgaccaccgacaaattaccatcactcacggcgtaatgaccgccctacttgacaacaacgccgcagttgtcacctgcgacaactcgcacatgcccgtgggcctgatgttgccactcgaagggcacaccgtgcaacaggaacgcttccaggaccagttgggagcctccctgcccctgcgcaaacaactgtggcaacagaccgtgcagcaaaagattctgaaccaagccgcactgctgcgtgaactacacagcatcgagactggcaacatgcgacagtgggccaaagaggtgctttcgggcgacagcaccaacctcgagggccgtgccgccgctttctactggagccagatgttccccaccattcccgacttcacacgcagccgcgacggcgtctaccccaacgcactgctcaactacggctatgccatcctccgtgccgtcatcgcccgcgcccttgtcggcagcggtctcctccccaccctcggcatccaccaccataaccgatacaatgcctactgcctggctgacgacatcatggaaccttaccgtccttatgttgaccgcctagtggtagagaccatggccgaatgctgcgacattgaagtcaccaccgcaatcaaaagccgcctacttacagtgccgacgctcgaggtgcatattggcggacaacgcagtccattgatggttgccgccagccagaccacagcctcgctggcacggtgttttgctggcgaaagtcgacgcgtgacctaccccgagctgtaaatatggatcgtttcagtgaataccgcatcatgtggattctcgtcttcttcgacctgcccaccgataccaaaaaagagcgcaaggctgctgcagacttccgcaaacacttgcttggtgacggattcaccatgtttcagttttccatctatgtgcggcattgtgctagccgcgaaaatgccgatgtgcacctcaagcgcgtcaaggccgctctccccgccttcggtcaagtgggctgcctgaccatcaccgacaaacaattttccgagatagaactgtttgttgctaaaaaggaggtcgaacctaacgcacctggacaacaattggagttattctagaattgaaaaaacaatcatcacacacaaaaaatcccgtcctttgagacgggatttttttagcctttgacagctaacagaacattgattatcattatattgctgacatcgtgatgtcaaagagctaatatcaatgtttacttttcaagcaattcacaaccaaacggctcccacctttttatatacttgagatgtcaaagagctaatatcaatgtttacttttcaagcaattcacaacgctttcgaggctcatatccatagtggagagatgtcaaagagctaatatcaatgtttacttttcaagcaattcacaacacggcggccgccaccccgtcagtctcttctgatgtcaaagagctaatatcaatgtttacttttcaagcaattcacaacaaggttggagatgcgttgtggccggaggaagatgtcaaagagctaatatcaatgtttacttttcaagcaattcacaacccttcaggacaccatgcccaaccaagacaagatgtcaaagagctaatatcaatgtttacttttcaagcaattcacaacttaatctttaaaacctatacgttatgttgagatgtcaaagagctaatatcaatgtttacttttcaagcaattcacaacaacgctttgcaagatgtttcccgacaacctgatgtcaaagagctaatatcaatgtttacttttcaagcaattcacaacgaccatgtggctttccgtaccgagagcaaggatgtcaaagagctaatatcaacgtttacttttcaaactgcaaaggtacgtaattatttcgaatcggcaaaataaacttttcgtacggggcgcgcgagactaaaacattgtattgctgacaccgtgatgccagagggctcgttgcaggcgggacgcctgtgccaaatgtattaatgtccaataaaccttaaactgtaaaccttaaactgtaaaccttaaaccttcatatcaagaaatttttgtatttttgcagcgttttttttcacatagtatcatgaacaaaggtctatcattcttgcactcgctgaggggcgccgcttccagtctcctccttgcctctctccttttcggcaccgctgccgcacaaaccagcatgcctgtcccctgcggcagcttcgagcagtggtcctcccatccgggctacagcgtcaccgcgggcttcatccccgtgtcggtctacagcagcttttccactcccacaggctgggattacctgtcctattctgtgaaccagtcaatctcgctcggcatcaccacggtgacggtcgacacgcagctgccgctgatcaaggcctcgcaggagtcggggtcggtgcccgccggcaattcggcggtgaagctgcagtcgttcaagctcagcgacattatcagctccgcagtctacgcggtggcggcgggctcgattgacccggagctcacgagcgaggtgtttcccagcatcctcacgacgggcacttttgatatcgaccggttcattcccatgatgggttccctgatttcaaatatgggcaatacgggagccctgctttcctcacttgcggacatcgacgtgaactatctcgtttccggcggcatcgcgctgggcagctttgagcccacctacctctcagggagctacaagtaccattcggccgtcggcggcgacaacgggggcgtggtgattctcggcacgcgctacaaccccttgctccatcgccgcgaggtggtgggcggcggcgccaatatcgccctcaccgaccacagctcctacacggcgttcacggtggactatcattcgctgcacgactacgacgccagcttcgccgagcaggctcccgactcgctgattgtcatgctcatctcctcggccagccagaaccgccagcaggggtcctggatgtgcgtcgacaacctcaacctctggcatgtcgacccgccggagccccccgacacgacgacggtgggcatctacggtcccgcggcaggggtgacggctaccgacgtggtggtctatcccaatcccgcccacgggcagtgcacggtgaagtgtgccgccgacggggcgctgctgaagctgtactccagcgacggacggctgatgctgtcagaaaaggtcgagggtggcacagcgacgcttgccctccccggcagcggggtgttcctgctgcaggtggtctcccgcgagggtagcgcggtgaggaagatcgtcgggaactaatacccctcagggttcctcactacattatatttgattcatcggtgttcggttcccttcaggcctaatagcctgaagggttctgcttctgccagcgccagctgtcgcgcaccatgtcgtcgatgccatacttggcttcccagcccagctcggcttttgctttggcggggttgcagtagcaggtggcaatgtcgcccgcgcgacggggcttgatgctatagggcacgtcgacgccattgacgcgcacgaaggctttcaccatatccaggacgctgtagccgtggcctgttccgatattgtagatatttagacctcgagacctcgagacttcgagacttcgagtagacccattggcttgttgtctcgatgactcgttgacttgttgtccttcgaagcactgcagagcgcagacatgtgcggcggcgagatcgacgacgtggatatagtcgcgcacgcccgtgccgtcgggtgtggggtaatcgttgccgaaaacacccagctccttgcgcttgccgacggccacctgggtgatgtagggcatgaggttgttgggaatgccgttggggttctcccctatcctgccgctgggatgcgctcccacggggttgaagtaacgcaaaaggaccacattccactcggggtcggccttctggatgtccatgagcacctgctcgagcatcgacttggtccagccataggggttggtgcactggcccttggggcaattctccgtgatggggatctcgacggggtcgccgtagacggtggcgctggaggagaagatgatgttcttgcagccgtgcttgcgcatcacgtcgaccagcacgagcgtgccgccgatattgttctcatagtactcccaaggcttctccacgctctcgcccacggccttgagtccggcgaaatggatgcaggcatcgaacttcgggtacgcaggcgtcccgcctgcacactctgcagcggcaaagaccttctccagcccttcgcggtcgcgtatatccattttatagaaagggatttcggggatgccgataatctcggccacgcgcttgagggccacggggttactgttgctgaggttgtccaccaccacggcggtgtggccggccttgtagagttctatcaatgtgtgggagccaatgaatccggctccgccggtaacgaggatgttcatgggttcaagtttaaagttataagggataacggcaaaaacgccacattattgcgcatcattcatgtattctttggcgtactccacataatgggcggcgttgtcggtctggccggggcgtgtgggcttgatgtatttggcggggacgccgccccagatctcgtgggcgggtatcttggtcccctgcagcaccagcgctccggcagccacgatggcgccctcccccacctcgcagtcgtcgagcagcgtggcacccatgccaatgagggcgccgtcgcggatggtgcaggcgtggacagtgacattgtggccgatggtgacgtcgttgccgatatgggtgggaccggtgtcgtgggtcacatggatgcaggagccatcctgcacgttggaacggtcgccaatggtgatgggcgccacatcgccgcgcaccacggcattgaaccacaccgagcactggtcgcccagcgtcacatcacccaccagcgtggcgttctcgctgaaatagcagtccttaccccaacggggcgacttgcctttgtatgatttgattagtgccatcgatgaaaaaaaactatcagaacaaatcaacccaaagcccttttgggaaagccaccatcagaaggaacatcaccccggcgaggacacagccaacgataataacaatttcaaagaccttcagtattgcattcaggactttgtgtttgcccttgttggctttatattcctcgtattcttttgtcataggttgaaagaaaaaggtccttaaggtcaccaaggactttaaggaccttaaaatctatatcattcaacgactaccaggcgaagagaggacggttctgcatcatctcgttgacctggccggtgatcttggcgcggacggcctcgtcggtcgggttgcagaggacggtgtcaatcatgtccacaatcacctgcatgtcgccttccttcagaccacgggtggtaatggcgggcgttccgacgcggagaccgctggtcttgaaggcgctgcggctgtcgaagggcaccatgttcttgttgacggtgatgtcggcggccacgagggcgttctcggcttccttaccggtgagctcggggaacttggtgcggaggtcgatgagcatgaggtggttgtcggtaccgccgctgatgaccttgtagcccttgttgacgaaggcttcgcacatcaccttggcgttcttcatcacctgctggatgtactggtcatagctgtcggtgagagcctcgccgaaggcaacggccttagcggcgatgacgtgctccagaggaccgccctgggtgccggggaacacggcgctgtcgagcagggcgctcatcttcttgatctcacccttcggggtggtcttgccccaaggattgtcgaagtcctgacccatgaggatcataccgccgcgaggtccgcggagggtcttgtgggtggtggtggtgacgatgtggcaatacttgacggcgttgttcaggtagcccttggcaatcatgccgctggggtggctgatatcgcccatgaggatggcaccgatcttgtcggcaatctcgcgcatgcgggcccaatcccagtcacggctgtaggcgctgccgccaccgatgatgagcttcgggtggtgctcgagggccttcttctccatgtcctcatagtcgaccatgccggtctcttccttcacctgatagccaaccaccttgtagttgataccgctgaagttgacggggctgccgtgcgaaaggtgaccaccgtggttgaggtccatgcccatgaaggtgtcgccgctgttgaggcaggccaggaacacggccatgttggcctgtgcaccgctgtggggctgcacgttggcccagcaggcgccgtagagcttcttggcacgctcgatggcgatggtctcgctctggtcgacaacctggcagccgccgtagtagcgcttgccgggatagccttcggcatacttgttggtcatcacgctgcccatggcttccatcacctggtcgctgacgaagttctcggaggcaatcagttcgatgcctttggtctggcgctcacgctctttctggatgaggccaaaaatctcgttatctctctgcatatctgtttattattaaattattttaaaacgttaatattttgcaaatatacaaaaaaagtttaaagtttgcgaattaccgtttaaagttggggaattttttttatctttgcacccaaaatgaaaaaggcctccatactctttaccgctgctatcctattgtcagtgaacgccttcggtcagctggtgcgtttgaacagcgagaagtcgaaaaatgcgctgtacttcgacctcgaccgcgtgttcaactacaacctctacgagcatgcccgctgggggggcggcctgcgctatgacatcaacttctccaagaaaaggttcaagacgctctcgtttggcggatatctgggatacggctatgaggaccagcgcatcaagtggggcgtaaggagcgagctttacggcagttcgcagcaccgtctgagactctacaccgattttatccacgacctcacccccgatgccggacgcaacctattggactacagcgtcgccgactttaccgccaccggcagcttcatggcgcggcgcttcagcgatgcctaccgctggacgcttggaatgagccgcaggcagagcaaggacctcaccctctccgccgaaggacgtctctctttcgaacgccggctctatgactattgggggctcatctacccggagagcgactccgtctggcgcgagctgccgtcggcattcttctccgaagcccgcttctgcctcagctacaaggaaaaatggtcgaccgaaatcctgctcgggacacgcatcgacaatcccatgctggttgcgcgcctcctctcccaatacgacaacacactcctgttctccttcttcaagctgcatcttttcgcacaagcgggaatcactccggagaacaccccctacagccgcatgttcgaccttggcggcagctggggaagccctctctacttccagcgcagcctggtcaccgcccggcacaacgagttcactgccaacgtcttctcgatggtagccatgcgcctcaccacccgcaagcctcttttcgacctctacagcgagttgttccagataggcaccaatcccgtgcccttcgtgatgcttaatgccgcatggggacgcctgtggaatgaggacggcgacggcctgaaaatccacaacgcgctcatcctgatgtcgccaacaaaaggcatcgccgaggtcggtgcaggcatcaacggccttctgcgttttggcaacatcgactggggcggcatggtagcctaccgcctctctcccgccagcgctttctaccatttcagcgaccccaaagacaacctctcgtggctcgtcacagcctcacttcacctataatttcatctcccacacaatatttcaaacccactgccgtttaaaagaattcaatttaaaaaaagaatgaaaaagttattcaccatactgaccctcctaggaacctcctttatcgctcaggcccagccctatagcatgtccttcacccttcaaggcgccaccgattcggtgatgtacatcgcccgccatttccgcgaccaggtagagattctcgactccgcccgcggtgtcaagggcacctacctcttcaaaggcaaacgttcctggccccgtggcatctacgcccttgtgggacagaagcgcgacaagggcatccgcgatttcgtcatcgacggcagccagaaattctccgtcacgggcgacgccaccctctcgccggcaagtgtcaccgtgaaaggaagcgacgccaaccagcagatgttcaactatctgaaaaccgttgagagcgccaagaaagagctgaacgacatacgcaaacggcagaaaaatcctgccgacaaggagcaggccgacaaggaggagaaggcgctcatcgaacgcatggaagccttcgacgcttccgcccgccaccccaagaagccgcaattcttcttcgacctcgtcaacctcttcgacgagcccgaggtgcccgacagcatcgaggacaagtccacctacttccgcacccactactgggaccgcctgctgccaaagccggaaaacgcacgctacaagctggccgacctgcgccacacccccaatctcttcaacaaggtcaactacttcttcttcggattgatgtattatgccgacagcgacaccatctgcaaggaaatcgaccgtctggcggcacgcatcggcgacgacacggcgatgctgcgctatgtcttcgacttcatcgagccccgctactaccgctccacgcgcaatatcggctgggacgccgtatggtgccacctccaggccgaatactatcaaaaggggcgctgcccctgggtctccgagggcaacctctacaacatgcgccacaacttcaaccgcatacgccaaagcatcatcggcgcccatggccaggagctctggatggccgacaccaaccaaagttccgaccccaaggactgggtcagcagccaccgtttccccaccaagtacgtcatcctttggttctgggaccccgattgccaccattgccaggagcagagcgcggcactgaaagtgctctacgactcgctgctcacagccccctaccgccccttcgaggtctatgccatcggctatgagagcgacgtggagaaatggaaaaagtatgtgcgcgagcacgacttccgctgggtcaacgtcggcggccccaacgtcaacatcgactatcaggaagcctacaacgtccacggcgcgcccaccatgatcatcctcaacgagcgccgcgacatcatcatgaacaaagttctccccgccaagaacctcctcaagttcttcgaagactacgagaagaaaaaacaaaaacagaactgaatggacgagcttaacatcatcaacatactacccgacagcgtggcaaaccagattgccgccggcgaggtggtcgaccgccccgccagcgccgtcaaggagctgctggaaaacgccatggacgccggggcgacgcagatcgacctcatcgtcaaggacgccgggcgcaccctcctacaggtgatcgacaacggctgcggcatgtccgacagcgacgcccgcctctgcttcgaacgccacgccaccagcaaaatccaccacgccgacgacctcttctccatccacaccatgggcttccgcggcgaggctctcgcctccatcgctgccattgcgcaggtggagctccgcacccacctcataggcaacgaactcggcaccgtcgtcaacatcgaaggctcccacgtcacctcacagcacccggaggcctgccccacaggcacttccatctctgtcaagaacctattcttcaatgtccccgc

SEQ ID NO: 3957 - DNA, 24227 bp, synthetic construct
  misc_feature 1..24227: note = Synthetic
  source 1..24227: mol_type = other DNA
tcaccggctgggcatcgcccgagggagaagagaccaacaatgtgggtgtcagcaagaaccgtgccgaggtcgccaccacacagatcaaacgcgtccttgacgacgtactgaacactatggcaagccgcaagcaagtgcccgcctacgaagttgaccactacaaatatgagctccagaagcagataattgtctccacccgcgccgccggcgaggactgggtacacttcgtcattatggtcgaagagtctgacattcaggacaagcacgccatcgtaaacatcgtagagacccagcagaaccttatcaagcgcgagcagatgatcaagaatatggcagagacttacactcagctcaacaccgacatcttccccaacctgcgccgcgcacagatagccctctactacagcgaggctcgcaagaccgaccccgagttggcaaagcaagccacacttaaccccgcaaaactgaccttcgacgaactgatgtacgctgcatacatcaactacaactatgagaccaagctgaaatactacaagtgggccaccgagaactacagcgctgaatgggccggatggaacaacgccggcgccgtgtcgttctatcttggcgactatgctgaagccgagcgctatctcaatatggcacgccagctcaacccccacaaccccgacgtgctgaacaacaccggtcttctctgtctggcacagaaagactacgctttggccaaatactacttcgaagaggctgaacgccagggcagcaccgacgccgagaccaacctgcctatccttaacctgaagaagggcaactacaaagacgccgagaaacagctgaaaggcagcacctgcagcttcaaccttgctttcgcacagcttatgaacggcgagaccagcaacagcatccgcaccctcgactgctgtctcgaccagaatgccgacgtgttctatctccgtgccgtggcctacgcccgcctgggtgacaaggtcaacgccatcaagaacctcaaagtagcttgcgacgaagagtacaactacaaggagcgcgccgccgtcgacaccgagttcaaagcctactgggacgacgaggagttcaagctgattgtaaaactctggtaaccaaagccaacaatgaaacggcaaataccgaatctcataacactctgcaacctgctttgcggagtgttttcttgtattttcgcctatgaagagacgctgcacatagcagcgatgttcatctgtctgggcattttcttcgacttcttcgacgggatggcggcacgcctgctgggtgtggcgtcgccgttgggcaaagagctcgactcgctggccgacgtcgtcaccagcggcgtggctccgggaatgataatgtatgtactcatcgcccagttgaccgacctgtcgtggctgaaatacctggcgctcctcataccgctcttcgccgcctaccggctggccaagttcaacctcgacacccgccagagccacagtttccttggccttcccgtgccagccaacgcgctcatctgggtcggtctggcccttgcctggcgtttgtcctgcagcaacgaatgcatcttgactggcgactacacggccatagccatcatccttgtcgccgtgtcgctggccaccaacatcctgatgataagcgaagtgcctatgttctcgctcaagttcaacttcaaggatatgtcgtgggcgaccaactccgtgcaatatttctttttggtaggatgcgcagccatcatagcggtatgcttcctcaccaacgctttctggctcagcctgtcgttcataatcatctggtacatactcctttcactaatcactcgaaagcacaacaatgccaactaaccctcgcaatatagccattgccgactacgactacccactgcccgacgagcgtatcgccaagttcccgctggccgaacgcgaccggtcgaaactcctcgtttaccgagacggtaccatcaacgagtcgcagttcttccatctgcccgagctgctgcccgagggagctatgctgctcttcaacaacaccaaggttatccacgcccgactcttcttccgcaagcccacagggtcggtcatcgaaatcttctgccttgagccgtatcagcaacctgtagccgaggcattcgaagagcgccaacgctgcacctggctctgcttcataggcaacaacaagaaatggaaagaaggtcccctgttttcagaattcgaaattcaaaattcgaaattcaaaatcgcagcttcgcgccgcgaagcaaaaggcaacgcctggattgtcgactttgagtggacaggcggcatcagctttgccgaagtgattgaatatgcaggcgtcattcctcttccaccctacctgaaccgcgatgccgaggagagcgacaaagagcgctaccaaacggtctacgcccattacgaaggctctgttgcggcaccaacggcgggcctgcacttcaccgaccgtctgctcaaagaactgaacgacaaaggcttccttaccgaatacataacccttcacgtcggtgccggcaccttcaagcctgtatcctcagacaccatcggcgagcacgaaatgcacgtcgaaaaagtgcagataagccgacagaacattattaacatcctccaccagctcggcaagcctatcataccggtaggcacaaccaccgtacgcaccttggaatcagtatattggtttggcgtaaagctacaatcaaagcccgaccttgaggcgatgcacatcctgcaatgggacccctacggacttgaagccgaaaacatcagcacaaaacaagcctaccagaacgtactggactggatggaccgcaagggcattgagcacctcgacggtgacacacagctgctcatcgctccaggctacaagtaccacgttatcagcggactcataaccaacttccatcagccaaagagcacacttctgctgctcgtgtcggcacttgtcggcgatgcgtggaaggagtgttaccgctatgccctcgacaacggcttccgcttcctcagctacggcgacagctgcctgttcctcaagcaataagacagaccaatgccgaggcttttacgcaacttcttcgagctattctttcccagcacctgctgcgtctgcggcacgccccttgtcggcgacgaacacgaactctgcaccaactgcctgctgaagctgcccgaagcgacaacaacgctgaaagacaacaatttcgtagagcaacgcttcataggacgtgtgcccgccgagcactgctccgccctgcttgtatacaggcgtaaaaccaacgcacagaagatattgcaccagataaaatactatggcaatgagaaacttggcatcgttatgggccgccagctcgggttgcatcttgcccaaagcgggctctacgacagcgtcgacctgcttgtacccgtgccgctgcaccgccgaaaagaacggcgacggggctacaaccagagcctgcgcatctgtcagggtatagcccaaactttccctcgccctattgtcaacgacaaccttgtccgcattcgccgcaccgactcgcagacccacaagacacgcctgcagcgactcgacaatatgcagggcgtattcgccgtcaaggacagcgaagcactgaaaaacaagcacatcctgcttgtcgacgacgtcataaccacaggtgccaccaccgaagcctgctggatagcaatgcgcagcatcgaaggcctccgcatcagcattgccgccctcgccgtgagcggcgacaactaaccgaaatcggtgaaattgcaaaattcctcccaaaacgtcccaaattaggtataatcaattgaaattcaacaaataacacaccattccaaaagagttcaatttcctttggaaagccccgattttaccctattgcaacatcctgatttccatataccatcttcttatcaaattccacctaaattcttatcaaagtttaatcaaagttcaagatggtagaatttgataagaatttagcaaaaagtcggatggaatttgagacagcgaaaccacgttgtaaactaccccctgtcccaaaggcacctatattgttcgcatcgtcactccacacggcacgtcgcacaaaaaacttgttatcaactgattgaacccatacaacaggttttctgctaaaaaaagataactttttcttcgctattttcatattatttcttaatttcgttgcttaaaacggcaatgcctttttaagcaaaagatatgcttatcaatctgttacagccaaacaagaaaatagaaataatatgaaatacaatcgagtactactgaaactgagcggcgagtcgctaatgggcactcaaagctatggcatagaccctgcaatgttggagcagtatgccaaagacattaaacaagctgtagaaaacaaggtagaggtggccatcgtcattggcggcggcaatatcttccgcggcctcagcggtgcggccaaaggaatggaccgcgtgcagggcgactatatgggaatgcttgccacgctcatcaacagtatggcgctgcaggccgagcttgagaagcaaggactgcacaccgagttgctcagcggtctggccatagagcccatctgcaaggaaatgagccgtcgccgcgctatcgaggcaatgaaagaaggcaaagtagtcatcatcggcggcggcagcggcaacccgttcttcaccaccgacaccgcctcagccctgcgcgcagtggaaatcaaggccgacgccatattgaaaggcacacgtgtcgacggtgtctacacagccgaccccgagaaagaccccacggccaccaaattcagcaccctcaaattccaagaggccttgagcaagaagctcaagataatggacctcaccgcctttgccctctgcgaagagaacaacctgcccatctacgtcttcgatatgaaccgtccaggcaacctgctgcgcgtggtcaacggcgaacccatcggaacagaaatatgctaagatgaaaaggaaccattaaaccttttcatcatttcaaaccctttcaacccttaaaacctttccaacctttcaaaccctttcaacctttaaaacctttccaacccttaaaacccttaaaacaaaacataatgaacgatttatcaaaagcctgtatcgacgaagccaaccaaacaatgcacagcgccatcaactttcttgagaaagaactggccaaaatacgcgccggcaaagccaaccctggaatgctcgacggcgtaaagattgactactacggcactcccaccgagttgagccaagccgccaatatcagcacgcccgacccgcgcagcatcatcatccagccgtgggacaaatccatcatcggagccatcaacaaagccatcctcgacgccaatctgggcttcacgccgcgtcacgaaggcgaaatactgcgcatcgttgtccctccgctgaccgaagagcgccgcaaagagctctccaaggccgcaaagaccgaggttgagaacagcaaggtcaacatccgcaacgcccgccgcaacgtgatggacaaagtcaagaagctgaaagacaaatccgtgcccgaagacgaagtgaagcaagttgagaaagaaatccaggacatcaccgacaagttcattggcgaatgcgacaaaatctacgcagccaaagaaaaagagataatgaccgtgtgatggacatccgctggtttgagaccctcgagtccaccaacaactattgtaaactcctcgacccccaaaccgtcggggagtttaccgttatttgcacccgtcggcagaccgctggcatcgggcagcaaggcaacgtatgggccagcgaaccatacaaaaacctaaccttcagcctaatcctgaagcccaccttccttgctgccgacgagcagtaccgcctcacgatggccattgccctcgccgtcgccgagacggtggagcacccgttctccgatttccgctctccgttctccgctcaaatcaagtggccaaacgacatctatgtcggcgaccaaaagatctgcggcacactaataaccagccagataagcggaagccatctcagccaatccatctgcggcatcggcctcaacgtcaaccagaccgccttccccgactgggtgccaaaccccacatcgcttagcctgttgacaggcaccgaacacaatctcgacaacctgttggacaccttgctcagcaacattgagacagagtacgaccatctgaaagaaaacgacagagacctcaaaagccgctatctgagccgcctctaccgcctcggagtcgaagccgactacatccacgaaggccagccccttcgcgccaccataaccggcatcgaccgctacggtcacctccagctcgcaaccgccgccggcactcccctcacctgcggaatgaaagaaatccaatttgtgatataagcgcgccccgcgccgaaccaacagatttccaatacatttttaaaacacaaagacattttttattttggacaaaataaataattaagtaatacgttaattagtcacaagttaattagtcacaagttaattagtcataaacttattactttaataatatgagcagtctctttgttttcgggaaaaccgtgagcggcgatgcttttaccgaccgtgaaaaagacacagccaagctggtgtccaactttcaatatggagtaaacacattcctactatctccacggcgatggggtaagacatcactggtaaaaaaagcaaaagccattgctgagaatacaaaattaaagatagtgtatgtcgacgtgcatctatgccgcagtcgcgaagatttttgcgaacgttatgcttcggccatacttacccagacttccaacaaaatggaagaatggattgacaatgcaaaaacatttttgaaccgattcagtttcggagtaaatgcttcggccgacccgtcgacagagatgaccttcaaaatgcaactgactccacgcgaacaatcactggaagacctaatacagcttccggaaaggattgcgaaacgaaaaaaaacacacgtggtggtttgcatcgacgagttccaacagataggtcttttcccaaacagcgtccaattccagacagagcttcggtcgatatggcagcatcacgaaatgacatcctactgtctattcggcagcaagaagcatatgatggaatcgtttttcgacgacagcagcaagccgttctacaagtttggcgatatcatatatctacagcgaattcccgtcgaatattgggtaaaatacatcaccggcaaattccgtcgcgaagggaaaaacatcagcgagaagcaagctcgctggattgttgaccacgtcgagagcaactcttcctatgtccaacaactatcgtggtacgtttttcaacgcacggtgaaaaaagtggacgaaaacattctttctgatgcattgacagaactcgtggaacaatgcgccgatgtatttgaggccaaaacagaaaaccttacagcaaatcaaataaacttcctgcgctgcatagccgacggaattcacacaggaatatcctctgcaaaaatcatcgcagcatacaatcttggatcgtcgcctattgtagcccaactgaagaagtcccttatcgagaaagatttgatttccattgagaacaaagaagtctatctgtcagacccagtgatgggaatctggctgaaaagacaattatagaaatcgtgttcttgatatgaaagcatcgtcacttttcaagaaatacgtctggcttgtcgatatcatccgacgtgcaggcagaattacccttcgcgacatcaacgagcgatggacacgcaccgagatgagcgagggtattcccttcagccgcaccacgttccgtcgacatcggcaagaggtggaagaaatgtttggcctaatcataaagtgcgacagcgacaaccgctattatattgacgaccccacgttgatgtcctccgacagcgtgtcgcaatggatgctcagcaccctggcagtaagcaacatagtcagcgaagcccgaggcctgcacgaccgtatcctcttggaaagcattcccaccgaaggcgagcgtttgcgacaagtagtggatgctatgcataacgggcaacgcttatgcataacatacaggcgctacggcagcgacgacccacgccaatggacagttgagccctactgcataaaactattccgtcggcggtggtacctacttgggcgcttcgaagaaggcagatacatcgtgctttcattcgaccgcatcctgcaaatgcaaaccgctgacgatagcttcacaattgacaaaaactttgacgcgcaagcctattttgccgaatacttcggcgtgatggtcagcgacaatacgcctttgcagagtatagttctgcgcgcctacggcaacgagcgctacgctctgcgcgacctgccgctacacccttcacagcgtgaacttgaagaccacggcgaatacgttgattttgaagtacgcctgcatccaacttccgacttcttggcccatatcctctcgcgaggtcgttggctgcaggtcatttctccagcatctatagcacagcaaatcaaagagatgctacaagagacatcctcagaatacaaatagccaccacctgtggcccgttttttggagcacctatcggtgtatctttgcatcgtgaaagaattcaacacaatgcaatgatgacctccttgttcatattactaaccaaaggtgggcttggcggaggagacgccggaggcggcttattccttattctcattctgttagggtttttcatattgttcggttatatcctcacccacgccgctggcggtatcctcggtattttatggttattttacgacgagttgaccaaagggacctcactggacaaagaatacgatggacctctttctattggtgccaaatatgctttgatctcacttggcgtagcaagctggcttgcattcataatcgtccccaccgtcagagacacagacacatctgggtggtatatattctggtgcaccgtctacccttttatatacggctacatctacatcatactacgacacttctatttcaggcatctttacaaaattggaacaaagaaagccaagcaatcactcgttgcacttatcatctgcataatagccattttcatcctcaccatcttcgccattgcatacacatcgccaagcaaccgcgtcgaccgtttcaatgcaattttatccaaagcccaaaaatctgagttaatcgagagcgaatgcattgaaggattccgtttaggaatgcctttttctgaatattgcgacaatgtggacagactcatcaaagacagtttacttgagcgcgacagcactggtgaatacctattctacaacaaatacaacacagaagaatataacaattcaaaactatacctcgaacccgtattttgcgacggacatctaagccaactggcattcagtgtttataacggtatgggcgataaaggtttgacacttgaattgcactcatcaggaagattagtaggcttcaaaaaactggtcgttcccgaattgacattcacatcagatggagatgccaaagtgccagaatatagcaatggtccggaccaactctataactattatgccaacgatgaactgtttcttaaagacaatatgctgattgtcatctccgtcctacaaatcaagttcatcaatatgcgcgacctttaatgcttcacaacaaaaaaattcgtatatttgcaccttgaaacgaaaacaccccaaagagcaacatcatataatacaatcatttgacaagaaaatcagcgcaaaaaaaatatattagaacaacaaaagcattttcaaatactgtatggaaacaatcatatatttactataaaaaagagtcctacgtaatcgcaagacccaagattcttcggcttatagccttattgtgaaaagcttaaaaagaaagtgcaaagatacaacatttttttcaatcgtcaaaaagaaaattcactatggaacaaaaaattttaggtatagacttaggaaccaactcattaggattagcaattagagacatagaaaatggtagaaatattgttgatcaactcgatttctacacctcaattatattccaatctggtgttgggaaagacaaaagcggtgaattttcttatgcagccagacgcacaaaattccgttcctcacgacgtttgtatcaagctcggaaataccgtatatgggccacattgagattattgattgccaacgattgttgcccattgacaaacgagcaacttgacaaatgggcaaaatacgacaaagccttagggttaaaacgccagtaccctattgatgcaactgaatttgaacaatgggtaaggcttgattttaattgtgatggccaaccagaatatagtagcccctaccaactccgtgcagagcttatgaacaaaccattggattggaataatcaaaccgaccgttttaagtttggacgcgcaatgtatcacattgcccaacgccgaggctttaaaagcagcaaaggtgaaactcttaaagaatcttcagaaaacgaagatgtaaacagcattgagctgggcgaagctatgaaaaaatcggaagagaaaaaatccaagacccttaatgaatatatggaaagcaattcacttcctacggcaggatgcgcctttgcaatgcttgaacgacaaggcatacgtgtaagaggaagtgaattccaggccgttcaatctcagcttctcagcgaagtagatcaaatctgtaaatatcaacacattgaccaaatagcaccagacctatattgccgactaattagcacaaaacaaggtgaaggtacaatattcttccgtcgccctttacgttcacaaaaaggacttattggcaaatgcactctcgagcccaaactacgacgttgtcctgtcagtcatcctgattatgaggaattccgtgcactttccttcatcaacaacatcaaattcagggcaaagaataccgacgattggcaagcactgaataacgatgatcgagtttctattttcaacgaactattcactcgcgcaaaagccacattcaagttcgaggatatacgaaaatggatagaaaaacactatacgctcggagaattaaattacaatgaaaagacaataaactacagcgaccttacaaccgtagccggatgcccagtcatcagccgtttgaaaaagattctgggcgaaaagtggaatacgactaccataactacaaatcgcacaagaatcaacctgaatacaggcgaaatacatcctgttgattataactacgtcgacatctggcaccttgctttcagtagtgatgattacgaagaactcgccgagttttccaaaaagcaaatgggttttgacgaacaacaaaccggacatctcacacgactatggagtgccatccaggacggatacgcatctttaagcctaaaagcaattcgcaacatactaccatttcttcagcaaggaatgatttacagtgaggcagtcgcattcgcaaaaatacctgaaatacttgggaaagagcgttgggaaaaagaacgcgacaatattatctcttcattacgagaaaaaacaatcgaaaacgagtatacaaagactgtttacaacatcacaaacaccctcatagccaactacaactctcgcactcttgatgaacaacaagcatatcgcaataccggttacatcatagacgacattgaccgtgccgagataatgcaatgtattatagagacacttaatgaacgacgctggaaagcactaagcgacgaaagacgaactgccttacaaaaagataccgaaaccctttatcagcaattctttgcatcaacaaaaagagactactacaaactgccacgacaaaccgacaccttccgacagtgcctatcagaaatgttcccagacataaagtcacagcaatggttacgtctttaccaccactcacaaatcgatctcttcccaaaacagaagtcagtgccagtcacaactgacgatggacgtataatgcaaatatgtcaacttggcaaacctgacattggttcaataaagaaccccgtggttttaagagccttgtatgttttacgccaatccatcaatcacttgctgaaagaaggaatgattgacgagtacacacgcgttgtcgttgaaaccgcccgcgacctcaatgatgctaactggcgcaaagcaattgaaagatatcagaaagaacgcgaaaaagaaaatgaagccattgcaaacataataaaagaagtaaggcctaactacaccgaagatgatatagaaaaaggaagattattgttcgagcaaatcgagacaaaaggaggtgacaacgaggactataatatagttgcgaaatccacacgtaaagaaaaggagaaggccaaaagttttgctcttgatatgcagaagtacaaactctacaaagaacagaactttagatgcctctacaccggaactatcatcagcttgtctgacctctttgccgacaacaaagttgatattgagcacacaataccccgcagcatatcttttgataattcactgagcaaccgaacggtatgtatggcgcacttcaaccgcaaagaaaaaggcaaccgcatccccaccgaactatcaaattatgcagaaatcctgacacgcataagaccttggttggaacacgtagaacacatcaagacccaaatcgaactatggcgtggtaaggcacgcacagcagccactattgatcgcaaaaatgaatgcatccaacaacgtcaccaatgggaactggaattagagtactggcaggccaaagtacgtacattcaccattcaaaaagacaagctcgacatcggtttccgcaacagccagctggtagacacacgcataattacaaagtatgcctttcattatctcaagtccgtttttgcacgtgtcgacgttcaaaaaggcagcgttacatctgactttcgtaagatcctaaacgtacagagccttgacgaaaagaaagaccgttcacgccactcacaccacgcagttgatgccgccatactaacaatgatacccgtagcggcacagcgtgaccgaatgattgaactgttttacaagattgacgaaaatcccatagaatccgagcgggtcgcactacagcacaaattggaaaaagaaattgctgcctgcaatattggcacagtcaacggactcattgaaacaatcgagcacaacattcttgtcaatcacgtcagtaaagaccagacactcactcctgcaaagaaacctcgccgcataggtcagcgtaaaatcgaaggccaatggctgacaggagattctatcaggggtagccttcacaaagacacctactatggagcaattaaaacagcagacgaaacctgtgttttagttgtacggaagcctatttcaagtttgagtgaaaaagaccttgcctcaattatagacccagccgtgcgaaaagcaatagaagaacaagtacgacatcgtatggccgaacaaaacatatccttcactaaagcaatagagcagcccatttatatgctaaaccgtaatggacagccagcgacgcacgattgcaacggaagagccttgtctcccattcgccacgttagatgtcttgcaaaggcaggacttggatacctaaaaatagctactgctcttaaaattaaacagcagacctacaaatcaaaacacagtcacaagaacacgtattacgtacaaaacgacgacaattacctctgtctattctatgagggtatatccaaaggcaaacagcggaaggaatatagactcatcaactattttgatatcgcgcaactcaaaattcacgatgcatccgtccttttcaacgaaccagagttcaattgctttgaaggcagtcccttaatgcctctgaaatcaatattgaagaaaggatgtcgagtattgttatacaacaacttcaaggaagaactatatgaccttgaccacgacacaatatcgcagcgtctttatgttgtatacaaattcaatgctataggcactcctaacctatacctacgtcatcatttagaagcgcgcaaggagtccgactgctcaattgaagaaaaaggaacagcttttgacgctcatagaccattatcatatctctctttaaaagcttcaaactttaaagccatagtcgagcactatgactttgaaatagaccccgtcggaaacataatcttcatataattgtcttatgatcaaacgcacactctgcttctcaaaccctgcctatctgtcgatacgcgacaggcagttggtggtgcgcatagacagacacgacaacgagccggaacgacagacaacaattcctatagaggatatcggtgtcgttgtccttgacaatcgtcaaatcaccatcactcacggtacaatgtcagcgctactggagaattgtgccgctgtcatcacctgcaacgaggcgcatctgccagtgggtcttctgctgccgctcgaaggacacaccatacaaagcgaacgcttccaagaccaaatcagtgcctcgctgccattgcgcaaacaactgtggcagcagacagtgcaacagaaaatcctcaaccaggccgcgctactgcgacagctccacaacaccgagacaggcaatatgcagcgttgggccgccgatgtacgtagtggcgacagcaccaatctcgaagggcgtgctgccgccttctactggagccaaatgtttccgcaaatactctatttcacacgcaaccgtgacggcggctacccaaacccactgctcaactacggctacgccatactccgcgccatcatcgcacgtgcattggtcagcagcggcctactgcccactctcggcatccaccaccacaaccgctacaacgcctattgtctggccgacgacattatggagccctaccgcccttacgtcgacaaactggtggcacagacaatggacgaatatggcgacatcggagtcaccaccgacatcaaacgacggctgctaaccatcccaaccatagaagtacgcatcgacgggcaacgcagtccccttatggtcgccgcaagtcaaacaacagcctcgcttgcacgttgtttctctggcgagagccgcaaactggcttatcctgaaatgcagtgatggaccgtttcagtgaatatcgcattatgtggattctcgtcttcttcgacctgcccaccgacacaaagcgtgagcgcaaggccgcaggcgacttccgtaaacaactgctcaaagacggtttcacaatgttccagttctccatctatgtgcgccattgcgccagccgtgaaaatgcagatgtccatctaaagcgtgtcaaagctatcctgcctcagtatggacaagtcggtatgctgaccattaccgacaaacagtttgcaggcattgaactgtacactgctcgcaaagagaccgagcccaacgcaccaggacaacagctcgaactcttttaggattacaaaaacaacctataaaaatagaaaatcccgcctcgcgaggcgggattttctactcaattgacattgtcaaagacattgagtttattgcttttacacgaatcgtgttgtttatcatcaatgtcaatgttccctttttaagcaattcacaacaaacaagacaatcatcacggaatatggtatgttgtttatcatcaatgtcaatgttccctttttaagcaattcacaactcgcatccgtcgcggcgagttcttgcgtagttgtttatcatcaatgtcaatgttccctttttaagcaattcacaacgcccctgcttttcgtattgtttgaggtcgtgttgtttatcatcaatgtcaatgttccctttttaagcaattcacaacactgcggtgttgtgtgcgtagacaatggagttgtttatcatcaatgtcaatgttccctttttaagcaattcacaaccttaagggttggcttcgccgtttgaacgcgttgtttatcatcaatgtcaatgttccctttttaagcaattcacaacggaagagataatgagaaaacaatctgagcagttgtttatcatcaatgtcaatgttccctttttaagcaattcacaacaaaagagatgaagaaaataatgttcaacgagttgtttatcatcaatgtcaatgttccctttttaagcaattcacaactgggcggtgcggtttgtgtcgagtattcttgttgtttatcatcaatgtcaatgttccctttttaagcaattcacaacttactatcgtaatgatacaaacaatccgtagttgtttatcatcaatgtcaatgttccctttttaagcaattcacaacatgttgcagctgataaaggcgttgccgtaggttgtttatcatcaatgtcaatgttccctttttaagcaattcacaaccctcaagcatcgtgataatctcgtcgataagttgtttatcatcaatgtcaatgttccctttttaagcaattcacaaccgcggaactggtctatatatatgctgtcggttgtttatcatcaatgtcaatgttccctttttaagcaattcacaacgcacgggcaagatgaaccccaagaccgtgggttgtttatcatcaatgtcaatgttccctttttaagcaattcacaaccgtccgcaggctggattttagccacatacggttgtttatcatcaatgtcaatgttccctttttaagcaattcacaactatataatgatttcatacctgaaaatgaagttgtttatcatcaatgtcaatgttccctttttaagcaattcacaacccaataagattgcaattccatttgtgtcagttgtttatcatcaatgtcaatgttccctttttaagcaattcacaactcaaggttttcggcatcatcgccgccgtcggttgtttatcatcaatgtcaatgttccctttttaagcaattcacaactagttattgtcggtacatttcgcatatatgttgtttatcatcaatgtcaatgttccctttttaagcaattcacaactaggtcgccgacaatgacacagttctccagttgtttatcatcaatgtcaatgttccctttttaagcaattcacaacgacgcttgaatgctttgtcggcattctccgttgtttatcatcaatgtcaatgttccctttttaagcaattcacaaccttaatttaaaataacttagttttcttaaagttgtttatcatcaatgtcaatgttccctttttaagcaattcacaacaagacggcgagataacagggatggcgacgggttgtttatcatcaatgtcaatgttccctttttaagcaattcacaactatagaacatcagattaattatgaagatgtgttgtttatcatcaatgtcaatgttccctttttaagcaattcacaacgcagggattacgacaggctctccgttgagggttgtttatcatcaatgtcaatgttccctttttaagcaattcacaacatgtcaacatcatcaccgttaaccctcaatgttgtttatcatcaatgtcaatgttccctttttaagcaattcacaacggaagacaggcacgaagattgtcgccacgggttgtttatcatcaatgtcaatgttccctttttaagcaattcacaacacagataaagagtatgaattgcttgatgcgttgtttatcatcaatgtcaatgttccctttttaagcaattcacaacttgttgagtgtggtgaagaacgccactgggttgtttatcatcaatgtcaatgttccctttttaagcaattcacaactgcaccaccttcaggagttccacctgctggttgtttatcatcaatgtcaatgttccctttttaagcaattcacaaccaatcttcggctcactcaacttcaccaccagttgtttatcatcaatgtcaatgttccctttttaagcaattcacaacccattccccatctcctttcttttttttaagttgtttatcatcaatgtcaatgttccctttttaagcaattcacaactagtcgagaccgacggcacgaagcttgtcggttgtttatcatcaatgtcaatgttctctttttaagcaattcacaacatcttgccggagtttgacaacgaagagaagttgtttatcatcaatgtcaatgttctctttttaagcaattcacaacccataatactttatgggggtttctgttgttttgttaataatcaatgtaaatatttccctttcaagcaattcatctgctcactatcatttgattatcaaagaactcaaaagtagatttcacaaaatgaatcattatttctgattgcaaaggtacacttttttttagaattaaaactaaaaatgcgccaagcaaaaacaatcacacaaaaaaaaacgttttctcgcttataatgtgtaattattatcacatcttttcaaacgaatccttgatgccttcgtcgtagggggtcagttcctcgatgcagttgcaggcggggctgtagtagaaataggtgctgttggtgcctttggtgcggcacacatattccgagagcatcttctcaatatagagcgtggcgcactgggcaccgaagttccacgccagctggtaggcgtcgttcaccgttatgcggtcgaagtgcgtcttcatcgtcgccttgtcggtacgcagcgacgtgacggtgccgtgaaagtcctcggcaatctccctgttcttgaaataaacaatgtcggcggtgtcgcgtgcgtcgaagcggaaccatacattcatcgcgaagtggcgcaactcgtagtcgtagccatatttgacgccgcgctgcgtggtgaaaccgctgcggcccggctgcagatactcctcagcctccacctgcgcgatgtcgatggtgaagtgattgtcgtcggcttgcggcaagcggctcgcatcgtccaccagcacaatcggtatcttggtgcgactcagcacgtaaagaaacgccccgttgaactgggcaaggaatatgctgtcgtccaggcggttcagtatcgccgtcttcgaggcgatgaccgaatcctgctcgcggtcggtcataaacataaagccggcaatgtcgttgagcgagctgttggtgtgtataaccgacttaggcagagaaacataaatctgttcggtagcattgtccttctgttgctcgaacttgctcagaaagcttccggcatagaaccagtcggccgagcagccggtcagcagcagggcaaaaagcgaggtgaatagtatggtcttcttcataaacaggcatttaatgaattgcagacctaaaacgcggcgcggctcaaattattgtatcaaaacgcctccctttttgcatccattttcgcaccccaccccgaccaaataccgaccctacaccctctcaaggcctccgctattaacaatttttatgttaattttactatcttactatcaagttctaccaaactgaaatttggtaagaacttggtaagaatttgggtagaacttggtaggaagatggtatatggaaatcagggtgttggatgagagcaaaaattgacgtttttcggtctttttttactgccgaaatgttaaaattcaggggtggcggaggcgaccttgggacagaggcaaagggacaaggccctcctgccggcagggtgccggcggaggggcgcagaggctgacaatcgggcacagcgacagcaaaagatgaaaatattttcaccaatcatccaaagtttagtatttttgcaaaatgtgcagcatcgcagccaactccgcaacaagctgcatattaacgacataaataatacaatataataaaataacacatcaaataatgaagaaaaagagtctgaaagaggaaattgtagcctatttgcttgtggcattgggcagtttgttgttcgccgtgggcgatgttatgtttgtcaatccctataacctggcccctggcggtgtctacggtttggccaacgttttccacgctttgtggggctggaagatttcggttgccggtatctgtatggacatcccgttgctgattatcggcaccatcatccttggtccgcgtttcggcatcaagaccattgtgtctgtgatacttatcccgatcttcacctacattcttgaaatcacgtggggctacgctccgctgattcacgacggattgtacgacagcaacgaaggcctgctgagctatctgacctacaccgtcggacagggcgacgcagccatcgacaagttcttcattcccgacttcttcctcaacaccgttgtggccggcttgatttacggtgccgccatcggtgtcatcttccgcgccggcgccacctcgggcggcagcgacatcatctcgatgattatccacaagtacaccaagatttcgcttggcgtgctggtgcttatcgtcgacagctgcatctcgctgaccactctgattatcggcgacatccgtctgcctatatactctatcatcctgattttcatcgagagcaagattatcgacatcatcgtcgaaggtgtgacaacctacaagacggtgtttatcatcaccgacaaggtcgacgaggttaaagactacattctcaacgatttggagcgcggcggcacctgcttcccgggcatcggcctctatcagggccaggaacgtagaatgatctacgtcaccctcgaccgcaccgacctcgtcaagctgaaagccaatctgcgccatctcgacccgcacgcctttgtcaacgtcatcgagagcgccgagattatgggcctcggtttcaaggctttgcctgaagaataatgtcaattgtgaatggtgattagtgattagtgaatagtgatttgtgaatggtgaaatgtgaagtgtgaagcaatcgcactcgaagttcacatttcacaattcaccaatcacttttcaccattcacttttcaccaatcacttttcaccaatcacttttcaccattcacttttcaccattcacttttcaccattcacatttcacaattcacaattatctatgcacgtcctccagctctgctacaagcccccctacccgcccgttgacggcgggacgctggcgatgaacagcgtgacacagggacttatggcctcaggccacaaggtgaaggtgctaagtgtctgcagcgacaagcacccggtcaggagcgatgcattggagacgcaatacaaggatgccaccggctttgaggccgtctacatcgacctgtcgatacatccgctcgacgccgccgtgtcgctgctgtgcggcgagtcctacaacgtcaagcgtttcgtcagcaaagagttcgacgagcgcctgacggccatacttcagagcgaaagctttgacgttgtgcacattgagagcatattcctcgctccatacgttgccaccgtccgcaagcatagcgacgcaaaggtggtgttgcgggcccataatgtcgagcaccgcatctggcggcagatagccaccgcgacacgcaacccgttgaagcgctggtatctgaagaagctggcattggctttgagagcctatgagttggagcatatcaacgactttgacggcattgcctgcatcacggccaacgacgccgagacgttccgcggcgaaggctgccgcaagccgctggccgacataccctttggcgtcgacatagagcccatcgacaacgtcgatgccgagccgcaaacgctatttcatatcggatcgatggattggcgccccaacgaggagggcatacgctggttcctgaaagaggtgtggccgctgatacacaaggagatgccagccgtaaggctgttccttgccggccgcaagatgcccgacgacctgatgcagatgcagagcgagggagtggtggttgtaggcgaggtgcccgacgctgcctatttcattgcttcaaagcagattaacatcgtccccttgatggccggcagcggcatcagggtaaagattatcgaggctatgtcgctcggcaagacggtagtgacgacaagcgtaggcgccgccggcatcgactacaccgacggcaaggagctgctcatcgccgacacaccgcaacagtttgtggagcaggtgcgccgctgcatcgacgaccccgaattgtgcagcagcataggtgccgccgcccgccgactgattctggacaaatacagcaacgaggccctgacacaaagacttgtgggtttctacaataaactgggcgccgtcgcgttatagcagaaaaacaaactgaaatgaacagaaagagatttttcatattagcaatgctgctgacagtggtatcgatggctgcggcacagatcaagattcccgagacaaacgtaagtttcgagttcccgtcgaacagttggaaatatctgcaaaccaacaagctaagcgacaacaccatcatttatctgtattcatattcagccgactatgtgatagacagccaaggcgacaccacgctgccgtttatgcgcatctatgtccgcaagaactacgacggcaccgtctacgacctggcctacagccgctttatggtgcagccgttccagtcgctcgacgagactccgcacccgaacgggtcgctcgaatacctcggggcctacaccgacgaggaggacggcaaagactacgagttcagaatgttatacatcaaagaccgcaacaacatactcgaaataaggttggaatgcacggtggacaacttcgaggatttcgagaacgagtttgcggagatcatcaagtcggtcaaggtaaacaaatagcatccgatgagaaaaagcatcatacttctggcggcattagccctgagcatcgcggcaaaggcgcagggcgacgtgtcgcaatactcgcaccaatacgagaaactatacaaagcctacgtcaaagagcccgagaatgtggccaacaactatgcccttgccgccttttacgccgacacagccaacccgatgcgcaactatgccacggcgatgaagtatatctgcaccgccgaggaacaatttgtgacaatacttgaagaccgcgacaagtacaaagaagtcaagcggttgctgaagaaaaacatcaacatccagctgctcagggaaacaaaactaagcatccgcatcaaggcaagagagttcctggacaaggaggagaccatctcggacgaaacccttgacagctacgcagatgcgttcaagaacgaccagggcgcgctgaggatggttgaataccgacgtatgggcaaccgctaccagcaggtctgtgcgacaaatacgctggaggcatataagagcttcattgccagctatccatccaccgccgagagcgaagaggccgaacgcaagatggctcaactggcagagaccgtagtggccggcgcccaacgcgagacagaggtggacagcctgcttgacggatatctggacatcgagaccgtgaaagcggcggcacaacgcaaaaaaagtgctctggcatacgccgcactcatcgagaacccctcgcctcaggcatataggtctttcttggccaaatatcctggcagcaacgaatactcgctggtgctcgacaagatggacgcccagcttcagaacgacttcaaccgcttgtcaacgcctcgtcagtatgccgactttatacacaacaaccctgacaacccgctggcggaagatgcactgaccaagctgaaaaacctcatcaacgacgagcacaatatgcaggctctgcgcatctatcttgacgagttcccgcttgacgtgaactataacgacatctacctcacctactacaaatggcacaccgaggaaggcaacaaggcaccactggtgcagtttgcggcacagaaccctgacttccccttcaagagcgctttggacgacgcattggtggcagcagagaaatacgactctatcaatattatgatgccttttgtcgaaaaagagttcaagcaatggacctccataatctaccacctgaccggcaagaaggagtcgttcgtcgcgctgcaacgcacgctccagcactttgtggcggcaaagaattggcaaaaggctaacgagcgcatcagtttcttcgacctcagctttgaagacaactgcgttgacgaggtggccgagctccgctccatcatcgacaggcccgtgaacaacaaactgacatacacgccaatagtgcgtcctgcctacgatatgatgcactcggtgattcatcctgacggcaagcagatgttctacaacagagaagtggacggaagcgtctgcatccaatcggcagtcgagacagcaacaaagaa

SEQ ID NO: 3958 - DNA, 24227 bp, synthetic construct
  misc_feature 1..24227: note = Synthetic
  source 1..24227: mol_type = other DNA
atcactggctgggcatcgcccgagggagaagagaccaacaatgtgggtgtcagcaagaaccgtgccgaggtcgccaccacacagatcaaacgcatccttgacgacgtgctcaacactatggcaagccgcaagcaagtgcccgcctacgaagttgaccactacaaatatgagctccagaagcagataattgtctccacccgcgccgccggcgaggactgggtacacttcgtcattatggtcgaagagtctgacattcaggacaagcacgccatcgtaaacatcgtagaaacccagcagaaccttatcaagcgcgagcagatgatcaagaatatggcagagacttacactcagctcaacaccgacatcttccccaacctgcgccgcgcacagatagccctctactacagcgaggctcgcaagaccgaccccgagttggcaaagcaagccacactcaaccccgccaagctgaccttcgacgaactgatgtacgctgcatacatcaactacaactatgagaccaagctgaaatactacaagtgggccaccgagaactacagcgccgaatgggctggatggaacaacgccggcgccgtgtcgttctatcttggcgactatgccgaggccgagcgctatctcaatatggcacgccagctcaatccccacaaccccgacgtgctgaacaacaccggtcttctctgtctggcacagaaagactacgctttggccaaatactacttcgaagaggctgaacgccagggcagcaccgacgccgagaccaatctgcctatccttaacctgaagaagggcaactacaaagatgccgagaaacagctgaaaggcagcacctgcagcttcaacctcgcttttgcacagcttatgaacggcgagaccagcaacagcatccgcaccctcgactgctgcctcgaccagaatgccgacgtgttctatctccgtgccgtggcctacgcccgcctgggtgacaaggtcaacgccctcaagaaccttaaagtagcttgcgacgaagagtacaactacaaggagcgcgccgccgtcgacaccgagttcaaagcctactgggacgacgaggagttcaagctgattgtaaaactctggtaaccaaagccaacaatgaaacggcaaataccgaatctcataacactctgcaacctgctttgcggagtgttttcttgtattttcgcctatgaagagacgctgcacatagcagcgatgttcatctgtctgggcattttcttcgacttcttcgacgggatggcggcacgcctgctgggtgtggcgtcgccgttgggcaaagagctcgactcgctggccgacgtcgtcaccagcggcgtggctccgggaatgataatgtatgtactcatagcccagttgaccgacctgtcgtggctgaaatacctggcgctcctcataccgctcttcgccgcctaccggctggccaagttcaacctcgacacccgccagagccacagtttccttggccttcccgtgccagccaacgcgctcatctgggtcggtctggcccttgcctggcgtttgtcctgcagcaacgaatgcatcttgactggcgaccacacggccatagccatcatccttgtcgccgtatcgctggccaccaacatcctgatgataagcgaagtgcctatgttctctctgaagttcaacttcaaggatatgtcgtgggcaaccaactccgtgcaatatttctttttagtaggatgctcagccatcatagcggtatgcttcctcaccaacgctttctggctcagcctgtcgttcataatcatctggtacatactcctttcactaatcactcgaaagcacaacaatgccaactaaccctcgcaatatagccattgccgactacgactacccgctgcccgacgagcgtatcgccaaattcccgctggccgaacgcgaccggtcgaaactcctcgtttaccgagacggtaccatcaacgagtcgcagttcttccatctgcccgagctgctgcccgagggagctatgctgctcttcaacaacaccaaggttatccacgcccgactattcttccgcaagcccacagggtcggtcatcgaaatcttctgccttgagccgtatcagcaacctgtagccgaggcattcgaagagcgccaacgctgcacctggctctgcttcataggcaacaacaagaaatggaaagaaggttccctgttttcagaattcgaaattcaaaattcgaaattcaaaatcgcagcttcgcgccgcgaagcaaaaggcaacgcctggattgtcgactttgagtggaccggcggcatcagctttgccgaagtgattgaatatgcaggcgtcattcctcttccaccctacctgaaccgcgatgccgaggagagcgacaaagagcgctaccagacggtctacgcccattacgaaggctctgttgcggcaccgacagcaggcctgcacttcaccgaccgtctgctcaaagagctgaacagcaaaggcttccttaccgaatacatcacccttcacgtcggtgccggcaccttcaagcctgtatcctcagacaccatcggcgagcacgagatgcacgtcgaaaaagtgcagataagccgacagaacattattaacatcctccaccagctcggcaagcctatcataccggtaggcacaaccaccgtacgcaccttggaatcagtatattggtttggcgtaaagctacaatccaagcccgaccttgaggcgatgcacatcctgcaatgggacccctacggacttgaagccgaaaacatcagcacaaaacaagcctaccagaacgtactggactggatggaccgcaagggcattgagcacctcgacggcgacacacagctgctcatcgctccaggctacaagtaccacgttatcagcggactcataaccaacttccatcagccaaagagcacacttctgctgctcgtgtcggcacttgtcggcgatgcgtggaaggagtgttaccgctatgccctcgacaacggcttccgcttcctcagctacggcgacagctgcctgttcctcaagcaataagacaaaccaatgccgaggcttttacgtaacttcttcgagctcttttttcccagcacctgctgcgtctgcggcacgccccttgtcggcgacgaacacgaactctgcaccaactgcctgctgaagctgcccgaagcgacaacaacgctgaaagacaacaacttcgtagagcaacgcttcataggacgtgtgcccgccgagcactgctccgccctgcttgtatacaggcgtaaaaccaacgcacagtggatattgcaccagataaagtactacggcaatgagaaacttggcatcgttatgggccgccagctcgggctacatcttgcccaaagcgggctctacgacagcgtcgacctgcttatacccgtgccgctgcaccgccgaaaagaacggcgacggggctacaaccagagcctgcgcatctgtcagggtatagcccaaaccttccctcgccctattgtcaacgacaaccttgtccgcattcgccgcaccgactcgcagacccacaagacacgcctgcagcgactcgacaatatgcagggtgttttcgccgtcaaggacagcgaagcactgaaaaacaagcacatcctgcttgtcgacgacgtcataaccacaggtgccaccaccgaagcctgctggatagcaatgcgcagcatcgaaggcctccgcatcagcattgccgccctcgccgtgagcggtgacaactaaccgaaatcggtgaaattgcaaaattccttcccaaacgctccaaacaaggtgtaattaactgaagttcaattaataacacaccattccaaaatagttcaatttcctttggaaagccccgattttaccctattgcaacatcttgatttccatacaccatcttcttatcaaattctacctaaattcttatcaaagtttaatcaaagttcaagatagtagaatttgataagaatttaacaaaaagtcggatggaatttgagacagcgaaaccacgttgtaaactaccccctgtcccaaaggcacctatattgttcgcatcgtcactccacacggcacgtcgcacaaaaaacttgttatcaactgattgaacccatacaacaggttttctgctaaaaaaagataactttttcttcgctattttcatattatttcttaatttcgttgcttaaaacggcaatgcctttttaagcaaaagatatgcttatcaatctgttacagccaaacaagaaaatagaaataatatgaaatacaatcgagtactactgaaactgagcggcgagtcgctaatgggcactcaaagctatggcatagaccctgcaatgttggagcagtatgccaaagacattaaacaagctgtagaaaacaaggtagaggtggccatcgtcattggcggcggcaatatcttccgcggcctcagcggtgcggccaaaggaatggaccgcgtgcagggcgactatatgggaatgcttgccacgctcatcaacagtatggcgctgcaggccgagcttgagaagcaaggactgcacaccgagttgctcagcggtctggccatagagcccatctgcaaggaaatgagccgtcgccgcgctatcgaggcaatgaaagaaggcaaagtagtcatcatcggcggcggcagcggcaacccgttcttcaccaccgacaccgcctcagccctgcgcgcagtggaaatcaaggccgacgccatattgaaaggcacacgtgtcgacggtgtctacacagccgaccccgagaaagaccccacggccaccaaattcagcaccctcaaattccaagaggccttgagcaagaagctcaagataatggacctcaccgcctttgccctctgcgaagagaacaacctgcccatctacgtcttcgatatgaaccgtccaggcaacctgctgcgcgtggtcaacggcgaacccatcggaacagaaatatgctaagatgaaaaggaaccattaaaccttttcatcatttcaaaccctttcaacccttaaaacctttccaacctttcaaaccctttcaacctttaaaacctttccaacccttaaaacccttaaaacaaaacataatgaacgatttatcaaaagcctgtatcgacgaagccaaccaaacaatgcacagcgccatcaactttcttgagaaagaactggccaaaatacgcgccggcaaagccaaccctggaatgctcgacggcgtaaagattgactactacggcactcccaccgagttgagccaagccgccaatatcagcacgcccgacccgcgcagcatcatcatccagccgtgggacaaatccatcatcggagccatcaacaaagccatcctcgacgccaatctgggcttcacgccgcgtcacgaaggcgaaatactgcgcatcgttgtccctccgctgaccgaagagcgccgcaaagagctctccaaggccgcaaagaccgaggttgagaacagcaaggtcaacatccgcaacgcccgccgcaacgtgatggacaaagtcaagaagctgaaagacaaatccgtgcccgaagacgaagtgaagcaagttgagaaagaaatccaggacatcaccgacaagttcattggcgaatgcgacaaaatctacgcagccaaagaaaaagagataatgaccgtgtgatggacatccgctggtttgagaccctcgagtccaccaacaactattgtaaactcctcgacccccaaaccgtcggggagtttaccgttatttgcacccgtcggcagaccgccggcatcgggcagcaaggcaacgtatgggccagcgaaccatacaaaaacctaaccttcagcctaatcctgaagcccaccttccttgctgccgacgagcagtaccgcctcacgatggccatagctctcgccgtcgccgagacggtggagcacccgttctccgatttccgctctccgttctccgctcaaatcaagtggccaaacgacatctatgtcggcgaccaaaagatctgcggcacactaataaccagccagataagcggaagccatctcagccaatccatctgcggcatcggcctcaacgtcaaccagaccgccttccccgactgggtgccaaaccccacatcgcttagcctgttgacaggcaccgaacacaatctcgacaacctgctggacaccttgctcagcaacattgagacagagtacgaccatctgaaagacaacgatagtagcctaaaaagccgctacctaagccgcctctaccgcctcggagtcgaagccgactacatccacgaaggccaaccccttcgcgccaccataaccggcatcgaccgctatggtcacctccagctcgcaaccgccgccggcacttccctcacctgcggaatgaaagaaataaaatttgtgatataagcgcgcccccgccgaaccaacagatttccaatacatttttaaaacacaaagacattttttattttggacaaaataaataattaagtaatacgttaattagtcacaagttaattagtcacaagttaattagtcataaacttattactttaataatatgagcagtctctttgttttcgggaaaaccgtgagcggcgatgcttttaccgaccgtgaaaaagacacagccaagctggtgtccaactttcaatatggagtaaacacattcctactatctccacggcgatggggtaagacatcactggtaaaaaaagcaaaagccattgctgagaatacaaaattaaagatagtgtatgtcgacgtgcatctatgccgcagtcgcgaagatttttgcgaacgttatgcttcggccatacttacccagacttccaacaaaatggaagaatggattgacaatgcaaaaacatttttgaaccgattcagtttcggagtaaatgcttcggccgacccgtcgacagagatgaccttcaaaatgcaactgactccacgcgaacaatcactggaagacctaatacagcttccggaaaggattgcgaaacgaaaaaaaacacacgtggtggtttgcatcgacgagttccaacagataggtcttttcccaaacagcgtccaattccagacagagcttcggtcgatatggcagcatcacgaaatgacatcctactgtctattcggcagcaagaagcatatgatggaatcgtttttcgacgacagcagcaagccgttctacaagtttggcgatatcatatatctacagcgaattcccgtcgaatattgggtaaaatacatcaccggcaaattccgtcgcgaagggaaaaacatcagcgagaagcaagctcgctggattgttgaccacgtcgagagcaactcttcctatgtccaacaactatcgtggtacgtttttcaacgcacggtgaaaaaagtggacgaaaacattctttctgatgcattgacagaactcgtggaacaatgcgccgatgtatttgaggccaaaacagaaaaccttacagcaaatcaaataaacttcctgcgctgcatagccgacggaattcacacaggaatatcctctgcaaaaatcatcgcagcatacaatcttggatcgtcgcctattgtagcccaactgaagaagtcccttatcgagaaagatttgatttccattgagaacaaagaagtctatctgtcagacccagtgatgggaatctggctgaaaagacaattatagaaatcgtgttcttgatatgaaagcatcgtcacttttcaagaaatacgtctggcttgtcgatatcatccgacgtgcaggcagaattacccttcgcgacatcaacgagcgatggacacgcaccgagatgagcgagggtattcccttcagccgcaccacgttccgtcgacatcggcaagaggtggaagaaatgtttggcctaatcataaagtgcgacagcgacaaccgctattatattgacgaccccacgttgatgtcctccgacagcgtgtcgcaatggatgctcagcaccctggcagtaagcaacatagtcagcgaagcccgaggcctgcacgaccgtatcctcttggaaagcattcccaccgaaggcgagcgtttgcgacaagtagtggatgctatgcataacgggcaacgcttatgcataacatacaggcgctacggcagcgacgacccacgccaatggacagttgagccctactgcataaaactattccgtcggcggtggtacctacttgggcgcttcgaagaaggcagatacatcgtgctttcattcgaccgcatcctgcaaatgcaaaccgctgacgatagcttcacaattgacaaaaactttgacgcgcaagcctattttgccgaatacttcggcgtgatggtcagcgacaatacgcctttgcagagtatagttctgcgcgcctacggcaacgagcgctacgctctgcgcgacctgccgctccacccttcacagcgtgaacttgaagaccacggcgaatacgttgattttgaagtacgcctgcatccaacttccgacttcttggcccatatcctctcgcgaggtcgttggctgcaggtcatttctccagcatctatagcacagcaaatcaaagagatgctacaagagacatcctcagaatacaaatagccaccacctgtggcccgttttttggagcacctatcggtgtatctttgcatcgtgaaagaattcaacacaatgcaatgatgacctccttgttcatattactaaccaaaggtgggcttggcggaggagacgccggaggcggcttattccttattctcattctgttagggtttttcatattgttcggttatatcctcacccacgccgctggcggtatcctcggtattttatggttattttacgacgagttgaccaaagggacctcactggacaaagaatacgatggacctctttctattggtgccaaatatgctttgatctcacttggcgtagcaagctggcttgcattcataatcgtccccaccgtcagagacacagacacatctgggtggtatatattctggtgcaccgtctacccttttatatacggctacatctacatcatactacgacacttctatttcaggcatctttacaaaattggaacaaagaaagccaagcaatcactcgttgcacttatcatctgcataatagccattttcatcctcaccatcttcgccattgcatacacatcgccaagcaaccgcgtcgaccgtttcaatgcaattttatccaaagcccaaaaatctgagttaatcgagagcgaatgcattgaaggattccgtttaggaatgcctttttctgaatattgcgacaatgtggacagactcatcaacgacagattacttgagcgcgacagcactggtgaatacctattctacaacaaatacaacacagaagaatataacaattcaaaactatacctcgaacccgtattttgcgacggacatctaagccaactggcattcagtgtatataacggtatgggcgataaaggtttgacacttgaattgcactcatcaggaagattagtaggcttcaaaaaactggtcgttcccgaattgacattcacatcagatggagaagccaaagtgccagaatatagcaatggtcctgaccaactctataactattatgccaacgatgaactgtttcttaaagacaatatgctgattgtcatctccgtcctccaaatcaagttcatcaatatgcgcgacctttaatgcttcacaacaaaaaaattcgtatatttgcaccttgaaacgaaaccgcaccaaagagcaacatcatataatacaatcatttgacaagaaaatcagcgcaaaaagaatatattagaacaacaaaagcattttcaaatattgcatggaaacaatcatatatttactataaaaaagagtcctacgtaatcgcaagacccaagattcttcggcttatagccttattgtgaaaagcttaaaaagaaagtgcaaagatacaacatttttttcaatcgtcaaaaagaaaattcactatggaacaaaaaattttaggtatagacttaggaaccaactcattaggattagcaattagagacatagaaaatggtagaaatattgttgatcaactcgatttctacacctcaattatattccaatctggtgttgggaaagacaaaagcggtgaattttcttatgcagccagacgcacaaagttccgttcctcacgacgtttgtatcaagctcggaaataccgcatatgggccacattgagattattgattgccaacgattgttgcccattgacaaacgagcaacttgacaaatgggcaaaatacgacaaagccttagggttaaaacgccagtaccctattgatgcaactgaatttgaacaatgggtaaggcttgattttaattgtgatggccaaccagaatatagtagcccctaccaactccgtgcagagcttatgaacaaaccattggattggaataatcaaaccgaccgttttaagtttggacgcgcaatgtatcacattgcccaacgtcgaggctttaaaagcagcaaaggtgaaactcttaaagaatcttcagaaaacgaagatgtaaacagcattgagctgggcgaagctatgaaaaaatcggaagagaaaaaatccaagacccttaatgaatatatggaaagcaattcacttcctacggcaggatgcgcctttgcaatgcttgaacgacaaggcatacgtgtaagaggaagtgaattccaggccgttcaatctcagcttcacagcgaagtagatcaaatctgtaaatatcaacacatcgaccaaatagcacctgacctatattgccgactaattagcacaaaacaaggtgaaggtacaatattcttccgtcgccctttacgttcacaaaaaggacttattggcaaatgcactctcgagccaaaactacgacgttgtcctgtcagccatcctgattatgaggagttccgtgcactttccttcatcaacaacatcaaattcagggcaaagaataccgacgattggcaagcactgaataacgatgatcgagtttctattttcaacgaactattcactcgcgccaaagccacattcaagttcgaggatatacgaaaatggatagaaaaacactatacgctcggagaattaaattacaaagaaaagacaataaactacagcgaccttacaaccgtagccggatgcccagtcatcagccgtttgaaaaagattctgggcgaaaagtggaatacgactaccataactacaagtcgcacaagaatcaacctgaatacaggcgaaatacatcctgttgattataactacgtcgacatctggcaccttgctttcagtagtgatgattacgaagaactcgccgagttttccaaaaagcaaatgggttttgacgaacaacaaaccggacatctcacacgactatggagtgccatccaggacggatacgcatctttaagcctaaaagcaattcgcaacatactaccatttcttcagcaaggaatgatttacagtgaggcagtcgcattcgcaaaaatacctgaaatacttgggaaagagcgttgggaaaaagaacgcgacaatattatctcttcattacgagaaaaaacaatcgaaaacgagtatacaaagactgtttacaacatcacaaacaccctcatagcaaactacaactctcgcactcttgatgaacaacaagcatatcgcaataccggttacatcatagacgacattgaccgtgccgagataatgcaatgtattatagagacacttaatgaacgacgctggaaagcactaagcgacgaaagacgaactgtcttacaaaaagataccgaaaccctttatcagcaattctttgcatcaacaaaaagagactactacaaactgccacgacaaaccgacgccttccgtcagtgcctatcagaaatgttcccagacataaagtcacagcaatggttacgtctttaccaccactcacaaatcgatctcttcccaaaacagaagccagtgccagtcacaactgacgatggacgtataatgcaaatatgtcaacttggcaaacctgacattggttcaataaagaaccccgtggttttaagagccttgtatgttttacgccaatccatcaatcacttgctgaaagaaggaatgattgacgagtacacacgcgttgtcgttgaaaccgcccgcgacctcaatgatgctaactggcgcaaagcaattgaaagatatcagaaagaacgcgaaaaagaaaatgaagccattgcaaacataataaaagaagtaaggcctaactacaccgaagatgatatagaaaaaggaagattattgttcgagcaaatcgagacaaaaggaggtgacaacgaggactataatatagttgcgaaatccacacgtaaagaaaaggagaaggccaaaagttttgctcttgatatgcagaagtacaaactctacaaagaacagaactttagatgcctctacaccggaactatcatcagcttgtccgacctctttgccgacaacaaagttgatattgagcacacaataccccgcagcatatcttttgataattcactgagcaaccgaacggtatgtatggcgcacttcaaccgcaaagaaaaaggcaaccgcatccccaccgaactatcaaattatgcagaaatcctgacacgcataagaccttggctggaacacgtagaacacatcaagacccaaatcgaactatggcgtggtaaggcacgcacagcagccactattgatcgcaaaaatgaatgcatccaacaacgtcaccaatgggaactggaattagagtactggcaggccaaagtacgtacattcaccattcaaaaagacgagctcgacatcggtttccgcaacagccagctggtagacacacgcataattacaaagtatgcctttcattatctcaagtccgtttttgcacgtgtcgacgttcaaaaaggcagcgttacatcagactttcgcaagattctaaacgtacagagccttgacgaaaagaaagaccgttcacgccactcacaccacgcagttgatgccgccatactaacaatgatacccgtagcggcacagcgcgaccgaatgatcgaactgttttacaagattgatgaaaaccccatagactccgagcgcaacgcactacagcacaaattggaaaaagaaattgctgcctgcaacattggcacagtcaacggactcattgaaacaatcgagcacaacattcttgtcaatcacgtcagcaaagaccagacactcactcctgcaaagaaacctcgccgcataggtcagcgtaaaatcaaaggccaatggctgacaggagattctataaggggcaaaattaatgatgccacattccttggcgcaataaaaaaaacagattctaatcttgagttggttgtaagaaaaccaattaaaacactgactgaacaaaatctagattccattgtagacaaaaaactccgagatcaaatagagacacaagttcgctactggatggtcaacgagggcatatcgtttgcaaaagcactcgaaaaaaacatttatatgctagacaaagatggtagagctataacgcatgacaaaaatgggcggcatctttctcctattagacacattcgttgcaaaacttccattaatgatcctattacgttaaagaaacaaacttacctatcaactaaaaagcataaacaatattactatacaaacaacggagaaaatacatacttggcaatatattgggatggcattatgggtagcaataggtcgtttgaaataagaacactattcgacatcgccaactttagagaaataaaaaaaaaagcattatctcctctagattgttttcctccgcaaaaggacaacattaagctatttggaataatccgaccaggcagtaaagttattgtatttgacaaaaacgaattaaagaacggagagcaaataactaacataataaacaagttatatgatgctggcaaaacagctctttataatagattatatactattcgaagttttgagaaaaacggcacaacaatattaacgttccacaacgaagccagaaacgataaagaattaggtagaggctcatccaaaataagcatctcttcacctaaccctaaagatagagtaagtattattgctaggtatattctaatcgaaggatatcatttcaacattgatagtatcggcaatatacatttcataaaacaactatgatcaagcgtacactctgcttctccaatcctgcctatctttcgctgcgcgacaggcaacttgttgtgcgcgtcgacagacacgacgatacacccgagcatcagactaccatccctatcgaggacatcggcattgtagtactcgaccatcgacagataaccatcacccacggcgctatgtcagccctgctcgaagagtgcgcatcggtaatcacctgcaacgatgcgcacctgcccgtaggcctattgctgcctcttgacggacacaccgtgcagagcgagcgtttccaataccagataaacgcttcgcagcccctgcgcaaacaactatggcagcaaaccgtgcagcaaaaaattctgaaccaagcggcactgttgcgcgaactgcacggcatcgaaaccggcaatatgcagcaatgggcctccgatgtccgttccggcgacagcacaaaccttgaagggcgagcagccggcagccgccttctactggagccaaatgtttccgcaaataccctatttcacacgcaaccgcgacggcggctacccaaacccactgctcaactacggctacgccatactccgagccatcatcgcacgagcattggtcagcagcggcctactgcccactctcggcatccaccaccacaaccgctacaacgcctattgtctggccgacgacattatggagccctaccgcccttacgtcgacaatctggtggtacagacaatggacgaatatggcgacatcggagttaccaccgacatcaaacgacggctgctaaccatcccaaccatagaagtacgcatcgacgggcaacgcagtccccttatggtcgccgcaagtcaaacaacagcctcgcttgcacgttgtttctctggcgagagccgcaaactggcttatcctgaaatgcagtgatggaccgtttcagtgaatatcgcattatgtggattctcgtcttcttcgacctgcccaccgacacaaagcgtgagcgcaaggccgcaggcgacttccgtaaacaactgctcaaagatggattcacaatgttccagttctccatctatgtgcgccattgcgccagccgtgaaaatgcagatgtccatctaaagcgtgtcaaagccatcctaccacaatatggacaagtcggtatgctgaccattaccgacaaacagtttgcaggcattgaactgtacactgctcgcaaagagaccgagcccaacgcaccaggacaacagctcgaactcttttaggattacaaaaacaacctataaaaatagaaaatcccgcctcgcgaggcgggattttctactcaattgacattgtcaaagacattgagtttattgcttttacacgaatcgtgttgtttatcatcaatgtcaatgttctctttttaagcaattcacaacggcggccgccgatggcctcaacatatttaagttgtttatcatcaatgtcaatgttctctttttaagcaattcacaacatgaacgaattaaagaaaggagagcagaagttgtttatcatcaatgtcaatgttctctttttaagcaattcacaacaactgcttgccgtgctggatgcgagggatggttgtttatcatcaatgtcaatgttctctttttaagcaattcacaacacaagtgtgcgccttacaaggctggcgaaagttgtttatcatcaatgtcaatgttctctttttaagcaattcacaacaccggcggtccagctcagcgtcgtggatggttgtttatcatcaatgtcaatgttctctttttaagcaattcacaacactttcgttgcgcctttctgatgtccctttgttgtttatcatcaatgtcaatgttctctttttaagcaattcacaacggttagaaatttttattacttttgttatagttgtttatcatcaatgtcaatgttctctttttaagcaattcacaacagggtgaccttgaaggtgctgctactcttgttgtttatcatcaatgtcaatgttctctttttaagcaattcacaacgccacagcgtcgtcctttgcgcagaagtggttgtttatcatcaatgtcaatgttctctttttaagcaattcacaactgtatatcgtcgtccaagtcgcgccgttgtgttgtttatcatcaatgtcaatgttctctttttaagcaattcacaactggtagttaaagtatggcatctgtccgcctgttgtttatcatcaatgtcaatgttctctttttaagcaattcacaacggtcgtagtcaccgcctacatcaataccttgttgtttatcatcaatgtcaatgttctctttttaagcaattcacaacaggacaccttccagtcctctatctacgacgttgtttatcatcaatgtcaatgttctctttttaagcaattcacaacacacaattccctcctcgtaacagtcccgaagttgtttatcatcaatgtcaatgttctctttttaagcaattcacaacgtcgcttatattttcaaccgattggttgaggttgtttatcatcaatgtcaatgttctctttttaagcaattcacaacggcgttgcagaacaacggtgtgctgtttagttgtttatcatcaatgtcaatgttctctttttaagcaattcacaacttgatggcggcgcagttttcggtggtcacgttgtttatcatcaatgtcaatgttctctttttaagcaattcacaacgcaccactggccacgatacctgccagcgtggttgtttatcatcaatgtcaatgttctctttttaagcaattcacaacaatggctattgttggtatgcttaagcgttagttgtttatcatcaatgtcaatgttctctttttaagcaattcacaacatcccaaccgtcagaagtagaaggtataagttgtttatcatcaatgtcaatgttctctttttaagcaattcacaacgcatcgaatttaattcaaatgttataacaagttgtttatcatcaatgtcaatgttccttttttaagcaattcacaactgccctttttgctggcaatgtcagcgctaagttgtttatcatcaatgtcaatgttccctttttaagcaattcacaactattttgttgattgccaaccgatgcggattgttgtttatcatcaatgtcaatgttccctttttaagcaattgcaaagatacattttttcacactacctatcacttatagtttacactcccagcaccacttccgctggaatacccagtttgcggctgattttgcgcgcaaggggcaacgacggctctgtctttccacgcactatttcactgaaatgtggtgcagaaatgcccaacaattcagccgttgcactttgagaaagcttctcttcaaacattttctgacgaagagcgtccaccaatgacggcggttcaatcgggcaatgttctttttcatactcttccacaaggtcggacagcaacaccagttcattcatattcggatcgtcactcggccactcgtcaccagttatgggaaggagttcatctattcttttcatcgctgccctatatgcagcctctgtctgtatctttgccataatatctatattttttcaatatttttaattctgtcatattcagcgtgggttcctacaaaacgtatgtaaacgcggcccaccgtaaactttatcacaactacaagacgatgatcgttacccttaatattaaacacatagtgctgacctccaacttgcgacactgtggcgaagtcacgcctgatgtctgcaaaattcttccactcggccttttcagtcgttttgtaccaactccataaaggcatcgatgcatctggatgaaccctacaatactctcttacaataccttgtgatataatatgcatactgcttacctctaatatgacattgcaaagatacaaataatattttgtactacaaaataaaattacacaaatgtataacttctactttctcccccgataataattgtcgtctctgtattcggtttaattcacagacaaaaaaaaggcgacgaagaaatctcgcccccttagtagttttcacaacggaataatccttattgtgaattgcttaaaaagtattgcaaaaatacatattatttttgataccgcaaaatttattttatacattactaacaatcaaaaatttaccaaatagattatttattccaccacatatattgtgttaaaaaacccacatcttttcgaacgaatccttgatgccttcgtcgtagggggtcagttcctcgatgcagttgcaggcggggctgtagtagaaataggtgctgttggtgcctttggtgcggcacacatattccgatagcatcttctcaatatagagcgtggcgcactgggcgccgaagttccacgccaactggtaagcgtcgttcaccgttatgcggttgaagtgcgtcttcatcgtcgccttgtcggtacgcagcgacgtgatggtgccgtgaaagtcctcggcaatctccctgttcttgaaataaacaatgtcggcggtatcgcgcgcatcgaagcggaaccatacattcatcgcgaagtggcgcaactcgtagtcgtagccatatttgacgccgcgctgcgtggtgaaaccgctgcggcccggctgcagatactcctcagcctccacctgcgcgatgtcgatggtgaagtgattgtcgtcggcttgcggcaagcggctcgcatcgtccaccagcacaatcggtatcttggtgcggctcagcacatagaggaacgccccgttgaactgggcaaggaatatgctgtcgtccaggcggttcagtatcgccgtcttcgaagcgatgaccgaatcctgctcgcggtcggtcataaacataaagccggcaatgtcgttgagcgagctattggtatgtataaccgacttaggcagagaaacataaatctgttcggtagcgttgtctttctgttgctcgaacttgctcagaaagcttccggcatagaaccagtcggccgagcagccggtcagcagcagggctaaaagcgaggtgaatagtatggtcttcttcataaacaggcatttaatgaattgcagacctaaaacgcggcgcggctcaaattattgtatcaaaacgcctccctttttgcatccattttcgcaccccaccccgaccaagtaccgaccctacaccctctcaaggcctccgccattaacaatttttatgttaattttattatcttcctatcaagttctaccaagctgaaatttgataagaacttggtaagaatttgggtagaacttgataggaagatggtatatggaaatcagggtgttgggtgagagcaaaaattgacgtttttcggtctttttttactgccgaaatgttaaaattcaggggtggcggaggcgaccttggggcagaggcaaagggacgaggccctcccgccggcagggtgccggcggaggggcgcagaggcagacaatcgggcacagcgacagcaaaagatgaaaatattttcaccaatcatccaaagtttagtatttttgcaaaatgtgcagcatcgcagccaactccgcaagaggttgcaaattaacgacataaataatacaatataataaaataacacatcaaataatgaagaaaaagagtctgaaagaggaaattgtagcctatttgcttgtggcattgggcagtttgttgttcgccgtgggcgatgttatgtttgtcaatccctacaacctggcccctggcggtgtctacggtttggccaacgttttccacgctttgtggggctggaagatttcggttgccggtatctgtatggacatcccgttgctgattatcggcaccatcatccttggtccgcgtttcggcatcaagaccattgtgtctgtgatacttatcccgatcttcacctacattcttgaaatcacgtggggctacgctccgctgattcacgacggattgtacgacagcaacgaaggcctgctgagctatctgacctacaccgtcggacagggcgacgcagccatcgacaagttcttcattcccgacttcttcctcaacaccgttgtggccggcttgatctacggtgccgccatcggtgtcatcttccgcgccggcgccacctcgggcggcagcgacatcatctcgatgattatccacaagtacaccaagatttcgcttggcgtgctggtgcttatcgtcgacagctgcatctcgctgaccactctgattatcggcgacatccgtctgcctatatactctatcatcctgattttcatcgagagcaagattatcgacatcatcgtcgagggcgtgacgacctacaagacggtgtttatcatcaccgacaaggtcgacgaggttaaaggctatattctcaacgacttggagcgcggcggtacctgtttcccgggcatcggcctctatcagggccaggagcgtagaatgatctacgtcaccctcgaccgcaccgacctcgtcaagctgaaagccaatctgcgccatctcgacccgcacgcctttgtcaacgtcattgagagcgccgagattatgggcctcggtttcaaggctttgcctgaagaataatgtcaattgtgaatggtgattagtgattagtgaatagtgatttgtgaatggtgaaatgtgaagtgtgaagcaatcgcactcgaagttcacatttcacaattcaccaatcacattcacatttcacaattcacaattatctatgcacgtcctccagctctgctacaagcccccctacccgcccgttgacggcgggacgctggcgatgaacagcgtgacacagggacttatggcctcaggccacaaggtgaaggtgctaagtgtctgcagcgacaagcacccggtcaggagcgatgcattggaggcgcaatacaaggatgccaccgactttgaggccgtctacatcgacctgtcgatacatccgctcgacgccgccgtgtcgctgctgtgcggcgagtcctacaacgtcaagcgtttcgtcagcaaggagttcgacgagcgcctgacggccatacttcagagcgaaagctttgacgttgtgcacattgagagcatattcctcgctccatacgttgccaccgtccgcaagcatagcgacgcaaaggtggtgttgcgggcccataatgtcgagcaccgcatctggcggcagatagccaccgcgacacgcaacccgttgaagcgctggtatctgaagaagctggcattggctttgagagcctatgagttggagcatatcaacgactttgacggcattgcctgcatcacggccaacgacgccgagacgttccgcagcgaaggctgccgtaagccgctggccgacattccctttggcgtcgacatagagcccatcgacaatgttgatgccgagccgcagacgctgtttcatatcggctcgatggattggcggcccaacgaggagggcatacgttggttcctgaaagaggtgtggccactgatacacaaggagatgccagccgtaaggctgttccttgccggccgcaagatgcccgacgacctgatgcaaatgcagagcgagggagtggtggttgtaggcgaggtgcccgacgctgcctatttcattgcttcaaagcagattaacatcgtccccttgatggccggcagcggcatcagggtaaagattatcgaggctatgtcgctcggcaagacggtagtgacgacaagcgtaggcgccgccggcatcgactacaccgacggcaaggagctgctcatcgccgacacaccgcaacagtttgtggagcaggtgcgccgctgcatcgacgaccccgaattgtgcagcagcataggtgccgccgcccgccgactgattctggacaaatacagcaacgaggccctgacacaaagacttgtgggtttctacaataaactgggcgccgtcgcgttatagcagaaaaacaaactgaaatgaacagaaagagatttttcatattagcaatgctgctgacagtggtatcgatggctgcggcacagatcaagattcccgagacaaacgtaagtttcgagttcccgtcgaacagttggaaatacctgcaaaccaacaagctcagcgacaacaccgtcatttatctgtattcatattcagccgactacgtgatagacagccaaggcgacaccacgctgccgtttatgcgcatctatgtccgcaagaactacgacggcaccgtctacgacctggcctacagccgctttatggtgcagccgttccagtcgctcgacgagactccgcacccgaacgggtcgctcgaatacctaggggcctacaccgacgaggaggacggcaaagactacgagttcagaatgttatacatcaaagaccgcaacaacatactcgaaataaggttggaatgcacggtggacaacttcgaggatttcgagaacgagtttgcggagatcatcaagtcggtcaaggtaaacaaatagcatccgatgagaaaaagcatcatacttctggcggcattggccctgagcatcgcggcaaaggcgcagggcgacgtgtcgcaatactcgcaccaatacgagaaactatacaaagcctacgtcaaagagcccgagaatgtggccaacaactatgcccttgccgccttttacgccgacacagcaaatccgatgcgcaactatgccacggcgatgaagtatatctgcaccgccgaggaacaatttgtgacaatacttgaagaccgcgacaagtacaaagaagtcaagcggttgctgaagaaaaacatcaacatccagctgctcagggaaacgaaactaagcatccgcatcaaggcaagagagttcctggacaaggaggagaccatctcggacgaaacccttgacagctacgcagatgcgttcaagaacgaccagggcgcgctgaggatggttgaataccgacgtatgggcaaccgctaccagcaggtctgtgcgacgaacacgctggaggcttataagagattcattgccagctatccatccaccgccgagagcgaagaggccgaacgcaagatggctcaactggcagagaccgtagtggccggcgcccaacgcgagacagaggtggacagcctgcttgacggatatctggacatcgaggccgtgaaagcggcggcacaacgcaaaaaaagtgctctggcatacgccgcactcatcgagaacccctcgcctcaggcatacaggtctttcttggccaaatatcctggcagcaacgaatactcgctggtgctcgacaagatggacgctcagcttcagaacgacttcaaccgcttgtcaacgcctcgtcagtatgccgactttatacacaacaacccggataacccgctggcggaagatgcactgaccaagctgaaacacctcatcaacgacgagcacaatatgcaggctctgcgcatctatcttgacgagttcccgcttgacgtgaactataacgacatctacctcacctactacaaatggcacaccgaggaaggcaacaaggcaccactggtgcagtttgcggcacagaatcctgacttccccttcaagagcgctttggacgacgcattggtggcagcagagaaatacgactctatcaatattatgatgccttttgtcgaaaaagagttcaagcaatggacctccataatctaccacctgaccggcaagaaggagtcgttcgtcgcactgcaacgcacgctccagcactttgtggcggcaaagaattggcaaaaggctaacgagcgcatcagtttcttcgacctcagctttgaagacaactgcgttgacgaggtggccgagctccgctccatcatcgacaggcccgtgaacaacaaactgacatacacgccgatagtgcgtcctgcctacgatatgatgcactcggtgattcatcctgacggcaagcagatgttctacaacagagaagtggacggaagcgtctgcatccaatcggctgtcgagaccgcaacgaagaaaagcacaatatggaaaggcactggcaacgtgccgtttaccaacatagaaaaccgcgac

SEQ ID NO: 3959 - DNA, 24218 bp, synthetic construct
  misc_feature 1..24218: note = Synthetic
  source 1..24218: mol_type = other DNA
aattccatcattaatgctgacggcaccatcatcaacgagggtgacatgctcaccatcagttccaaacggcaaagcatctacaaaggagaagccgactttaagcccgcccgcttcaccaaatacatcgagggaggcgatgttgacctcaacgatgaggaaaaactattcttcctccgtatgaagaacgcctatgaacgttaccagtctattgtcacctccaaagaaacctcgtacatcactgacatcagcaaactggcacgcctcatccgttgcaatctgcagaaccagcccaagaaagcatcttccatcgtcaactcatggtacgagtcacaccctgacgaatacgtcgacggcgtccttcaaagccgcatgggcgatcataatgaccaaggacgtctcttcgacctccttaccgtgagcaacaaagtagacctcttccgacgtctacacatcctctgccactcgcgcaacatttcgggtctcaccgccggaagtttcatgataggacgattcgtcgcacgcgcattgccacgaaagatgtggaacagcctttccgataccgtcgttgcatttctcatgaacgaatatgtcctctacgaaaaataccaacaggtgttgcaggaggtaggtgagataaaactcgctcgcgcacattcccgcatcgagaccgaaggcatcgacaacatggtcgtccagaattttgaaatgaccactttcattccccttctctattcgcagcataactgggaaactgtcgccgaagagcttgagaaaatggagcatcaggacaacacacatctcctcattgagaaactcagccgccccgtcgacgaaatcttcgacctctccacaccttggaagaaggccattgttgacgacgtcctacgtgccaatccttaatagcctcaaaaccgatgccctatcgtccattcgataaactcgatgcgaccaccatgggcattcaaagccactccgacatattgattaccgaagttatagtacgcgccgacgcgttcataatagggtatcgaaatatgatgtgacactagcaatacgggaccaaaaccagcctttagactgatgggtccccagaaaaattccatcatccccatggcgctgaaataaatcgggagcgcataggcataacgcagcgtttgcgacggacgccagtccttgccattataccacaggtcaacggcaccgccaaaagcgaaaacagggcttgtatacttctgataatagaatgtcacatcgtaacatggataatagctcttctctgagtgattacgcgacattaccagtcccccggaaaacgcaacgccccactcgtgcgtcttgaacgcaggggtctctatgctgcttttaggatgtaaagaaatatcatccagcctcctgacattgccaaaattgtaggcaatatcgagttggacaaaatttagcccctggttagggcgcataagcataccgttgctggtatggagaacacgacaggcaaccgcaaaacgatcgtcgatgcgataagcaatgcccgcatcaatcagacaattgaggaacgaaccaataaaaatattggtggtatcgcctgtgatgctgtatggacgggtgtagccggaaaagccaacacctatctgggcctcccaccgacgcaccacatcgaaacaaagcacgcccacaagccccaaacggtcacccgccgggctgttgggaatatgggaaaaagaggctttgaaaccaaatgaagggtaattccaatatcgcttccagtactcatcgcctgtggtgccccacaggacggaagcactcataccgaaagtagcagagttgtatctggagtattcactgttgttggtcatcatgtaaccagcatccagggatagcgagtaccgcggctgggcaaataccgacacctgacatatgaggagtgcaaaaaggaaaaacacaacctttctcattgcgcagtcatttgcaggtaatcctgttccgaaagaatcttcacgcccagtttttctgccttcttcaacttctcgggacccatcttctcaccagccaagagatatgtggtcttgctgctgaccgagcccgaaaccttgcctccgtgacgttcaatatccgccttgatgtcttcgcgcgagaaacgttcgaaaacgccgctcaccacaaaagtcatcccttccagttccgcactctgagagccaagttccacattcatctgaagacccgctgccttcaaacgggcaatgacacccctgtgttcctcacacgcaaaccagtcatggacagcacgggccgtcacctcaccgacatcctccacttgtgccaactcagattcttccgcatccatgagagcatcgatattcttaaagtagcgagccagcttcttggctcccacttctccaacataacggatgcccagagcaaagacgacacgctcgaatggcacctgtttcgatacatcgatggcggccagcaaattgtcggcccccttttcctgtatcgttcctcccgtgcttgccttattctcttccacgctccccgaccctaatcctatcagctgttcacgcttcaagtcatagatgtcggccacattcttcacaagtccgactttgtagagcaactccaatcgctcggaccccaggctttcgatgtccattgccttgcgaccgacaaaatgctccaatcgtccaataatctgcggatgacaaccgtcggcattgggacaatagtgtcccgcctcaccttcctctctcaccaaaggcgtcccacattctggacaacggccaatatactgcaccggcatcgacccctcggttctcttctccatatccacccccaccaccttgggaataatctcgccacccttctcaatgaaaaggtggtcgccgatgtgaatatccatcctggcaataaagtccgcattcacaagggtggcgcgcttcaccgtggttccgccgagccacacaggtttgagattggcaacaggagtaaccacacctgtccttcccacctgatagcttatgctctccaaaggggtactgacccgctcggccttaaatttgtaggcaatagcccatcggggcgacttcgccgtaagtccgagacggtcccaaagcggggtctggttcaccttgataacaatgccgtcgataccgaacggaagattccaacgggcatggtcccagtagtcaataaaagcctttatctcgtcaatatccttgcactcctggatatacggctgcaccttgaaacccatctgcttcgcccactctaggcgaccgaaatgggtatcgggcagcgacactccgtcgggagccatcatgaagtacatgcagaacatcagcttacgcttggcgcattctgcactgtcctgaagtttcaaactgccactggcggcattgcgcggattggcaaagggctcttctccctccgactctcgctgcacattcattgcattgaaagcctcgaacggatacacaacttcgccacgagcctcgaaatcgtcggggtactcccctcgcaaagtcaaaggaatcgtgggaatcgttttggcattgagcgtgatatcatcacccaccctaccgtttcctcgggtgacagcctgaaccaacttcccatggcggtaggttaaaccgatagccacaccgtcatacttcaactcacaagtataagtaaacgggataccgtccagcaatttgcgcgtacggccctcgaaatcctcaatctcttctatcgagtaggtattgcccagcgaaagcatcgggaaccggtgctccacctgccggaaactcttgttcacctcaccccccactcgcttggtgggcgacaaaggcgacgccagctccggatactgccgctccaagtcctgcaactcccgcatcatgccgtcaaactcctcgtcactcaccagcgagcggtcattcatgtaatactcgtaattgagcctgtcgagctcttcagccaaaaactccatccgctgacggataggctccgtatctatcgcgctgaacaaatccattcccctgtgaaattaagtgccacgggacctatcagacacacattctcataggcactccccgtcgaatcaaacgtaacgcggaaatcgccgcctcgggtgacaagcgaacggttcccactcacaatagcgcaagccgtcacacctgtgccgcacgcccatgtctcatcctccacaccacgctcgtacgtgcgcacaaaaagacgtccgtcgggcaaatcctcaataaaatcaacattcgtaccctgaggaaactcctctgcaatattgcgtatacgacgtccctctcccaccacatcgaaatgctccaggtccttcacccgttgcacatagtggggcgagcctgtatcaaggaagaaaccatccagacagcggcgcacatcatccacagccacgctgcgcatacccagcttcacaatacccacgcgctgcccagcatcccacatcacaatctcggcatcgtgggggccgtcataacccttgaaatgaagttcctttcccataccgagacagtgggcgaacgccgcgatacaccttccgccattcccgcacatcgaacccaggcgcccgtcactgttataatatttcatctcgaaatcaaattccgaattctcagaattctccaacgtcatcaacccgtcggcacccacgccgaaacgccggtgacacaggcgggctatctcttcctctccgaggcgaatcgaaccgtcgcggttgtcgataaccacaaaatcgttacccgccccatcaaacttataaaaaggaatcttcaccttaaaccttaaaccttaattaataatcaatcatcggaaacagtttccgcaactccatcatctggggattcttccccatcatggcggcaaacttgtcgtcgggagaataaaccacttcctccttgctcacaaatagcgggttcaccctgcaatccaacatccgcatacccgtcttctcccgcaagaactccatcacgtcaatcttgtggggtttgaactcctctgcaaaatagaccgttgtcgcatccacttcaaacatcccgttcgtctcacccatcttcggagtcccgttcaccataatttcctccaacttcaactccttggcggcttcattccaccatcgctccagtgtctcctgcgtcagcggctccacatcggtcacccgatgggcgctctcctcaacatcctccaccgttgtcttgatcgaaatacccgaaatcgacggaataccgggaggcggcaacgtggcagtatcctttcgtggcgcaacaggcttggacactgcagcaacagccggaaccgcaacaggtttggtcactgctgcgtcggccgaattctcatttttcaattttgaattctcaatttcccccgtgcctgcctcgcggcatcttgcaatctatccctgcggcatcgagaccgtcgccatcttcatcaggcagacctcgacaaacaggttcttgttgttcgcctcgcggaaacggtattcataatccgatgcaatgttcaggaacttcaacagcaggggcaaaccgcacgcctgtgcctgctggccgtagcgcacctgcagcgactgtccgccctctatcagcttcagcgtctgcggatccagactcaccatcaggttcctcacatgctcgcacagacccgtcaggaaatgctggccaccgaagcccttgccaatcacctcctggtaaagcagcagcgactggctcatattcccctcacgcaggtaatccgtcaaacggaaataatagtccgaatccagcacattcaggttctccagcacaccctgatacgtcagatttcctccggtgaaattcaccagctggtcgaaaatcgacaacgcatcgcgcagtccaccctcagccttgcgggaaatcacctccagcgcaccctcctcatacttcaccccctcgctgtcggccacaaacttcaggtgcttcacaatgtcctcgttctcgatgcgcttgaagtcgaacacctggcaacggctcaaaatcgtcgggataatcttgtgcttctccgtggtcgccaaaataaacttcgcatacgtcggcggctcctcaagcgtcttcaggaaagcattgaaagccgctgcactcagcatgtgcacctcgtctatgatgtacaccttgtacttgcccgtctgcggcggaatatacacctgcttcaccagctcgcgcatattgtcgaccgagttgttcgaggcggcgtcgagctcgaagatgctcatcgacgcaccctcgttgaaactccggcagctcgcgcactcgttgcaggcctcgccgtcggcggtgcggtgctcacaattgattgtcttcgcaaggattcgcgcacacgtcgtcttacccacgccgcgcggaccgcagaagaggaatgcctgcggcagctgacccgtggcgatggcgttcttcagcgtcctcgtgatatgatcctgacccaccacgctggcaaacgtcgtgggacgatacttccttgccgatactacaaaattatccatcttactcttacactttttgggagtgcaaaaatacgaaaaatttacaaactgaccaaaaaaagttggcggccgcaggctttttcgcctgcggccgccattcattaacggtcaattcacgataattaacgttctccttttgagttcggattatagaacacgaactggccgtcgatgacgtcgatgatgatggtctcgctgctgtggattttgccctcaagcagctggcggctcatctcgttgagtatctcgcgctggatgacacgcttcaccgggcgggcacccatggcggggtcgtagcccacttcggccaggcggttcacagcctcgtcggtcgccgagatggttatctcgttctgctcgagcatcttcgccacactgcgcagctggatgcggacgatgtcctttatctggttctgcgtcagcggctggaacatgataatctcgtcgatacggttcagaaactcgggacgtatcctctgcttcagcatctccatcacggccttcttggtctcgtcgaggtcatattgcgagggtacaccgttctccagcttctcgcggataatctcgctgcccatattcgaggtcatgatgatgatagtgttcttgaagtcgcacgtgcggcccttgttgtcggtcaggcggccgtcctcgagcacctgcagcaggatgttgaacacatcgggatgcgccttttcaatctcgtcgaacagcacgatgctgtagggtttgcggcgcacagcctcggtcagctgcccgctctcgtcgtagcccacataccctggaggcgctccaatgagtcgcgagacactgtggcgctcctgatattcagacatgtcgatacgcaccatcatgttctcgtcgtcgaagagcacctcggcgagggctttcgccaactcggtctttccgacacccgtggtgcccaggaagatgaaactgccaatggggcgcttgccgtcactgaggcccgcacggctgcggcgcacggcattggctatcacgctgatggcctcgtcctgacccaccacacgcttgtgcagctcgtcctcgaggtgcagcagccgctcgcgctcgctctgcagcatgcgcgtcaccgggatgccggtccacttcgagaccacctcggcaatctgctcgctgtccacctcctcgttgatcatcgcgttgtcggcttgcatctccttgaggcgtgccttgaggtcctcgaccttcttctcggcctccttgatgcggccgtagcgcagctcggccaccttgccgtagtcgcccgcacgctcggcctgctcggcctcgaacttgtagctttcaatattcttcacctcggcctgaatctcctcgacgatgctcttctcgttctgccagcgggccttcatctggtcgcgctgctcgcgcagggtgccgagttccttgtcgatctgggcaatcttgtcctggtcgttctccctcttgatggcctcgcgctcaatctccagctgacggatacggcgttcaatctcatcaagctcctccggcaccgagtcaatctccagccgcagcttggctgccgcctcgtcgataaggtcgatggccttgtcgggcaggaatcggtcgctgatgtagcggtggctcagctcggcggcggcaatgatggcctcgtccttgatcctcacgcggtggtgcacctcgtagcgctccttcaggccacgcaggatactgatagtgtccggcaccgacggctcgtcgatcagcacactctggaacctgcgctccagggccttgtccttctcgaaatacttctggtactcggccagcgtcgtagcgccgatggcacgcagctcgcctcttgccagtgcgggcttcaggatattggcggcatccatagcaccctctccgccaccggcacccaccagcgtgtggatctcgtcgatgaagaggataatctcgccgtcggcctcgttgatctcgcggatgacagacttgagcctctcctcgaactcgcccttgtacttcgcaccggcgatcagggcgcccatgtcgaggctgtagatggtcttcgtcttcaggttctccgccacatcgccgctcacgatacgctgcgccaatccttcggcgatagcggtcttacccacgcccggctcgccgatcaggatggggttgttcttcgtcctgcggctgaggatctgcagcacgcggcgaatctcctcgtcgcgcccgatcaccgggtccagcttgcccgcctgcgccagctggttcaggttcttggcgtacttgcccagggcgttcatcgtcccctcctggttctggctcgtcaccttgctgcccttgcgcagatcctggatggcggccagcaacgccttctcgctcacgccagcgtccttcagcagctggctcacgcggtcccttccgctgaggatacccagcagcaggtgctccacgctcacgaactcgtcgttcatcttcgtggcgcgctggctggcggccacaagcgcctggttggcatcgctgctgaggtagacctgccctccactcacgtgcggcatactgttaaggatatcgtccacctgctgcgtcaggcggggaatgttcacctccatcttcttcaggaggtagggcgtcacattctcgtcctccgagaggagccccttcagcaggtgcgccgtctcgatcgccggatgctgccctcctacggcaacctcctgcgccttctgcacggcctcctgcgctttgattgtgaatttgtctaaggtcataaatataaggtttaaggtttacagtttacggtttaggggttaatcactcacacattcacgcatcctcaccccttgcaacaaccgtaccaaaggggaaggactgacaaaatggcagaggaatggcagtaaaaaaaagtttgccagttcaaataagttttgtacatttgcaacagggaaatcatttcgaaaatcaaaataaaagctgactatcagcaagataactatttgcagtactgattttcaaaacaatacatccatttaattcacaaaagactatggacggtaactctatactaggtctatggtacctctattgtaactctatggtaggtctatggatgatagtatatcgctcctatgatgcacctatgcaaaaggtatgtgaccaccaccacccccgcagaagggattcttggattcatttatgataagcttaacggttgtggcagtagtatcgccatcaatccttataataacttttcttcatttgtacggcagttgttcaaaatgatttgatgactagtccagcccgtacaaaaaagcactttgggaatttgtgccaattcaaatggcacaaatttgtttgatggcaattgtgtcgattcaattggcacaatttctcctttgcttttggatacacttgatttggactttacaaaaaaaatataatccacgaatcaatattttttcgtaactttgcaccatcaaaacgcaaaaataaaacccacgtaatcgcgggtttcaagaaaactcttcggcttatagccttattgtgaaaagctcgaaaagtgatgcaaagatacgaataaaaattgaactgagaaaaaattatttcaaaatggaacaaaaaatattaggtattgacctaggaaccaactctctaggtatcgcattgagaaatattgacaatggcggtaatattgcaaatcaattggattattattcttcaataatattcaattcgggtgtcgggaaggacaccaaaggagaatattcatatgcagcagagcgaacaaaataccgctcaacccgccgactataccaatcgcgcaaataccgcatctgggccactttaaaactgctcattgcccacgactgctgtcctctcacggcagagaatctcgaaaggtggagcaaatatgacaagacaaagagattaaaacgagaataccctgttgatgccactctgtttgaacaatgggttcgattggatttcgacggcgacggaatagccgactacagcagcccgtatcaactccgtgcagaactcatggagcgacagttagattgggacagccagagtgaccgctataaattcggtcgagtcatgtaccatatcgcccaacgaagaggattcaagagcagcaagggtgagactttgaaagatgctggagacaatgaagacttgtcaacgattgaagttgagtcggcaatgaagaaatcagaagagaagaagtcgaaaggcattgccgaattcatgaaagagcacaatctggagactgtggggtgtgcttttgcgaaactagagaaagacggcatcagagtaaggaaccatcccgaataccaagccgtccagtcacaataccgcgaagaggttgataaaatctgccgacatcaacacatagacgcactttctcccgaactataccgtgggctggtgagtaccaagaaaggagaaggcacaatattctatcgtcggcctttacgctcgcagaagggcaacattggcaaatgcacccttgaaccaacaaaacggcgctgtcccgtcagccatccagattatgaagaataccgtgcattgacattcataaacaacatcaagtatcgcatctctcccaatgaggagtggaaaaacctgacaggtaccgaacggaagcaattatttgacactctgttttgccgagcaaaaggaacatttaaatttgctgacatacgtacttggattgagaagagccacaacggaattcaccttgactacaatagtcgcacaataaactaccgagactacactactgtggcagggtgtcctattatttctcggttaaggaaattactcggagaagagtggcgcacaaaagagatagtcacagaacgagaacgcgtgaacaacaagtcgggtgcaatacataaagtcagttataattatgaagatttatggcacctatgcttcacttgcgacgactatgaagacttgtacgaattcgtacagacacgattcggttttgacgaaacacaagctaaagagatgaccagaatgtggagttctatgcaagacggatataccacattgagtttgaaagcaattcgaaacatcctgccttttcttcgtgaaggattgatttacagcgacgctgtacctttagccaagatacctgacattattgggaatgaaagatgggaaagaaacaagggaaatgttttatccgcaattgaaacccttaaagacaatagttcacgcactagacttgtttacaatctcaccaacacagttatttcaaattacaaagcgctatctttcgaagatcaattcgcatacaaaaacaccgattacacgcttactgacgtagacaggaaagacatactccaatgctgcattgattattttggcgagaaaagatggggtcaaatgtccagcacgaagcaaactgcactacaagacgaaattgccaaactttaccagcaattctttgcatcatcaaaacgggagtattacaaacttcccaagatgagcgacacactaaaagaatacctagccagattacttccggacatcaacaaagatgagtgggacaaaatttaccatcactcacaaatcagcctttttccacagtcacaacccaaattagggacacccgacattggttccataaagaatccagttgtactcagggccctccatgtgctacgcaaagccattaatgccctgttagcagaaggaatggttgacgaagatacacgaatagttgtggagaccgcacgagagatgaacgacgccaattggcgccgcgcgattgaacgctaccaaaaagaacgcgagaaagagaatgccgccatcgccgaaataatacgcgagtttcgtcccaactataccgatagcgacattgacaaaggtcgtttattgtttgagcagaacattattgcggaaacaaatcgcgatgcgaagcaaaaagcagaacgctttgctctcgatttgcaaaaatataagctttggaaagaacaaaatttccaatgcctctatacgggaaaacacataagcatagcggatcttttcgacgatagtgttgttgatattgagcatacaattccacgaagcctgtcgtttgacgactcactaagcaacaaaactgtatgttttgcccacttcaacaggtacactaaaaacaaccaaataccatcagaactatctaactacaatgaaattttgcgacgtattaaaccttgggaagacaaacttgagcatatcatgtctcaaatagaattatggaaaggcaaagctcgcacagcacctacaattgaacgcaaaaacgaatgtctgcaacagaaacaccaatgggaactagaacgcgattattggcgggcgaagattaacacgttcaccatacagaaagacgaaatggatcttggtttccgcaatagccaactggtcgacacccgcatcatcaccaagtatgccttccattatctcaagtctgttttcaaccacgtagacgtagagaaaggcaacgtcacttccgcctttcgcaaaatactcggtgtgcaaagtgccgacgaaaagaaagaccgaagcaaacattcgcaccacgccatcgacgccgccatactcacagttgtgcctacagcggccaaacgtgacaagatgatggaactctactacaaacttgaagatgcacccgaattcgagaaagaaaatctccgcatagaactccaaaaagaagtgcgcgattgtcgtattggatcagtaaacggtctactcgaaaccattgaaagaaacattctagtaaaccatatttcaaaagaccaaacattagcgccatcacacaaaaggcggcgcataaacggtcatatcgttgagggacaatggcaaaccggagactctgtcagagggagtctgcacaaagacactttctatggagccatcaaatcgccgacaggagatttatatatggtaaaacgcacgccaataaaaacaatgtcagagaaagatattgagacaattgtggatgagcgtttaaaagagatgatacggacacagctaaagcacaagatggaggaagaaggattatcggcatcgaaagcaatggaaagcgaattctatatgttagacataaatgggagccccatcactcaggaccgcaacggacgccccattgcacctttacgccacgtacgctgctatgcaaaagcaggacgtggtttcttgaagatagacactgcactaccaataaagaaacaaacttatccttcaaaacaagattataaaaacacctattatgcccaaaacgacgacaactacctctgcttgttctacgagggtatggtaaaaggtaaagtgcaacgttctttccgcctcgttaactatctggatgttgcaaagcttaacctaaaaaacgaaaaaacgttgttccatgaacccgaattcgcacattatgaaggtaaccatagtatgccattacgggctattctgaagaaaggcacacgggtgttgttgttcgctaatactccagatgaaatacccgaccttgataacgatgcattgagccaacggctatatgttgtacgaaaattcaatgttattacatctgtttacgtatatatgcatcaacatattgatgcacgaaaagaaacagaattttcaactgaagaaaaaggaactgagttcaattctcaaaaaatatatccctacattaaatgcacagcacctaatttcaaggcgctcattgaacactacgactttgaaatcaatcctcttggaaaaatcaatttcaaataaggcatgattaagcgcacactctgtttttcacatcccgcgtatctctcgctacgcaacgggcagctggtggtcaaactggaaaagcacgatgacgagccagagaagcaggcaacgatacccatcgaggatatcggcgtcgtggtgctcgaccaccgacagattaccctcacccacggtgtaatggccgccctgcttgacaacaacgccgcagttgtcacctgcgacaactcgcacatgcccgtgggcctgatgttgccactcgaagggcacaccgtgcaacaggaacgcttccaggaccagttgggagcctctctgcccctgcgcaaacaactgtggcaacagaccgtgcagcaaaagattctgaaccaagccgcactgctgcgtgaactgcacagcatcgagactggcaacatgcgacagtgggccaaagaggtgctttcgggcgacagcaccaacctcgagggccgtgccgccgctttctactggagccagatgttccccaccattcccgacttcacacgcagccgcgacggcgtctaccccaacgcactgctcaactacggctatgccattctccgtgccgtcatcgcccgcgcccttgtcggcagcggtctcctccccaccctcggcatccaccaccataaccgatacaatgcctactgcctggctgacgacatcatggaaccttaccgtccttatgttgaccgcctagtggtagagaccatggccgaatgctgcgacgttgaagtcaccaccgcaatcaaaagccgcctgcttacagtgccgacgctcgaggtgcatattggcggacaacgcagtccattgatggttgccgctagccagaccacagcctcgctggcacggtgctttgctggcgaaagtcgacgcgtgacctaccccgagctgtaaatatggatcgtttcagtgaataccgcatcatgtggattctcgtcttcttcgacctgcccaccgataccaaaaaagagcgcaaggctgctacagacttccgcaaacacttgcttggcgacggattcaccatgtttcagttttccatctatgtgcgacattgtgccagccgagaaaatgccgacgtgcacctcaagcgcgtcaaggccgctctccccgccttcggacaggttggctgcctgaccatcacagataaacagttttcggagattgaactcttcgttgccaaaaaggaggtcgagcccaacgctcctggacaacagttggagttattctagaattgaaaaatcaatcaccacaaacaaaaaatcccgccccgaagagcgggatttttttagcctttgacagctaacagaacattgattatcattatattgctaacatcatgatgtcaaagagctaatatcaatgtttacttttcaagcaattcacaaccaatctacgcagcgagctacgcaactcgaagatgtcaaagagctaatatcaatgtttacttttcaagcaattcacaacaaaaaggggaggaaacaccaccccaatcaagatgtcaaagagctaatatcaatgtttacttttcaagcaattcacaactttttcttttgtttgggcattccggctacggatgtcaaagagctaatatcaatgtttacttttcaagcaattcacaacgtggttttccaccgtctgaagctctttcaagatgtcaaagagctaatatcaatgtttacttttcaagcaattcacaacgagtaccagatggaagatggtgaggtcgttgatgtcaaagagctaatatcaatgtttacttttcaagcaattcacaacgggttgctggcaattagcctcgtggacttgatgtcaaagagctaatatcaatgtttacttttcaagcaattcacaacgtccgaggtcgtcatcatagcacccgttatgatgtcaaagagctaatatcaatgtttacttttcaagcaattcacaacgacgattgattaagattttgccgaccgtaagatgtcaaagagctaatatcaatgtttacttttcaagcaattcacaaccgccacaggcaacaccattcagtcttaccagatgtcaaagagctaatatcaatgtttacttttcaagcaattcacaaccacgtatcgactatatacggcttatcccagatgtcaaagagctaatatcaatgtttacttttcaagcaattcacaacaaaaaataattacaaatataatgatttagagatgtcaaagagctaatatcaatgtttacttttcaagcaattcacaacggggtgaaaaggttatgccctgccgtggttgatgtcaaagagctaatatcaatgtttacttttcaagcaattcacaacatatagccctgctgcaaaaaatatcaagtggatgtcaaagagctaatatcaatgtttacttttcaagcaattcacaaccaatctgagtttgattgtatgattcatgcggatgtcaaagagctaatatcaatgtttacttttcaagcaattcacaacccgtctgagcggaaagaaacgaaagaacttgatgtcaaagagctaatatcaatgtttacttttcaagcaattcacaacacattgcgtatcactcgctttgtggggtcggatgtcaaagagctaatatcaatgtttacttttcaagcaattcacaacaatgaaaatggacatgtaattataagaaaagatgtcaaagagctaatatcaatgtttacttttcaagcaattcacaacacagagcaacgaatataaatccgctcctcagatgtcaaagagctaatatcaatgtttacttttcaagcaattcacaactggttcggacatagactcctgcgaggttgtgatgtcaaagagctaatatcaatgtttacttttcaagcaattcacaacaccgaccattcctactgattttgccataatgatgtcaaagagctaatatcaatgtttacttttcaagcaattcacaactataatctcgaaaaaaagatgagcgtggttgatgtcaaagagctaatatcaatgtttacttttcaagcaattcacaacaggtggaggtattggttctgccttcatcgagatgtcaaagagctaatatcaatgtttacttttcaagcaattcacaactgaacttcacagggatatttataaaataaagatgtcaaagagctaatatcaatgtttacttttcaagcaattcacaacaggaggaggaattggtagccgtttgattggatgtcaaagagctaatatcaatgtttacttttcaaactgcaaaggtacgtaattatttcgaatcggcaaaataaacttttcgtacggggcgcgcgagactaaaacattgtattgccgacaccgtgatgccagaggggctcgttgcaggcgggacgcctgcgcacccaatgtattaatatccctaatccttaaactgtaaaccttaaatcttcatatcaagaattttttgtatttttgcagcgtttttttcacatagtatcatgaacaaaggtctatcattcttgcactcgctgaggggcgccgcttcctgtctcctccttgcctctctccttttcggcaccgctgccgcacaaaccagcatgcctgtcccctgcggcagcttcgagcagtggtccacgcatccgggctacagcgtcaccgcgggcttcatccccgtgtcggtctacagcagcttttccactcccacgggctgggattacctgtcctatcctgtgaaccagtcaatctcgctcggcatcaccacggtgacggtcgacacgcagctgccgctgatcaaggcctcgcaggagtcggggtcggtgcccgtcggcaattcggcggtgaagctgcagtcgttcaaactgagcgacattatcagctccgcagtctatgcggtggcggcgggctcgattgacccggagctcaccagcgaggtgttccccagcatcctcacgacaggcacagtggatatcgaccggttcattcccatgatgggttccctgatttcaaatatgggcaatacgggggccctgctttcctcacttgcggacatcgacgtgaactatctcgtttccggcggcatcgcgctgggcagctttgaacccacttacctctcggggagctacaagtaccattcggccgtcggcggcgacaacgggggcgtggtgattctcggcacgcgctacaaccccttgctccatcgccgcgaggtggtgggcggcggcgccaatatcgccctcaccgaccacagctcctacacggcattcacggtggactatcattcgctgcacgactacgacgccagcttcgctgagcaggctcccgactcgctgattgtcatgctcatctcctcggctagccagaaccgccagcaggggtcctggatgtgcgtcgacaacctcaacctctggcatgtcgacccgccggagcccccccgacacgacgacggtgggcatctacggtcccgcggcaggggtgacggctaccgacgtggtggtctatcccaatcccgcccacgggcagtgcacggtgaagtgtgccgccgacggggcgctgctgaagctgtactccagcgacggacggctgatgctgtcagaaaaggtcgagggtgcgacgcttgccctccccctccccggcagcggggtgttcctgctgcaggtggtcacccgcgagggcagcgcggtgaggaagatcgtcgggaactaatagccctcagggttcctcactacattatatttgattcatcggtgttcggttcccttcagggctaatagcctgaagggttcctcactacattatatttgattcatcggtgttcggttcccttcaggcctgatagccctcagggttctggctctgccagcgccagctgtcgcgcaccatgtcatcgatgccgtacttggcctcccagcccagctcggcttttgctttcgaggggttgcagtagcaggtggcaatgtcgcccgcgcggcgcgccttgatgctgtagggcacgtcgacgccattgacgcgcacgaaggctttcaccatatccaggacgctgtagccgtggcctgttcctatattatatatacctatgccgcagcggcggccgacggcctgcagagcgcatacgtgggcagcggcgagatcgcagacatggatatagtcgcgcacgcccgtgccgtcgggtgtggggtagtcgttgccgaagacacccagctccttgcgcttgccgacggccacctgggtgatgtagggcatcaggttgttggggatgccgttggggttctcccctatcctgccgctgggatgcgctcccacggggttgaagtaacgcaaaaggaccacgttccactcggggtcggccttctggatgtccatgagcacctgctccagcatggacttggtccagccataggggttggtgcactgacccttgggacaattctccgtgatgggaatctccacagggtcgccgtagacggtagccgaggaggagaagatgatgttcttgcagccgtgcttgcgcatcacgtcgacaagggtgagcgtgccgccgatgttgttctcatagtactcccacggcttctccacgctctcgcccacggccttgagtccggcgaaatggatgcaggcgtcgaacttcgggtacgcaggcgtcccgcctgcacactctgcagcggcaaagaccctctccagcccctcgcggtcgcgtatatccaatttgtagaaagggatttcggggatgccgataatctcggccacgcgcttgagggccacggggttactgttgctgaggttgtccaccaccacggcggtgtggcctgccttgtagagctctatcaatgtgtgggagccaatgaatccggctccgccggtaacgaggatgttcatgggttcaagtttaaagttataagggataacggcaaaaacgccacattattgcgcatctttcatatattccttggcgtactccacatagtgggcggcgttgtcggtctggccggggcgtgtgggcttgatgtatttggaggggacgccgccccagatctcgtggggcggaatcttggttccctgcagcaccagcgctccggcagccacgatggctccctcccccacctcgcagtcgtcgagcagcgtggcacccatgccaatgagggcgccgtcgcggatggtgcaggcgtggacggtgacgttgtggccgatggtgacgtcgttgccgatatgcgtgggaccggtgtcgtgggtcacatggatgcaggaaccgtcctgcacgttggtgcggtcgccaatggtgatgggcgccacatcgccgcgaaccacggcgttgaaccacaccgagcactggtcgcccagcgtcacatcacccaccagcgtggcgttctcgctgaaataacagtcttttccccaacggggagacttacctttgtatgatttgattagtgccatcgatgaaaaaaactatcagaacaaatcaacccaaagccctttggggaaagcaaccatcaggaggaagaaaagccccccgatgacacaaccgaatattaggatgatttcaatcaccttcatgaagatgttgagtaccttgtgcttgtccttgttggctttgtattcgtcgtagtctttggtcataggttgatagaaaaaggtccttaaggtcaccaaggactttaaggaccttaaaatctttataatcctacaactaccaggcgaagagaggacggttctgcatcatctcgttgacctggccggtgatcttggcgcggacggcctcgtcggtcgggttgcagaggacagtgtcgatcatgtccacaatcacctgcatgtcgccttccttcaggccacgggtggtgatagcgggcgttccgacgcgcagaccgctggtcttgaatgcgctacggctgtcgaagggcaccatgttcttgttgacggtgatgtcagcggccacgagggcgttctcggcttccttaccggtgagctcggggaacttggtgcggaggtcgatgagcatgaggtggttgtcggtaccgccggagatgaccttgtagcccttgttgacgaaggcttcgcacatcaccttggcgttcttcatcacctgctggatgtactggtcgtagctgtcggtgagagcctcgccgaaggcaacggccttagcggcgatgacgtgctccagaggaccgccctgggtgccggggaagacggcgctgtcgagcagggcgctcatcttcttgatctcacccttcggggtggtcttgccccaaggattgtcgaagtcctgacccatgaggatcataccgccgcgaggtccgcggagggtcttgtgggtggtggtggtgacgatgtggcaatacttgacggcgttgttcaggtagcccttggcaatcatgccgctggggtggctgatgtcgcccatgaggatggcgccgatacggtcggcgatctcacgcatgcgagcccaatcccagtcacggctgtaggcgctgccgccaccgatgatgagcttcgggtggtgctcgagggccttcttctccatgtcctcatagtcgaccatgccggtctcttccttcacctgatagccaaccaccttgtagttgataccgctgaagttgacggggctgccgtgcgaaaggtgaccgccgtggttaaggtccatgcccatgaaggtgtcgccgctgttgaggcaggccaggaacacggccatgttggcctgtgcaccgctgtggggctgcacgttggcccagcaggcgccgtagagcttcttggcgcgctcgatggcgatggtctcgctctggtcgacaacctggcagccgccgtagtagcgcttgccgggatagccttcggcatacttattggtcatcacgctgcccatggcttccatcacctggtcgctgacgaagttctcggaggcaatcagttcgatgcctttggtctggcgctcacgctctttctggatgaggccaaaaatctcgttatctctctgcatatctgtttattattaaattattttaaaacgttaatattttgcaaatatacaaaaaaagtttaaagtttgcgaattaccgtttaaagttggggatttttttttatctttgcacccaaaatgaaaaaggcctccatactctttgccactgctatcctattgtcagtgaacgccttcggtcagctggtgcgtttaaacagcgagaagtcgaaaaatgcgctgtacttcgacctcgaccgcgtgttcaactacaacctctacgagcatgcccgctgggggggcggcctgcgctatgatatcaacttctccaaaaaaaggttcaagacgctctcgtttggcggatatctgggatacggctatgaggaccagcgcatcaaatggggcgtaaggagtgagctttacggcagttcgcagcatcgtctgagactctacaccgattttatccacgacctcacccccgatgccggacgcaacctattggactacagcgtcgccgactttaccgccaccggcagcttcatggcgcggcgcttcagtgatgcctaccgctggacgctgggaatgagccgcaggcagagcaaggacctcaccctctccgccgaaggacgtctctctttcgaacgccggctctatgactattggggtctcatctatccggagagcgactccgtctggagcgagctgccgtcggcattcttctccgaagcccgcttctgcctcagctacaaggaaaaatggtcgaccgaaatcctgctcgggacacgcatcgacaaccccgtgctggttgcgcgcctcctctcccaatacgacaacacactcctgttctccttcttcaagctgcatcttttcgcacaagcgggaatcactccggagaacaccccctacagccgcatgttcgaccttggcggcagctggggaagcccactctactttcagcgcagcctggttactgcccgccacaacgagttcactgccaacctcttctctatggtagccatgcgcctcaccacccgcaagcctcttttcgacctctacagcgagttgttccagataggcaccaatcctgtgcccttcgtgatgctaaatgccgcatggggacgcctgtggaatgaggacggcgacggcctgaaaatccacaacgcactcatcctgatgtcgcccacaaaaggcatcgccgaggtcggtgcaggcatcaacggccttctgcggtttggcaacatcgactggggcggcatggtagcctaccgcctctctcccgccagcgctttctaccatttcagcgaccccaaagacaacctctcgtggctcgttacagcatcacttcacctataatttcatctcccacacaatatttcaaacccactgccgtttaaaagaattcaatttaaaaaaagaatgaaaaagttattcaccatactgaccctccttggaaccgcctttatcgctcaggcccagccctatagcatgtccttcaccctgcagggcgccaccgattcggtgatgtacatcgcccgccatttccgcgaccaggtggagattctcgactccgcccgcggtgtcaaaggcacctacctcttcaaaggcaaacgttcctggcctcgtggcatctacgcccttgtgggacagaagcgcgacaagggcatccgcgacttcgtcatcgacggcagccagaaattctccgtcacgggcgacgccaccctctcgccggcaagtgtcaccgtgaaaggaagcgacgccaaccagcagatgttcaactatctgaaaaccgttgagagcgccaagaaagagctgaacgacatacgcaaacggcagaaaaatcctgccgacaaggagcaggccgacaaggaggagaaggcgctcatcgaacgcatggaagccttcgacgcttccgcccgccaccccaagaagccgcaattcttcttcgacctcgtcaacctcttcgacgagcccgaggtgcccgacagcatcgaggacaagtccacctacttccgcacccactactgggaccgcctgctgccaaagccggaaaacgcacgctacaagctgaccgacctgcg

SEQ ID NO: 3960 - DNA, 24161 bp, synthetic construct
  source 1..24161: mol_type = other DNA
  misc_feature 1..24161: note = Synthetic
ctccgaccggctcctggttggcaccatgaccgaccccgccgaccccgccagcttcacgcggatgctcaccatcgtacccagccagaccggcgtgtgggagcaccgcatcgtctcgttccgttcggcaccccgcaacgcacacttcatagccttgcgccatgccaatgccaccacgcccacactccagcccacactctttgtcgacgacctgagcttcaacacctgcgccgccttcgacatgcgcgtagtcaaagccgagagcgactccgtcattctcacgtgggagatggtgggaacacccaatgtcaccatctccgtcacccgcgacgacaatacccccgtcggcacctacacgccctcgcagccgccgctggtgattgcgccgctctcgccacaccacggctaccagattgtcttcaactcctcctgcacctccgggaccaccccgtgcgacatcgccatcctcgacaccgccaccatcgtcacccccaaacccggcaccggatgcgtcaacaccaccgacctctcgtcggccgacgccctcttcaccagtggcaccttcggcaacccctacgaccatgccggcgccgtcaactatggcagtctgagcgtcgacagccggcacaccgtctgctacgacaccacccagcacgacccgcgcaccggcggcctgctgcgcaccattccctccggcagcacctccagcgtccgcctgggcaactggagctccaacccctaccgtcccgaggccgaagccatcacctacagcctcttcgtcgacaccctgagtttcaacctcctcatcatgcgctatgccgccgtgctgcagaaccccatgcacgcccccgaggaccagccgcgcttccgtctcgaattgctcgactcctccttcacccccatcaaccccgaatgcacgtcggccgacttcatcgccgaccaatcgctgggctggaacgaagccgccaacaatgtgctgtggaaagactggaccaccttcggcatcgacctctcggcctacgccgaccagcaggtctacgtccgcctgacgaccttcgactgcaacgagggctcgcacttcggctacgcctatttcaccctcgagtgcatgcgtcgcaacgtcgtcaccgagaactgcggcgacgtcagcagcaataccctcaccgcccccatgggcttcaactaccgctggtacgacagcaccaacgccaccctcggcacctcccaggccctcaccatcccctcggccaacaccacctactactgcgacgtctcctcgcaggagaaccccgcctgctccttcaccatttcggccttcgccggctcacgctacccgatggcgcgtttcgacaccgtggtcacctacaaggactgcggcttccaggtccgattcatcaacaacagcaccgtctcctccgacggtatcacccccttgggcaccgacgagccctgcgaaagcgcccgctgggacttcggcaacggctccacctccaccagctaccacggacagaccttctacaaccaacccggcacctacaccgtcaccctcgtcagcggcatcgccgatggttcctgcaccgacaccgcaaccctgaccttcaccctggcctatccgccctacacgccgcaaatcagcggtccggaatccctttgctacggcgccgtggacaccctgtatctcctcgacgcccacaccgccaacaccacctggcacaccctcgacagcacccaattcctcccctgctcgccgagcaactacgtcctcggcaagaacgtctacaccatcgaggccaccgaccccaacggctgcgacgtaagcctgcagcacattctctttgtcaaccccgtctacagccagagcgacaccctgctgctctgctcgccccagctgccctactcctatgccgacaccgttttccagcccggaaccacctcggccgagtttcaccgccacttcacctcctccgacggctgcgacagcagcttccacctctggctctccgtcagcaattcctcggcagccctgcacttcgacaccctcgacgccgtcatctgcgacaaccaacagtactccttcttcggcaacacctacaacacccctggccaacactccgaggtgcacctcgacgatgccggcatctgcgacagcatccacatcctcaacctcaccgtcaacgccacctccaccggcgacacctccgccagcgcctgcgaccgcttcgtatggtacggcaccaccttcaccgccgacaccaacaccgtccacgtcacctccaacgccctgggatgcgacagcaccatcaccctccacctcgccctccgccactcttccgacaccatcatcacacactacatcgtcgaaaacgccctgccctaccgatggaacggcatctcctttgccgacgacaccacaggcttcgtccataccctcttgaaccatcaagactgcgacagcaccgtaaccttcaacctcgtcgtctaccgcaaccacaccgccaccctcgccgacagcctctgcgagggcctcctgccctacacctggaacggcgtcctcttcaaccccgacgaggccgaccccgtcacctccgtcatcacccaccaaaccgtcatccccaccgtccacggggccgactcgctcatcaccatgcacctcaccgtgctccgcaacagcagccgtaccatccacgacaccctggtgcagaacgcccttgccgcctactcctcgccgctcacgccggcgcccaccatgcccgacgccgtcgacgcctcggccccggccctgctctgcctggccgacaccgtgtggcacaccgtcaacgccgccggatgcgacagcaccgtgacctacacgctccatgtctaccgcaactacgccgacaccctccatgtcgaccgctgcgacaaccaggtgccctacacctggcacagccacaccctcgcggccgacaccacgctctccgacaccctggcctccgtccacggcgccgactccgtcaccacgctcgtcctcgccgtccattccacctacgaccttgccgacaccatcgtcgtctgccccggcagcggattcatctacgagggcgtcgactacggcggccccaccgaattcgacagcccccacctcaccatccacgactgcgacagcatggtgcatgtcgtactgcgtccgcgcgacggctcggtgcgcctggcccccgtcgtcagcctcgacggctcgccctggatgacctacgacaccaccctcctcgactgccgtccctccgagctgcgcctgctcgacaccgcagcctccgtctcccgccagtggaccttctggcccgccgacggacagggcgacaccctctcgggcaccgacagcctcctgacggccagcttcgacaccaccggcatcttctccttccaactcattgccgtcgacagcaacctttgcaacgacaccattcgccgcgactccgccctctgggtcttccccacccccgaggcatccttcatctggtcgcctgaccatgtctccatccacaaccccgaggtgcacttctacaaccagtccacgcccgaaggactctccttccgctggcttatctctcaggaccagagcggaagctccttcgacaccctgctcgacgagagcccggcctaccgctgggaggtgcccgtcgaggctggcgactacccggcgagcctcgtcgcctactggctccaccacggacccgacaccctcaccatcacctgcaccgacacctccaccgtccccatcgccatcgtcaacacctacctccagttccccaactccgtcacccccaacggcgacggcatgaacgaccgctgggtcatcgtcaacctgctggagatgggcgaatacagcatgaacgaactctggatctacgaccgcttcggcgcgctcgtctaccacgtggagaacatccaccggctctccgacttctgggaccccaaccagacctcctcgcccgacggcacctactactaccgcttcagcgccaaaaacaacttcggcctggtgaagcgcaacggcgtcatcgaggtgtcccgttagcccctccgtccacccacatccctaccataaaccaaccaacccccaatcatctcccaccgaggtgggagttggttgggagttggtagggtgttgataggtggttattaggtagttagcgcctatcggatgttttatcgttatttgataataatttcgtcggtgaagaggtagctcggctgacccggggcggggtgccacgaggggagcggaccggggttggggacgacgatgcggaggtagcgggcaacagggtagcccaacgtgatcggaggtttcccgctgctgttgtccgtcagatcgatatggtagttacgcagacgcatgcctgtttcgcgggggtccatggggaacgtctggttcttgaaaaagcgccagtttttgccgtcgtcggaggtgtagattttgatttcggtgggcgccagtatccagtcgaaggtgttctgcatgaagcgcatgctgacctcatggagcgccggcgtctcgccggcaaattctatcaccacgtcgatgctgtcgccccaatagccctgccagtggccgtcggcgtaggtggtgttgctgccgagttggccgtcgacaagggcttcggggccgccgccgctgtagatggacttgtaggtgctgtactgcgtgcccagcgttatcttggcgcccatgccgaggtggctcagcaggtactgctcgctgacgacgccttcgccgtactcgttgtagctgatggcgcggatggtggcggagcgctccagggagaaggggccggtgtagcgggtggcggtggagtcgggctcggaaccgtcgagggtgtagtagatggaagcctcaccccctgcccctctcccgttggagaggggggtgtaaagcctacggagcgtcaccatggggtattcactcccctctcccttcggagaggggttgggggtgaggcctatgaagacgtggcggtcgaggtcgagcacctcgcgcgcgagcgcatcgtatctgttcattaccacatagcgttcgtagtcgccgttctcctggtcccagaggcggaggtattcgcgcttgaggttgaagagggcctgcaggtagtcctcggcgtagccctggcagtcggagtacatgtccggatcttccaacgcgctgtgtatcgccatgcgcagatggcatttgtcggcggtgagcgcgatgcggcgcagagcgtagtgagcgtgggggttggcggcggagtcgacatggatgtcgtcaatcaggtggctcaccgtctccacgcgctcgcccatggcgggggcggtgttgtcggggttgaagttgagcaggggctccatcagggcggcgctggtgtaccagtcgccgacggcggggttgtacatcagggcaccgacggcgtagaggtctttcaccttgccggtggagccatagaagagccgctcataattctcgttgaactgccgttcccgttgcttcagttcctcggggtcgtcggtcttgagggggttccaagccatctcggcggcccagtactgggcgtgccagctgttgtcgaagagggcttcgccgttgtcgtcccagcaggtgagcatggcaccctcggcaccatcgcggtagccgtcgcgatagaggttggcgatgttcttgatatagcgctgcggcgtggaggtcatggtggcgctgtggcccgtggaggcggccacccagaaggggttgccctgttccttgaagggggctatgagatggcggaaactgtctatcggctcgtaggcccacatgatgtaggtcatgtccttgggcagctggcgcatcatatcagggttcttggccacgatgtcgccccacatggccagcctgattgcgttggttccctcggacttcaccatctcgtagcaacggttgatgaaatccacatagacctggtcggcgcctttctcgtccaccagtttcttggcgcgtccggtgccgagctgctcggtctcgtcgcagttgatgatgaagaaaggcgagttgggaatgcggtcgtaggcggccttgatgcgcttgcgcaggaaatcgtagaccttggggttgccggggttgaagttggctcggctgtccatgaggtcctcgtagaaggggatgcgcagcgtctcttcggcgtgagcgaagagctgcaggttgatgacctcgtcggggtgcggcttgcagtcggccaggtaggcgggcgccaggtcggggtactcctcctggtagagggtgtgctcggtgtagtagttgcagaagttgtacttcagggcatgcagcgtctgccattgcttctggcggtaggcggcgtgcggcacggggccgcggctctggtcgtccatccagcctcgataggtataggcgggccagtcgaggatggtgcagcagggcaacgtgtcgtgcaactgacgcagctgggcgagggtcagacgggcatacaccaagcccttggtgccttcgtaatcgatggtgattttgcgaggctcgatggtcaagcggtaagcctggctccagttgccgtcgaaatgaggcgactgcggtccacggccccatttaacgcgctgttccttcaccttggccttggccagcacacacgacttgccctccgacgagagggacacctgttgcggcgtgggtatcaggccgaggttgacttgtttttcctgtgccgccaccgtcagcccgacggccagcagcacgattatcattatccgtttcatagccaattaaacattaacaactctacaactctacgcctctacaactctacgtctctatcactcgctataattatggtccaccacgatgctcacctgcatgtcgggcaccaggggttgtatctcggcggctacctgggccacgagggcctcctcgtctaccttgtcggcgggcacgatgtcgaccgagagcatgcggtcctgctccgaatagtagaaggcgtgcgcctggatgatgtccttgtggctggccaccacctgcatgacggccgcttgcagctccgcccggcgattgtcgccggtggccacactgtagaagcccacggtcatgatgatgccgtggcgggcgaacatctcggtggcgatgcggcggcccaggccgtggatgtcgtaggccgtcagggtgtcgcggacgctgacatggagcgagccgatgatgacgctcggcccgtagttgtgcagtatcaggtcgtagacgccctgcacctcgtcgaaggccatcacctctttcttgatttcgttggtcagctccttggggatgctggtgcccagcagctggttgattggcgaggccagcatctcgacgccggccttgatgatgaccagcgagatgatggcgcccagtatgccgtccagagacacctgccacagcagcatcacgcccgccgaaacgagcgtcgccagggtgatgatggcgtcgaacagggcgtcggagcccgaggccaccagggcgtcgctcttcagctgctcgcctttgcgcttcacgtagcgccccagcagcagcttggccacgatggccacgatgatgaccaccagcgtggcggtggtgtaggagggtacggtggggttgaaaagtttcttcaccgattcgatgagcgacgtcacgcccgccgacagcacgatgacggcgatgatgatggcgctgaaatactctatgcggccatggccgaagggatgcttgcggtccgccggacgcagcgagagtttggtgcccacgatggtgatgatgctcgacagggcgtcgctgaggttgttcacggcgtccatcacgatggccacactattggccaacagacccaccgccgccttaaaggccgccagcagcacgttggtggcgatgccaatccaactggtgcggatgatctgcgaactcctatccattctttttttattttaaacaatccaagtatctgtgtatcgtctcctcgatgccgaggtagagggcgtcggagatgagggcgtggccgatgctgacctcgtcgcaccagggtatctgctggtggaagaacgccaggttctccagcgagaggtcgtggccggcgttgagacccaggccgcagtcacgggccacccgggcggcctccacgaagggggcgatggcctggagcgccggcatcttgccggcaatttcatgatactccctcgcgtaagcctccgtgtacagctccacacggtccgtgcccgtgcgcgccgccatctcgatcatcttcgggttggcgtcgatgaagatgctcacccggataccgcaggccttgaactccttgaccacatcgcacaggtagtcctgatttttgaccgtatcccatccggcgttggaggtcaggaccccctcggcgtcgggcaccagcgtcacctgcgcgggcttgatctccttcaccaggtcaatgaatccgtaggggcggctcttggagatacccttggggttgccttcgatattgtattccacgcttatcagcggcttgatagccagcgcgtcggcgtagcggatatgccgctcgtcgggccgtggatgcaccgtgatgccctgcgccccgaagcgctcgcagtccacggcaaacttcaaaacatcaggtgtgttgccaccccgcgcattgcggatggtcgccaccttgttgatattgacactcagctttgtcatcgttgtatcggtattaaattcggctgcaaaaatacgaagaatgtacggaatggcaaaataaaatacaaaaaccatccccacacgacctcttaggttttactccccttttactcaaaccctaatcaaactttacctcggtccgtgtctcccccatgcctccaacgtcacacatccagcattcaaccagccatgcaccacttaaaaataatgttgggttgacgccgatgtattggcatatcggcgaacgcatcaaccatgaagtgctcagcaacgagcgtgccacctacggaaagcaaattgtcgcgacggtgtcgcgacaattgcaggaagagtttggaacaaaggggctcgatgcgaaaagtattcgtcgtatgatgcaatttgcatccttgtttcctgaattccaaattgtcgcgacactgtcgcgacaattacaatggtctcattttgtagaggttattcctttaaaagacgaccttcaacgggaattctacctgacgttggcagcctccgaaagatggtcaattcgccaattgcgcaaggagattgacggtatgctctacgagcgtactgccattacgacaaaaccagacgaactgatcaaacaggagctgtcggaattgcgggaaaacaacgttctctccccggaccttgtcttcaaaagtccttatttcttagagtttacaggactgaaggggatgtatagcgaaaagagtcttgaggacagtcttgttgcgcatctggagcagttcatcttggaattgggcaatggcttcaccttcgtcgagcggcagaagcggatgattatcgacggcgaggacttctatctcgaccttcttttctatcatcgcaggctgcaccgcttgattgccatcgacctgaaactcggcaaattcaaagcgcagtacaaaggacaaatggagttatacctgcgttggctcgaagcccacgagatggaggctggagaggagcagcccttaggcctattgctctgcaccgaaggtggcgacgagcagatagaactgctgcaactcgacaaatccggcatcaaagtggcgcaatatatgaccgaactcccctccaaagaactcctgcaacgccaactgcacaaaggcctggaagccgcccgccaacgctgggagaattatcaggagaattgattcaacaataagattcgtttgattcaaatataatttgtatctttgcagtcgaaaaaggcgagacccacgcaagtgcgcaggtctcaagaatcttcggcttatagccttattgtgaaaagcttaaaaagtgatgcaaaaatactaagaatatttgaattgacaaaataaaattagcaccatgatacaaaaaacacttggcatcgatctcggaaccagttcattgggccttgctgtcagaaatactgatttgggtggcaacattatcgaccaactggaatattacggttcgataatcttcaaatcgggagttggaaacggcaaaactggggaatactcttacgcggcagaaagaacaaaatatcgatccactcgccgcctatatcaggcacgcaagtatcgcatctgggcaaccctgcgtcttttgattgcccacggatgttgtcctctgacagatgaacaactagaccgatgggccaaatacgacaaggccaaaggtctaaagcggcaatatcctgttgatgtcaccgagtttgagcagtgggttcgtttggacttcgattgtgatggaaaaccagaatacagtagtccctatcaactacgtgctgagctgacaaaacaccaacttgactggagcaaccagacagaccgatataaattcggccgagccatgtatcatatcgcccaacgacgtggcttcaaaagtagcaagggcgagactctgaaagatgccaacgaaaacgacgatgcgtcatctatcgacattggtgcagaaatgaagaagtcggaagaaaagaagttaaagaacctcaacaaatacatggattttcatcaacttcccaccattggctgtgcgttttatcaaatggagcgcgaaggtattcgtgtaagggataatagcgaatatcaagccgtgcagttacaataccaacaggaagtaaaacacatctgcgagtttcaacacattgacactatagcgcctgcgctctacacgggtctaatcagcaccaaacaaggcgaaggcaccattttctatcgccgtcctctacgctcacagaaaggcaacgtcggcaaatgcacacttgaacctacctgccgccgctgcccacaaagccaccccgactttgaagagtttcgtgccctgtcgttcatcaacaacataaaatatcgtacggatccaacaggagaatgggtttcacttactgacagcgaaagaatggaactatttgaaaaattattcgcccattctaaagcgaccttcaaattcgaagacatacggaaatggcttgaggacaaacatagcggtttgaggttcaactacgacagccgtacaatcaactatcgcgaccataccaccgtggccggctgtcctgtcatcagccgactgcgcaaaatacttggagcagagtggcgtacaacaaccatctcaacaagcaaaacccgtgtgaaccgcaaaacaggcgaggtgcacaccgtcagctacaactacgaagacctctggcacttggcctatagcagcgacgattatgaacagttgtccgaattcgccaaagtccagatgcatctcgacgacaaacaaacaggagaactgacacgcatgtggagtgccatacaggaaggctatacctctctaagtttaaaggccattcgcaacattctacccctcttgcgacaaggattaatatacagcgaagccgtggctttggccaagattcccgacatcatcggccacgaccgatgggcgaatgtcaaagacacattattattagaatacacgcaccttaccgaacagaccaatcgtactcgtcttgtttacaatattgccaatacacttatcgccaactacaagtcgcgcaccattgatgagcagcaaggcttcaaagatactcattacacccttgacgagaccgacctgaaagatgtcaacaattgcatcatcaactcgctaagcgaaaagcgatggaacggtatgacagtcggagatcaacaacgtctgcaacaagatattgagcagctataccaacagttctttgcctcgtcaaaacgtgactactataagataccacgctccggagacactctcaaacaacaccttgccactctttttcccgacattccggctcaggattgggataagctctaccaccattcgcaaattgataagttccctcaacagcgcgacagcaacaacaacctgatgctcggcacacctgacatcggagccatcaaaaaccctgtagcacttcgggcattgcacgtgcttcgacacgctgtcaatggcttgcttcaaaaaggcatcatcgacgagtcgacgcgcgtggtagtggaaacagcacgcgagatgaacgatgcaaactggcgttgggccatcgagagctaccagaaggcacgagagaacgaaaacaaagccatcgccgaaatcatcaaagagttccgtcccaactataccgatgatgacatcgagaaggggcgtctgctctttgagcaaaacattgttcaggcaacctctcgtcagggaaaagctaaagccgaaagctttgctcttgacatgcagaaatacaaactatggaaggaacaaaaattccaatgcttatattcgggcaagtacattaatgtcaaagatttgtttgacaacaacgtcacacagattgaacatactgtaccccgcagcatatcatttgacaactcactcaccaacaaaacagtgtgcctcacacatgccaaccgcgagaaaagcaaccgcattccatctgaactgccccactatgacgaaattctaaaccgcatcaaaccttggcaggagtatctcgaacacactaaagcacagatagaactttggaagagcaaatcgcgtacagccactaccattgaaagaaaaaacacctgtatcaggcaaaaacatctgtgggaactggagcgcgactattggcaagccaaagtgcgcaccttcaccattcaaaaagatgaactcgaccaaggcttcctcaacagccaactggtcgacacccgcatcatcaccaaatatgccttccactatctgaaatctgtcttctctcgtgtcgatgtcgagaaaggtagcgtcactgccgatttccgcaagatactcggcatccaaagcgctgacgagaagaaagaccgcagcaaacattctcaccacgccatcgacgccgccgtgctcaccatgatacccgtggcggcacagcgcgaccgcatgattgaactattctaccaatgtgaagaagtatcaggctgggaaaaagaccttttacgagacaaactgaacaaggagattgccgcctgtcacatcggccgcatcaacgggctggtcgaaaccatcgagagcaacatcctcgtcaatcatgttaccaaagaccaaaccctctctcccgccaaaaaaccacgctacatcaacaacaaaagaaaagtaggacaatggaaccaaggggattgcattagaggacagattaacgaggccacatttttaggtgctataaagacagctgactccagcattgccatggtggtgcgcaagcctcttaaatcactgaccgaaaacaatcttattactattgttgatcaacgactccgtagtcaaatagagcgacaagttcacaaatggatggaagaagaaaacattccttttgcaaaagccatcgagaaagacatctacatgcttgataaagacggaaatcaaataacacacgacaaaaatggccgcgctatatctcctatcagacacgtccgatgcaaaactgccaatgcagaacccattactttgaaaaaacagacatacctatcaagagctaaacacaaacaatattactacacggtaaatggggaaaatgcgtatgccgcaatatattgggatggcattatcggaaatcctaaaacatttgaaataagaacattgcttgatattacagaaataataggaaccactcactctattactccacaagactgctttcctgcgacgaaagacaacattaaactatatggtataatacgtcctggttgcagagttcttatattcgacaaaaatgaactgaaaaaaggagagtcaattgacgatttaataattaaactacatgatactgaaatatacacccttaaaaacagattgtatattgtacggagttttgagaagaacggaaaaaccgttttagtgtttcataacgaagcacgtaacgacaatgaattgggcagagggtcatcaatgattgacctatcatcacccaatccaaaagatagagttagcatcaaaactcgttacatgctcatagaaggatttcatttcaatattgacaacattggtaagctaaagttcataacacacaaatgatcaaacgcaccctttgcttctcgcacccagcctacctctcgctgcgcaacgggcaacttgtcgtcaggcttgatccacacgacgacgagcccgagcggcaggccaccgtgcccatcgaggacatcggtgtggtagtgcttgaccaccggcagattacactcacccatggagcactgtcggccttggtcgataacaatgccgccgtcgtcacctgtgatgaccgacacatgcccgtaggcctgctgctgccactcgaaggaaataccatacagagcgaacgtttccaagaccagattgatgccagcctgccgctgcgcaagcagctttggcagcagaccgtgcaacagaaaatacgcaatcaggccgccctgcttcacgagttgcacggcatcgaggtaggcaatatgaagaagtgggcaggcgaagtgctctccggcgacagcaccaacctcgaaggtcgcgccgccgccttctactggagccacatgttccccaccctgccatccttcacccgcagccgcgaaggcgactatcccaacagtctgctcaactacggctatgccatcctccgcgccgtcatcgcccgcgccttggtaggtagcggcctgctccccaccctcggcatccaccaccacaaccgctacaacgcctactgcctggccgacgacatgatggaaccttatcgtccctatgtcgaccgcctcgtggtgcagacgatggccgaatgcggcgatgtagagattaccaccgacatcaaacgccgcctactcaccgtacccacgctcgaggtcactatttccggccaacgcagtccgctgatggtagccgccacccaaaccaccgcctccttggcccgctgtttcagtggtgaaaaccgccgcataagctacccggagatataatggatcgcttcagcgaataccgcatcatgtggctcctcgttttcttcgacctacccaccgagaccaagaaagaacgcaaggccgccgccgacttccgcaaacatctgctgggcgacggattcacgatgttccagttctctatctacgtgcgccattgtgccagtcgtgagaatgccgccgttcacctcaaacgagtcaaagccgtcctgccacaatacggccaagttggctgcctcaccatcaccgacaagcagttctccgaaatcgaactctacgtctgtaagaaagaagtcgagcccaacgctcctgggcaacaactcgaactcttctaaccacaggaataaaaaaacgagacactaaacaaaaaaatcccgcccaaacagacgggatttttttagcctttgaccccttatgaaacattgtgcatcactaagttacctatattgtgatgtcaaagagctattatcaatgtttccttttcaagcaattcacaactaatcgtgttctctacctctttgccgttgatatagatggttactttacgtgataatacctttgccataaatccttaaaatttacggcaaaggtactctattacagcttcacgaaaggggacagcatcacgtcctgatgcctctttccctgaatgcgccggaggctaccgtgctgtgatactcgcaacacgtgccgtaaaagtcggcaccgtccactatggcatcctcaaagtcggcatattccaggtctgcaccgttaaagtccgtgcctgtcaaatccatcccacggaaatcggcgttccgaaaatcctggaacgacaggtcggcccccgccagggtgtcgagctccggaaactcacggagaaggtcgccgtatatgtcgtagattcttaccattttttatctcctttcttgtctgtttagtcctcttgggtgtgcatttcttgcattttgtcagcgaattgtcggcgcacgacgctcatgaggtaggtggtggcgcggacctggcgctgcatctccggggagttgaagccgtcggggtgtgccatatagccctgcataaggagggtgttgaagccgtcgatggcgtcgtcgaggtcgccgcaggagagggtgatatcgaggctcaccggctcgaactctttccagatgtcaaagagctattatcaatgtttccttttcaagcaattcacagtttgaactccttcttgataggttccaccatgtcgagtttttcccagccgaagaactggacggtcttttgttggggtttgccgttcttgtagacggtgacctcggcttcgtaggggtcgcggcccatgtggccgtaggcggcggtgggacggaagatggggttcttcaggccgaaacgctccacgatggcgtaggggcgcaggtcgaagagtttcttcaccttctcggcaatctcgccgtcgtgcatcttcacatgggcggtgccataggtattgacatagagtcccacgggctcggcgacgccgatggcataggccacctgcaccagcacctcgtcgcagacgccggcagccaccaggttcttggcgatatggcgcgtggcgtaggccgcagagcggtccaccttcgacgagtccttgccgctgaaggcgccgcccccatgggcaccgcgcccgccgtaggtgtcgacgataatcttgcgtcccgtcaggcccgtatcgccgtgaggtccgccgatgacgaacttgcctgtcgggttgacgaacaattgaaaattgaaaattgaaaattgagaattggatgacgcactgcctttgactccaaagagcttctgtgtctccttcggcaggcgtttgataacgcgcgggaggagcaccttctccacgtccttgcgaatctgctcctgctccacgtcggggtcgtgctgggtggagaccacgatggtgtcgatgcgctcgggacggccctcgtcgctgtactgcaccgtcacctggctcttggcgtcgggacgcaggtacttcatctgcttgccctcgcggcggatgcggctcagctcctgcaggatgatgtgggccaaggtgatgggcagcggcatcagctcgtcggtctcgcggcaggcgtagccgaacatcatgccctggtcgccggcgccctggtccttcttggccttgcggctgacgcccatgttgatgtcctggctctgctcgtggatggcgctgagcacgccgcagctctcggcctcgaacttgtactcgcccttggtgtagccaatctcgcggatgacatcgcgcacggtggtctgcacatcgacatagccgttgcacgtcacctcaccgctcaccacagccagtccggtggtcaccagcgtctcgcaggccacatggctctcggggtcgtgacgcaggaactcgtccaacaacgcgtcggaaatctggtcggccactttgtcgggatggccctcggaaacactttcagaagtgaaaaaatagctcataattacattacttttaactgttaatactttgttttaacagtgaaaagattgtactgaaattaccgttgaattagtgctttagcattttttcaagtggttgcaatcattacaaatctatccacatttgcagttgcaaagatacgattttttcggcaattctaaatttttatttgaaaaaaaatatatctttgcaccaaaattcaaaatacaaaatcatgttaatagacgatttagacgaagtaaaaaatcttcttgaaagaaaaaggaactacgagaactgcattaaagcccttaaaccctttacagggaaaaaatcaattttcaactacaaaacggggaattatgagtctataagtgcaagatgtttcgctcatcttgaaagaatcgaaacaaacaaagggacctatgaatggggtacccttgacgagagagccgaagcactacttcttcccattttcgaacaacttcttgcagaagtcaacgaagaaattgctcaagtggaaatcaacggtgtgcctgacaagaagaaccatgtaaaaacaatgctctccgaagagattcaaccgatgtttaaagaaactcagaaagaagagaaagtaagcgacaatccatcaacatgggtaaaatggggcattgccattgcgataggtttctttttattgctattgctgaatctaatttaaacccacacctccccatatctcaataccacatgctttatacctggcaaatggatccccatcccattgccacccgcaaggcatttgggtacggtatcgcttgtcgataattgttctctctatgttcagcatatagcagacgttgactttggatatcaattccctgaaaatctgcacagttagttttcctctcttatagagcaatagaagcctgtcaatatacaacgatgtcggaatagtgtgttcataagagagggctagccactttttgtcgtcttcttttacccgatactctacatgctctgtttttagtttcttattccacgcattcctgaaactggaatatagtgtgagtccttcgcaatgcagatccccaccatcatccaatatcgaataatatccatgggcatatatctttccgacaatgtcgaactgactgtgcagtccccaggcggttgccacttccatagtggtttttgaaaagcaaatgccaccgacaagtgcttcctttaagtgaaagtttaggtcttgtttgtcctcaattccatccacaaggaaatcaagtacactacgcacatactcaaaacgagccgatacatccttgttgtaccaccgctcagaatcagaatattttatgttattgaatcccggcatgcagattatttctttaaacggtgatagtggcaacatagcaggtcaccattgtcgtcatagaggtggaggccggaaccctcgcagtagcgccacaccttgcacgtggcgcactggtccttcctggcccagctgcggtcgcgcatcacatgaaagcggttctcccacacatcccagaaatcgtccttgtagatattgccctggtccatgtggctgcgcacggaggtgcagccgctgatggcgccgtcgcaacggatgctggccacgtcgaccccgctgcggcaatggaagaaatggtcgcgcaccttctgctcgtattcgccgaggaaaccctcgcaggcgtagcttactgtaaatgatgagtgatgagtggtgagtgatgagtcattgtctctacactctttgatgaaatccaacagtccccggaactgctcgtcgctgaactgcaactcgggattgccggcggcgcgccccatggggaagatgctgaacaaacgccaggcgggaacgcccagcgacacaagatattcgcggaactccttcagatgaggatagttgcgcggattgacgcaggtaaccacatcccacaggatgtccttctgctgcgccagcaggcggatagcggcggtggccttctcgaaactctgcggatggcggcggatccagttgtgctgctcctcgaagccgtccaggctgacggtgatggagtgcatgccgctggccatcaggctctgcagccgccgctcgtcgagcaggaaaccgttggtcaccacgccccacggatactcgcggcggtagagctcgaggcccacctcctccaggtcgggacgcagcaacgcctcgcccccggtgaagataatgaaaaccttgtgggtgtcgacatgcggcgtaatggagtcgatgactcggaggaaatccgcagcgggcatatccttcacctcgggttgcaccttgcagtcgctgccacagtggcggcaactcatgttgcaacgcaacgtacactcccagaagagcgtccgcaacggatgcagcgcggcctcgttgtgccgcaacgaccgctgcagctccagtccaaccttctgcctgagcgacaaacccatagcactttaatttattgctctgaaatccgtctcacgcacaccgtacatcggttccataccggtggaatcattatagtccggctccgggcacccgtacatatcctcctgcttctcgcacgaggaaaggcccaacaagcccatcaacgtgatgagcagccagtgctttgctttcagcagacggagtttcataaagggatactatttgttttccagcttgattttcaactctttattgaaggttccctggtacatgccgctggcatcggagcggtccacatcgtcggcttccaccttcatgtcgaccacctggttgcggaactggccgttctccaagccgtccacatcgcgtaccaacaggcgcacctgttcctgcggaaggccggagttctggatggtgaaacgtccttcgtcgtcggtacgcacggcggtgttctccagatagtgcttcacattctcggggtcgccctgcaactcgccgtccgtcacctccatgccacgctcgagcatattgacgcgaatgtcgcgcacggggcgtccgtcggcatccttcacctggccgcgaatcatgaaattcatgctcggcacaccgtacatcaggcgtatcggctcctggtcgcggacggggggattgtccggctgaggattggccaactccttgttgctgtggcaagaagagagccccatggcactcatgacggtgaccaaaaaccagttcttaaatttgagatattttattttcatatcattttaacgccgatatttcgaaaatattgtgtatctttgcaaaacatttttcatcgaaaaaaagaagcccatgagcaagaccatcatagcaggaccctgcagcgtggagagcccgtcccagctgcgcgacgtgacgctggcgctgaaatccatgccggaagtgacgatgatccgcgcgggggtgtggaaaccccgcacacgtcccggagccttcgaaggcctcggggagcccgccctgggctggatgcgcgacctcagcgccgagctgggcgtgcgctactgctgcgaagtggcgcgtcccgagcatgtggagctctgcctggcctacggcatcgacaccctctggctcggcgcccgcaccaccaccaaccccttcatggtcgacgaaatctgccaggccctgcgcggcagcgacgtccacctgctggtgaaaaaccccgtctgccccgatatacgcctgtggctcggcgccctggagcggctgcagaaagccggcatcgacgaccttaccgccgtgcaccgcggcttcagcatgtacaacaaccacggctaccgcaacgcccccctgtgggaggtggccatggagctgcgccacgaacgcccggagctgcccatcctttgcgaccccagccacatgggcggccgtgccgacctcgtagggccactggcgcgcgccgcacaccaactggactacgacggcctcatggtcgaggtgcacccccatcccgccgaagccctcaccgacgccgcccagcaaatcaccccccaggccttggccgacgtcatagcccactgggccacaacaccctaccctacctcggtggccgaagccgcccgggccctcgagcccctgcgcagcaaaatcgacgacatcgaccacgacctcatctcgctgctcacacagcgcatggcggtatcgaagcgcatagccaccgtcaagcgcgacgcccacatgcccgtctaccagcaggcgcgctggtccgacatgatgaacgaccgcctgcgccaggccacctccctcggcctcgacgccgacttcataaaggaactgctggagaaaatccacgccgcaagcgtacgtgtacagttggaaaacggaaaatgacaaacaaaaaaaactgcccgttgacgcgggcagttgttgtctgaagcaaacttgtgctttttactttctttattcggcaggaaccacggagacgaagctgcggtcctcacggcctttgtggaatttcaccacgccgtcgacgagggcgtaaagcgtgtggtcacgacccatgccaacattctggccggggttgtgggcggtgccgcgctggcgaacgatgatgttgccggcgatgcatttctgaccaccaaaaatcttgacgcctaagcgtttgctttcggattcgcgaccgttactggaactaccaacaccttttttatgagccataatatactgtttttaaaaggttagacactacggttaattagttgatgctatcgattttgatctgggtcagatagtcacggtggccgttcatcttctggaagcctttgcgacggatcttcttaaacaccaaaaccttatcgcccttgaggtggcggaggacggtggcctttacattagcaccagcaatgtaaggtttaccaacctcgacgttgccatcattgtctttaagcatcacggtgtcaaaagaaacttcgctaccctcgtcgttcttcagacggttgacgaaaatcttctgatcttgggcgaccttgaattgcttgcctgcgatttctacgattgcgtacatttttaactgtttgttttttaattactttcactaatccacagggcattttccaccctgatttcggactgcaaagatacgactattttccgaactggcaaaatattttttcattttacgactttttaaccatcttcggccccttctgtagagacgcggcatgccgcgtctctacaatataaaaaaatatctgtgaataggattccgtcgcggggaaccgatttgacattttcaccttttttcaaccccttccccaccctattttcgacctatcatctcccaccgaggtgggagttgggtgggagttggtagggagttgatagggggatggtaggtagatgatgtgaacaaaacacactattatacagcgttttaaccagaaaaagcaccgtagaggtgcttttgaggggtgatcttttgacaaaaagtcgtttttcagtgtcgctgcggggccaagagacgctgcacctcgggcgacggcaggagggcgggacccgaggggtcgttgacgacggggagggtgtcgggccagaaggtgatttcgctcttggcggagccagcgaagatgccgagggcgccgtcgacgttgccgcgcacctggccctgctcggtgaagaagctgttggaggagccttggcgcgagacatcgataaggtatcgcaggcgcgcgtaggtcatgctctcgagggtgacggtgtactcgtgcttgaagggctgcacctcgttggtgtcgatgaggtggaggatattgatggaggtgcggtagttccggccgtcgatttggctgtcgttgaagaaattgcgggtgtagaggtagccgagcatggggcggctgtaggaggcgtcgccggtgatttcggggttggtgcgaagcatgaagtaggtggcgcggacggtgtcgacggtgtcgaagtcctgcctccagtcgttgtagcggatgccgctgtcgcgcaccatgacgcggaggttgtagtactcgtcgatgccggggtggtcctggaagtcgagctcggcttggtagtagcggaaggtgtggccggcgtcgatgttggagagcttgatgttggagaaggtggggatgtagggcacataggtggtggccgtggcctggaggctgccggcggcggccaggagggtgagggtgtcgccctcggtgcaggtgtaggggaagaaatacttgcagttggccacggagtcggcaccgagggggctgccgttgacaaagagggttaccgaggcgctgtcgaggggctggttgttggaggggtcgaggaagaagcgcgtgtgggcgaaatagacgaaggcgcgcttgccggcctggggcacggcgttgacgacgagctgggcgtcggaggggtcgttctcgatgtcgaggattttctcgcaggaggccaggaagggcgcggcggtcgcgaggaggagcgccagggagaggaggcgggccggacggaagggcgatgccgggcggacggggactgccgaacgcaagcgttcggccacgggacgaaggatatgggatatgtttttcatagactggggatgcttaaactaaacacttaacactaaacacttaacactaaaaatagagcgtgtaccccacactgggcaggatggggaagatgctgagctgaaccagggccgaggggtagccgttgtaggtctcggtgcgggagcggtagagcatgtag

SEQ ID NO: 3961 - DNA, 24152 bp, synthetic construct
  source 1..24152: mol_type = other DNA
  misc_feature 1..24152: note = Synthetic
gtgaggttgatggaaatctggtcgatagcatccaacgaaagagggctgccacctgcgggcaggttggtgccgataccgaaggaattgttgaacgaagcaccgtcaacagtgacagaggagccacggtagttgccaccaccggctgcaaaaccgccacccactaccgaagcctggggggtcagtttcatgatgtcgttcatgctgcggctggtcgtaggaacattctcaatggtctgattgttgatgaaagtaccggcgcctgaattctgaatgtccatattagaattcatctccgcagttacgacaacctcttcaagtgttacggcatcagccttcatcaccaagtttagtaccaccgttccgctcaagggtgcttgcacattcttcagcaccagtggacgatggcccatcaattccgccttgacggtgtaggggccgccggccacaactccattgatacggaaagagccatccctgttagagaaggcatgataagcgatgcccgacggtgtatacacagccgtaatcatagcatcggtcaatggcccattttcgtcggtgacgtgtccggcaatagaagccgttgtcgactgggcataaactgaggtggcaaaaagcacacccaccagtacgacaagcaaacgtttaatagtcttactcatgataatgtaattttggtttataatgtattaattgacgtattcttttccttaaagcagatagcaaacgatatggcaacaaccaacgaataggcagcaaacacataccacgccgcactccaattgggttctgcggcattgtatacaaagtggttcaccaccaagcctgccgcccatgtgccgagcgaagcgccaagtccgttagtcatcagcatgaacagaccttgggccgacgaccgtatttcgttgtcggtgttcttgtccacataaagcgaaccggagatattgaagaagtcgaacgccatgccatacacaatacagcttaacaccaacatccacactctgctgcctgggtctccaagaccgaacagtccaaaacgcaacacccatgccaccatcgatatcagcatcaccttcttgatgccaaatcgcttcataaagaacggtatcaacaatatgcacagcgtctccgacatctggctgatagaaataagtgcattggcattgttggcaccccaggatcccgcatactcaggcagctccttgaaatgcgtgataaaaggattggcatagccgttggtaatctgtagcgaagctcccaagagcatcgaaaagatgaagaacaccgcgaaattgcgttgtttgaacagtttgaaagcatccagccccatggccgacacaaacgacttagacttctttcccttgccaacgcacgggcaatgggtcagcgtcaaggcatagagactcaacacaatactcaataatccggaaatctggaactgacccgtagagtgctgcagctgaatccccgccttggtgcggatgaaattaacacacaacatgcagcatataaaaccgaccgtaccgaagaccctgatgggagggaaatgcttcaccgaatccagaccggccacttccaatgcattataggcaaccgagttggcaattgctatcgtgggcataaagaatgccacactaattgaatacagcaagaataaaatgccgaagtcaacattacttcccaaaccatgggcatagacggccacacccagcatgaatgcacccgccagtgcatggcaatacgacagcatccgctgtgctggaatccacttgtcggcaatcatacccaccaacgcgggcatgaaaatcgacaccacaccctgcatagcgaagaacagccaaatacggtcacccaacccgatacgggccaagtatccgcccatcgaggtcaggtaggcaccccacacggcgaactccaaaaagttcatcacaatcagccgtaacttgatattcataagccttacacaatatgatacattatgttttaaaacgcaaaaatacgaaaaaaaaacatacgatatgttaaacacaaaaaaaaatcgttaatttaacatctgcctgccacataaaaaggcttgttccatctgaatacagtcaatacaaacaacccaataagccgctacagtcacgatacggcctgaaaacgtcttacatgaaaagagactacaacacccgtatgcggccttcgggccgcaaatattggtctccgattatagagtcaagatagtcatcaagataaaccaacaatgccctcatataggggcacacatcggcattgataatccgagcgccggtgaacacatgaccgtttcccttgttgagaagggtatagtcggtacccgccacccgataggtacgtttgggattgaggggttcgtagcgacgtttcttggcattccacacccgcacattgcatacacgccgtttaccttccactcggaggaaaatgccgtgctcgtcagtaaccacagggctatctacgttggggtcaatctcgtaggtaaggccggaaacatacagaaagccaccaccaagtgaaggccaatagcggcatcccatctccaacgcatcaagaagtgcctgtcctttcatttctacaagacatagcctgttctgaaatggtgccgccgccaagaagtcgcccaaagtaaggtcaccctgcagtaagtcggcacgcatccctccccggttcatcaccgcaatgtcggctttcgtcactgtgcgaaaggcatcggtgaagtaattgcccagcgtgcagtcaacaaagctgccgttggcatcgtcacgcctcaaggcaacggtgctatgcccatcccaggcttgggcttgcttgtcaaactcggcacggatgacagccaatgtgtcgtcaacggcagtggttcctgcggcgaaagcaacaacagaatcacgagggacgaggtcactggtcatgtcgccgttggcattgattaccagccttccgaatgcgtggaaataagcccccgacgaggtccagagtactggtttgccgaggcggttgtagaggatggtatgggggatgacgctgtgcgaatgcccgtcgagcacagcatctatgcccgatgtgcgtgccacaaggctgggcaagtctttaattcccacatgggctatgaggatgacgtagtcggcttcctcgcgaagtgcctcgttgacatgacattgaagcagcgagtcgagtgctgtggagtagaatgtgtagagccagcggccaaggctgccttggaaaaaagtgggcgtggacagggtggggacatccggagtggtaataccaataaaagccaccttgcggttgccatagcgacgtatgtcatagctgggatagatggagtgagactggccgacactggagaaattgcagcacagaacccgtgctttcagttggctgactcgctgttgcagcgtctgcataccgaagtcgaactcgtggttgcccagtgtgacatagtcgtaacccacagcattcattaggcgcacaaggtaacttcctgaggaaacagtaccataaggtgtgccggaaaggtagtcaccgcaagacacaagggtgacattgggtgtgagctgccgcatctggtcgcggagagaagccataagcgggtagccctccacggcaccgtgaacgtcattgtcgtaaaggataacgatatcggaagtgtctatcgtctgcggctgagcaatggcaggaatccgtcctagcaaaagggcgaccaagaggatggtggtgagtgttctgcgtgtcataacggtcaaaaaaaagaaagacgtgctgccacattgcggcttcacgtcttattatgtcctttgttaatgccgcaccccactatctgacataataggtcagacgcatgttgatgctggcacgtttcttcttggatgtggtgttgaatgttccgccccaagagtagtcctcgtcagaagagttgggggcagtgatttggaacacgcccatgttggcagtctgcaggccacccagacgggcgccggcactcttggcgatggtctcggcacggttgcgggcatcggccgtggcctcggaaagcatctctatcttcaggtctgcaagcttggtataataatagttgagatagttgccactgatttgtatgcctttgtcaagcaactcggatatttcgcgtgagattgtctccaccttgtccacatcgctgctttccaccttgatactctgcctgagacggtagccaacaaaagtattgtagccgcgctgtgcctgctgatcccaatggtactcagtctccttgtcgcagtcaatggcatcaaattccatttcatctgccttgacacccttgcttttgaggtattcgcggacagtgttggaaatgtcttttatctgtgtgtagccctgtttcatgtcagtgttcagcacattgaaattgagcctccacacaatgaggtcggaagtaaagtcgcggtcggccttgcccaccaccgagacggtcttggcgtggccacgtgccttgttgaaatatttgccgcccagccacaccgccactatcgcgctgatgccgaggataagggcaattattattccgctgcgtttcatgactcttaaagattaataggccgggaaagcaatttcgcgttcaatgacctgataggccacattgttgcggtagatagtctggcgcacccagttgtcgtcctcgtcatactcgaacacatagctgtgtttccagttgaggtgctcgtcatagttgaacgaagagagctcaatgaggttgtcgtggtcgtcgtagtagtaggtggtgagtgccacgaggaagtcgtcggcatcgtagaaacgccactcaatgcggttgccatggctgtcgtacttgtagagatagcgctgcatcagctcgccgtcgcggtcgtagaactccatttcagtgttgttgccggctgcgtcgtacttatacacgcgcttctccgtcatggtgccgtcgggagagaagctctgctcttccacaaggcggtcgttctcatagcgcgaagtctccttcttggtcatatggtcgcccatgaagacggtgcgctcgatgcggttgccgttcttgtcgttgagataggcagtgcggccggtcagctccttggcgcggttgtactcgttccaacccagggcatagccgtggacgtcgaagtagtaggaataccaggtgtactcaccgtccttggtgcggtatttgtcctggaaattgccgcgcttgtcaaaggtgatggagtcgatgcaaacaaggcgacggccaccattgcggccaccatggatgtcgtaggtgtattcaatcacatagacggcattgccgttgatgcccatttcctgacgggacgatttgcggggcttgttgccggcaaaggcggtaccagccaccagcaacaccaatgataaaacgatgtatttcttcatgttatgaattattatacaatataaaagtcgttgcaaagatacaaatttttctttacataaaacgtgcatggctacaaattattgccctgccgaaccttttttctactttaaatccgagtctcaatatcgtacacacgtcccgaatttcgcttcaagattgcgtttccacgcttcctcatctacaacaaaaaaatgcttttttgagatgagttctctcttccagcgattggggttagccttgcctacaggaagcatcctactcagttcctttcggaaaaaggagttcaaagcactgtcaaagttcgtaaaacatacgtacaccacagggaggtctatcttctcttcgcaataacgatataggaaagtgtcacgaaacttgtacttaaggttgtcagtcaaccaagctgtatattctcgcttcacttgcctatccttatccagctcgtctttcatcttcaggattcgctcatgtgaatactcctttatctcgatccagagctgaaatgtggaaaattcggcaaggacatcaacggctttcatgggtgctccatggaatgtgggtgacgactttcccttctcgtcaaatttgtacaacgccaaggcgttggggaagtcaaagcggactctttcctcattcaaatccaacctcataagtcctccaagccttttttgatttcatcatccaatatccttgcgaaggtctcgtcaattgcattggggtacaaagtccccatttcattcgtagcattgtgacgaatcacccccgcatcatccttatacaaagtgtgatacagcacactgtcttcctgagttgttgccagttcgaactctttcaacaggacgtaatcatgcgttgcaatgaatatttgtacgcccattcgttgaagttccagaaggatctgaactacagtttgtgacaactgcggattgaggttggcttcgggttcatcccagaaaagcattgtccccttggtcaaagactcgttctgaataagcctataaagaagtcctaatttcctaaacccctcggccaaaagcgagaactccaactcgccagaggaatttctcatatagaaagtctcgtccttatcaatcacccgacccaacatggctttgttcaaaatattgagaagccggactcgctcagggctttgctttcctctgacgatggggagaaatgccttgtctaaaatatccaagtaaacctcctcgaaagccaatttcttttggctgaacagagagcggaagccaggcgcattggctaacatatcctttacagggataaaaatggattctgcctgattctcttctttccaaagactgtggctcacagaagtcttattgagagtggtgatgtcgcaagtgatggacctttcttttgtttcacctacgttccgcctgtaaacaactacgcggccagagcctctaccctgtgagcggtgaaccaatcggccaatgctgcgaggcatgaacactccattcaatttttgagcaaaagaccggtcctcctttttattcatcaccgagcaagccgaatacagaaccttcatcaaatgagttttacccgtcccatttttgccaatgaaaatattaactcctgacgagaacgagacatccaactctgtaaacaccgtgaaatttgatgccttaaatcgagttatcatatagtcactttttattaattataacactaaaacgctttcatttcatctgggtattgttgtactcactgaaaaaacaagtacgtatcccggtttgttgtttcatgatcgcactggccggcacagctttttattgttccttgggttccctcttccttgtccagaaaaagaagatggcggtggcaagcagcatgattgcggcgccgatggtgtagcccagccagcgcgggataaaggaacccaagccctctttctcggccacaaagaggaaacaccccgtcaccatggtcatgaacatggcgggcagcagggtgataatgtagggcttatgcctgtagcacagatacaccgtgagcgtccacagcgtgacggtggccagcacctggttgctccatgcaaagtaacgccaaatcacatcaaagcctttggcatcaataagcgaatagaccaacacacctgcggtcacggcaaagatgggcagtgccacaaagaggcggttcttgacaggtttctgctcgtagtgcaggaagtcggccacaatcaggcgagcggaacgcaaggccgtgtcgccactggtgacggcggcactgatgacacccagcacacagatgacggcgatgaccttggggaaccacgcattggcaatcacacccaccatggcattgccgcccagcgtggcacccgtctcaggattgacggtgagcagctgcagcatcgggtcgtggtagaacaccgtggcggcagccgcccagataagggcaaccacaccctcggtgatcatggcaccgtagaagaccggacgcgcctgcttctcattggtcatgcagcgcgccataagcggcgactgcgtggcatggaaaccactgatggctccgcaggcaatgctgatgaacatcatggggaatatcgggttatgggcggcatcgggatgctggttctgcaatccctgccacacctcgggcagcgccggacgatagacaatgaatgccaccacgatggcaagcgccatgcccagcagcaggaagccgaaaacagggtaaatcttgccgataagcttgtcaataggcagcagtgtggcgacaagataataggcaaagatgatacccacccacaggaacacattccagtccggggtgaagttctgattcagcagcacagcgggggtattgacaaacacggcaccgacaagaatcatcagcagcaccgtgaagatgcgcataaactgcttcacgccgttgccgagataggcaccgtgaatctccggcagcgaggccccgtccctgcggatggagataaaccccgcaataaagtcatggacagcacccgcaaagatgctgccgaagacaatccacagaaacgacgccgtgccgaactgcgcacccataatggctccgcagatgggaccgacaccggcaatgttcaaaaactggataaggtagatgcgccacggcttcatcggcacataatccaccccgtcggggtgcgccacagcaggagtgacccgtttcggatccaccaccaaaactcgctcgataatcttggaatacaccaaataaccaagcactaaaagcactattgcaataagaaaagtaaccataacttaatctttttttcgggttgcaaagatacgattttttttgaaaatctctattttcatgattcaaatcccaatttttcttcgtatctttgccaaacgaaatcaaaataatcattttactatgaaaaaaacattattaattgtcgcaatggcagttatcatggccactggagcctctgcccaagaaacaaaaactccaactaaaagtcagttcaccatcaacacgcgtgcatggtcatccaactattggaccaccctgctctacaacatcgcacgcgatgctgtgacctatcttgtcttcgacaacaatcccgctattgaggccgctatccccagcgccgacctcgctttccccatcggcatgggcaaagagggatttgctgatcctaacgacatctatggtccctaccaccgtgccttcggaacacctttcaaacgcctcggcgacttcagcataggtctcgatgcctcctgggtgccctcggttgtaggtgtctatgccggtgcctactacaagagccaggaaatatgcttcatggccaacgaccagaatctgcgcggcaactacttccagccccgtgccggactcgttattggcggtaagagcaccgccctcgaggctggtgtcttctacgactacaccgtcggctgcaccggcacctcgcaggttttcggcactcccaacaaagacatgattgcaagcggcttgggtctcgactttgccatctcctacgccaacaaggccaactcccgcaaagtcctgctcatgttctccatgcccctccacaacttcctcaacgaagactacaccggcggcatgctgaaaggcaaggtacgcaaagtaggctacctcatgctcacccaccgcatcatcttctaatcccataccggatatcacaacacaagcccgcgcaccccaagcgcgggcttgttatttttcaaatccaatccacaacaagtcaaagaccactcgacacccgccccgcgccgccccacccgcagcagttcacgttttcggccgcaaagatacaaaagtctcctgcaacgcatccctcaacttaccgatacttacgcaaagagcacgcaaccccctcatctccaaccctcatttttttcgccaccgccgacaaatccccctctcaaaccatacacaaattcaaaaaaaattcgtatctttgcaaactcaaaagagggaatgcaagccattcacaaaacaatgaaccctacgcaaagcgcagggttccagaaatcttcggcttatagccttattgtgaaaagcttaaaaagatgatgcaaagataatgattatttttgaaacaacaacattatgagccaaaaaatattaggaatagaccttggcaccagttcgttaggaatcgctgtaagagacacagacctcggcaaaaacattgccgagcagttggaatattacacgtccataatttttccttcaggggttggaacagacaaaagtggggaatattcatacgccgccaagagaaccaaattccgttctacaagacgactctatcaatcacgaaaatacaggatatgggccacactgcgcctacttattgagcacggatgctgtcctttaaaagtcgaagaacttgaccgatgggctcggtacgacaaggaaaaaggcttgaaacggcaataccccatcgatgccgaggtgttcgaacaatgggttaggctggacttcaactgcgacggtatgcccgaatacaaaagcccataccaacttcggaaagaactcatggagcatgaactggattggagcaaacctacagaccgctacaaattcggacgtgccatgtaccacatagcccaacgtcgtggttttaaaagcagcaagggcgaaaccctgaaagaatccaaggagaacgcagatgttgacaccatagacatcagcggtgagatgaagaaatcggaagaaaaaacatcccacaagttgagcgaatacatgaccgaacacaacctcccaactgcgggatgtgcttttgcaagactggagcaagaaggtgttcgcgtgaggaacagcgagtacaaagctgtgcagtcacaataccgcgatgaggtggataagatttgcaaataccagcatattgacgagattgcaccagaattacaccgaagcctcatcagtaccaaaaagggagaaggcacaatcttttaccgccgcccactgcggtcgcagaaagggctggtggggaaatgcacactggagcctactcatcgtcgctgccccattagccatcccgacttcgaggaattcagagccttgtcgtttatcaacaacatcaagtaccgcctaagcgccgaagaagaatggaagaccctaacagcggacgaacgtcaagagcttttcgaaagccttttcacccgtgccaatgcaacattcaaatttgaggacatccgcaaatggttggagaaaaagttccagtcgtcgcatcttgattataacaaccgaaccatcaactaccgagaccacaccactgtggcgggatgtccagtaatcagtcgcttgaagaagatattgggtgacaactggcgttccagcacaattgtcacagagaaatcacgcaccaacttccacactggtgaagtccacaacgttagttacaattacacagacatctggcacctggcgtactgcagcgacgatttcgaggaactggctgaattctccgagaaacagatgaggcttaccaaagagcaatgcagtcaaatgacaagactatggagctccatccaagaagggtatgcctcgctcagccaaaaagccatacacaacattttgccattcctccgcaaaggcatcatctacagtgaagctgtagcctttgccaagatacccgacatcataggacacaaccgatgggagcagcagggcaacgacatcatggagggattacggcaccatatgcaagaaaacgagtaccgccggatgatatacggtatcaccaatacccttatcgccaactacaaaacaagagtacttgatgaacaagaaagccgacacaacaccgactacatacttaacgacacagacaaagcagaaatacgcagttgcatcatcgaaacactcagcgcaagtcgatggaataacctttgccaacaagaaaaagccaacctacaacaaaatgtagaacatctctatcaacagttttttgcgagttccgagaaagaatacctcaaactaccccgtcagagcgatgcgatgaagtcatatatgatggagcaatttcccgatattgacaaaaagctgtgggacaccctttaccaccattctcaaatagatatgttcccccacggaaaagagatgacagaagaggtggatggaagaataatgcattacttccaactgggcaagcccgatataggggcaatcaagaacccagtggcactacgagccctacacgtcctccggcgggctatcaacgaactgctgaaacatggcattatcgacgagacaacccgtgtggtggtcgagaccgctcgggagatgaacgatgccaattggcgcaaggctatagaaatgtatcagaaggcacgtgagaaagagaacgatgcaataatcgatataatcaaagaattccgtcccaactacaccgatgccgacatcgagaaaggcagactgctatttgaacaaaacattgttcctcaggccacaagaactcaaagagaaaaagccgagaagtttgcccttgacatgcaaaaatacaaactctggcaagaacaaaaattccaatgcctgtacacaggaaagttcatcagcctttctgacctttttgcagacaacacggttgacatcgagcacactataccacgaagcatctccttcgacgactccttggcaaatagaacagtgtgtgacgctcacttcaaccgttctgaaaaagggaatcacattccttcggaactatccaactacgaagacatcaaagaccgcatcaaaccatgggaagaaaaagtaatacacattaagtcacagattgagctatggaaaggtaaagccaagaccgccgccacgatggaacgcaagaacgaatgcctgcaacagaagcacctgtgggaattggaaaagaactactgggaaacaaaactcaacacatttactgtgcagaaagacgacctcgacctcggtttccgcaacagtcagctggttgacactcgtatcatcaccaaatatgcctttcactatctaaaatccgttttctcccgggtggatgtacaaaaaggcagcattaccgccaacttccgcaagatccttagaatacagagcgcagacgaaaagaaagaccgccagaaacattcgcaccacgcaattgatgccgccgttctcaccatgatacctcccgcagctcaacgcgacagaatgctggaacttttctatcaactgcaagaggccgacaacatggaaaagggtgccatccaactaaggctagagaaagaggtgaactcatgcagcattggaaccatcactggactagtggactccattgaacagaacatcctggtcaaccatatctccaaagaccagactcttacacccgccaagaaacccagacgcaacggaaagcacataatcaaaggacaatggttacagggcgactccatacggggcagtctccacaaagacaccttctatggagcaatagacaacgacggggcaaaacgcatggttgtgcggaaacaactgaaagatcttggcgaaaaggacatccaatccattgtttccaaagccgtggccgatgctatcgagacccaagtcaagcaatacatggccaacgaaggtatatctttcactaaagcattagagaaagactttttcatgcttgacaaagacgggcgccccatttcacacgacaagaatgggcgtccattgctccccatcagacacgtgcgatgctatgccaaggccgggcgtggagaactgggatatgacactgtgctgaaaataaagcaacagacctaccaatccaagcatgagtacaaaaacctgtactatgtgcagaacgacgacaactacctttgcctttattatgaaggatatgccaaagggaaattccaacgggcgttccggctggtaaactatttcgacattgcccaattgcaaccacaaagtgtatcggaattggtttcagaacccgagttcgccacgtatgagaaaaacgcaaggatgccactcacagccatcattaagaagggggcacgagtacttctatacaaaaacatccccgaagaagtccgcgaccttgacaaagagaaattaagcaaacggctctatgtcgtttacaaattcaatgttattggaacaccttacatatatctcagacaccacttagaggctcgaaaagaaactgactgcgacacaaaagatagcttcctctcccttaaagcatctaacttcaaagccctgattgagcattacgatttcgaagtggatgttttgggaaatatttacttcaaatagcgacacccaagctgcacgacacaataaacagacccatttgccgttacctcataaatagaaaggaatcacacgatgacagcaacacagctaaacacaatgaacacggagctctggcagagcatcggagccattgccgataacgaaacactcatgcgccgcctcacacgctatgccaagcgtctggtcaaagagaaagaggaccccacacatatgaccaaagaggagttcttcgcccatgtggacgaggcaaaaaaggaatatgaagaaggtaaattcaaatcattcaacaacctcgaggaaatgaacgcctggcttaactcgctctaatcatgtacaccatcaactatacccaacgagcccagtctgactttatcaaactgaaaagaaacgagccttcaagtttcaaaaaactaatcaaactcctcaacgaacttgccgaacatccccgtactggcactggacgtcccgaacagttgaaaggtgaccgaagcgggcaatggagccgccgaatcactgaaaagcaccggcttgtatatgaaatccacgacaccgaagtggtagtgttggtgcttacctcctacggccattacgacgagccatgattaaacgcacactctgtttctccaacccggcctacctgtccatgcagaacaggcagttgttggtgcgactggaaaaacaaggctctgaacccgagcgacagaccaccatacccatcgaggatatcggcattgtggtgctcgacaacccgcaaatcaccctcacccacggcctcatggccgccctgctcgacaacaacgcctccgtcatcacctgcgacagccaccacatgcccgtggggcttatgctcccgctcgaaggccataccgtgcagagcgaacgtttccaagaacagctgtcggcctccctgcccctgcgcaaacagctatggcagcagaccgtgcaacagaaaatcctcaaccaagccgccctgctacgcgaactgcacggtgccgaaacaggcaacatgacatcctgggtcgctgaagtgcgctccggcgacagcaccaacctcgaaggccgtgccgccgcctactactggacccaactgctgcccgacatacccggtttcacccgcaaccgcgatgggatgtaccccaacaacttcttcaactacggctacgccatcctgcgcgccgtcatcgcccgagccttagtaagcagcggcctcctccccaccctcggcatccaccaccacaaccgctacaacgcctactgcctagccgacgacatcatggagccttaccgtccctacatcgaccgtctcgtcatacaaaccatccgacagttcccccaaaccgccgaagtcaccaccgacatcaaacgctgtctgctcaccatccccaccctcgaggtgcacatcggcggccaacgcagccccctaatggtggctgccagccaaaccaccgcctcccttgcccgctgctttgctggcgagagccgtaaaatctcctaccccgaaatgtgatggaccgctttagtgaataccgcatcatgtggctgcttgtattcttcgacctgcccaccgacaccaaaaaggagcgcaaagccgccgccgacttccgcaaacaccttctggccgacggattcaccatgtttcagttctccatctatgtacgccactgtgccagccgcgaaaacgccgacgtgcacctacgtcgcgttcgctccatgctgcccctctatggacaggtgggctgcctaaccatcaccgacaagcaatttgccgacatagaactatatgtctgcaaaaaagaagtgccgcccaacgcccccggccaacagttagaactattctgactccattcaaccaccacgagaaaccttcctttggaacttaggataagaaaaagaacctatacaaacaaaaaatcccgcctgttagagcgggattttttagaccattgacaggctattaaacattgttcttcaatcaaataccataatcgtgttgtttatcgattatgtcaatgttctcttttcaagcaattcacaactttacggggggagcgcagcgcgcgcccacgttgtttatcgattatgtcaatgttctcttttcaagcaattcacaacttcggacatagcaagaaaaactgcaaaaagttgtttatcgattatgtcaatgttctcttttcaagcaattcacaacgaagagttttttgacttattacttttgaaagttgtttatcgattatgtcaatgttctcttttcaagcaattcacaacgctatgccgacaccacggcggggaacaaaggttgtttatcgattatgtcaatgttctcttttcaagcaattcacaactgttggagttggaacggactgagttggatggttgtttatcgattatgtcaatgttctcttttcaagcaattcacaacttcagaattttattccaaagcttctcttttgttgtttatcgattatgtcaatgttctcttttcaagcaattcacaacaaggtgctgataatttctaccttacacttggttgtttatcgattatgtcaatgttctcttttcaagcaattcacaacaggtatcggtagagttcaaggtgctatgcagttgtttatcgattatgtcaatgttctcttttcaagcaattcacaaccaaagcagatggcgcagcgcatacgcaaagttgtttatcgattatgtcaatgttctcttttcaagcaattcacaacggaccttcccatgttcgctaagaatatgggttgtttatcgattatgtcaatgttctcttttcaagcaattcacaacgcaggggtaacaagctgcgcgaccagggcggttgtttatcgattatgtcaatgttctcttttcaagcaattcacaacgaaccatctcgttttatttttcgatgcaaaggtacgattttttttcggacagtgccaaatttatttttcaaggtgttgaaaaaataaacactttacttttttaatacccatgaaggtatggaggtatctggttgcttatcgattatgtcaatatcactaaagtttgaagagtataaccagtcgttgatgcaaccatcaagcgtcgtcatttattcgatcgttattcgatcgttttcctatcgttttccctttcacaaagggagaaacgagggaaacatatcggaaaacgatatgatgaagaacgacgcaacatcgagcccggaaggcacacagaggaacgttggggacaaatatgcgacactatcggaacactgaggaaagatggcgtaagacggcgtaatatctcacagaataaaaagtaacttccgcgcgaagcggcaaatgtctcaccgaaaagctgtattggatgggaataaagaatggaacttgtcaaactttagtcaatgtaataattcggagtatttggagtgttctgaattatcgattatgccaatgtgctcttttggggtattgggagggttcggaattttctgagttttcggagggttctgattattctgattactctgattgttctgagtttactggttattcttgctattcctgtagtttaggcgggtttgatacatgcgttcttttatgccgccttcggtcacgaagcgggtctgcatggtggccagcagcttgtggagcatatacgttgcctggtggatgagggtgatgcagaggttggccagctcttcggcattcatgcgctggatattggcggcatagtcttgttgtatctgacggcttcgcgcatattgcctcatcttctcgtaccgcgggtgtcgggcatcccattgcggcaggttgcgcacacgcagatagtcttcgtagtcgttgagcagctcttcaaggctggcttttgccacgttggtgagcttgatttcggtctcggaagaggtggcggcagcctggttgccttcggagatattttgcttgccactgcgggcagcctgtatcatctggtcaacggtgcggtcgcctttttccagatagtgctgggtgaaatgataggtgatgtcgtagatgatctcggtaacttgataaacgcggaggttgcggtagtggccgtgttggggtaggaaggtggtgggaggattcggagatttctgagaattctgattattctgattattcggaatattctgagtattcggagtattctgaaaattctgattattctgattattctgattattcataaatttaagactttagagttctacttcttggcggaagtagggtatctctacgcgtttccagcccaggcggttgagggtttctttgaagtgtatctgcgtctgttcctcgccatggacgataaagagctgtttaagtttcttcttgtcttgacagcctatgtagttgatcatctcgctgtagtcgccgtgaccggagagggactcgatgcggcgcaattcggcacgcacttcgtacctgtggccaaagatagataccgtctcgtcaccccgcattatcttggccccaagggtggtgggttcgcagtagcccacgcatagaatggtggtggaggggtcgtcgatgtggttggccagatggtgcttgacgcggccggcttccatcatgcccgaggcagagatgatgacgcagggtttgtggcgcacgttgagagccttggaagcctctactgactggatatactgcagacggtcgaacccgaaggggtcggggtcgtgcttcatgtattccaggattgacgggccaaagcactcgctgtggaggcgcatgatgtttgtggccgacacactgagggggctatcgacaaagacatcgatgtcgggcagcagattgacatgctccagacggtcgagggcatatatgatttcctgtgcgcgtcccacggcgaaggaggggatgataagcttgccttttttcttggtgcaggtgtcgagcacggccataagcagttccttttcggcatcctcgatagtggtgtgcaggcggtcgccataggtggattccatgatgaggtagtccacctgcgggaacggctcggggtccttgaggatatgcttgtcgtaacggcctatgtcgccggtgaagcccagcttgatggtgcggcggccgtccttgatttcgagatacacacagctgctgcccagaatgtgtccggcatcgaagaactgcacggttacctcgccttcgatattgaagggcttgtggtacggcaccccgataaagcagctcatgcagtcctgtgcgtccttctcggtgtagataggctccaccggttcctgcccgaggctcttgcgctttttgttaaacgtatgggtatcggattcttggatgcggccggcatcagccagcatgatggcgcagaggtcgcgcgtggcgggcgtgcagagcacggtgccacggaaccccaaggtatagatataagggattagtcccgagtggtcgatatgggcatgggagaggatgaggtagtcaatctcggcggggtcgaagccgaggtcgcggttcatggcatcggtctccagacccttgccctggtacatgccgcagtcgagcagtatcttcagtcctttttttgtcgtgataaggtgtttgcttcccgtcacctcgcgggtggcgcccatgaattgcagtttcatatcgtttacttaattatttatgtttcaacaaaagccgtcacatagcaagaacgactacaaaaagcaaagatacgtatttttttccaaatgggattttttttctatctttgcactcccacacagggcagccacatggacaccgaacgcacatatatcgccatcgacctcaagtcgttcttcgcctcagtagagtgcgtggagcgcggccttgacccgttgaccaccaatcttgtggtggccgatgccagccgcacgcagaagaccatctgcctggccgtgtcgccttcgctcaagcaatacggcatcggcggacgggcacgactcttcgaggtggtgcaacggctgcggcaggtgaatggcaagcggcgtgccgcgctgccctcccggcggtttgccggcaagtccatctccgacaccgagctgaaagcccaccccgactgggaggtggactatatcgccgctatgccccgcatggcttactacatcaagtacagcacccgcatctacgagatttacctgaaatacatcgcccccgaggacatccatgtctattccatcgacgaagtgtttattgacgccaccgaatacctcaccctttacaacgtcaccgcccaccagctggccatgaccatgatacgcgacgtgctgcggcagacaggcatcaccgccaccgcgggcatcggcaccaacctctacctctgcaaggtggccatggatatcatggccaagaaacagcccgccgacgccgacggcgtgcgcattgccgagctggacgagatgagctaccgccgccagctttgggaccaccagcccctgaccgacttctggcgcgtaggacgtggcattgcccggcggctggccaccctgggcatcgacaccatgggcaagctggcgcgctattctgtggagaacgatgaggtgctttaccagcttttcggggtcaatgccgaactgcttatcgaccacgcctggggctgggaaccctgcaccatggacaagataaaggcctaccggcccgagagcaactccttcagcaacgggcaggtgctcacctcgccctacacctttggcaaggcccgcatagtggtgcaggagatggccgacgccatggcgctggacttggtaaaaaaacggctggtcaccgaccagctggtgctgggcgtgggctacgatgccgagagcctttccaatcctgccatccgcgccaaatacaacggtcctgtgcatgtcgaccactacgggcgcactgtgcccaagtcagctcacggcagcgccaacctgccatgtcccagttcctcgtccaaacttattaccgaggccgtcatagagctgtacaaccgcattgtcaaccccgacctgctcatccgctacctcaacctcaccaccaaccatgtaatcgacgagcaccgtgccgccgagcagcaggtgccgcagcagctcgacctatttaccgactacgaagccctggagcagcaacgccaggccgacgccgacgcccgcgacaaagaacggcgcctgcaggaagcccgcctgcatatcaaggaacgcttcggcaagaacgccatcctcaaggggctcgacttcgaggagggcgccaccacccgcgaccgcaacaaacagataggaggacacaaagcatgacccacgactacgacgacatcatcaacctgccgcaccatgtgtcgcaccgccacccgcccatgtccctcgaggcgcgtgccgcgcagttcgccccctttgccgccctcacgggccactatgccgccatcgacgccactgcccggcgggtggccagcaaagagcagctgcgtgctgtggccgacgagtatgcaaacgactataccgacatgctgtccgacattcagcccgacaacgactgacgtcctcggcaagaaaaaaattctctatatgttatatttttcgtacctttgtatattctaccgcatgcggaaattttttgtaagtccgatataaatcaacatataacacaaagaaaccatggcactgaagagagtaatggtcctcaccggcggcggtgactgccccggcctcaacgccgtcatccgcggcatcgtcaaacgtgcctcccaagaaaaggactgggaggtcattggctgcatcgagtccttcaacggggtgctgcgcgagcccaccgaaatagtcgagctgaatgaaaagagcgtggaaggcctgcagatacaaggcggcaccatcctcggcaccaccaacaagggcggcccctttgcctggcccgtgcgcaacagcgacggcacctggactaccgttgaccgcagcgacgagatgatacgcaagctacaatacctcggcgtcgatgccgtcatcaacatcggcggcgacggttcccagcgcatctccctcggcctggcacagaaaggcctccatatcgtgggcgtgcccaagaccatcgacaacgacctctcctccaccgactacaccttcggtttccagaccgccgtgcagatatgcaccgaggccatcgacaagctggtgaccaccgctgccagccacaaccgcgtcttcatcatggaggtgatgggccgcgatgccggctggatagccctgcactgtgccatcgccggtggcgccgacatctgcatcatacccgaaatcccctatgacatcaacaagataaaggagaagatagagcagcgctacaacaaacgccacggctactgcatcatcgtggtggccgaaggagccaaacccatgggcggcaccaccgtaggcgctgaaagcagcgaagtgggctaccagcacatacgcctgggcggcatcggccaccagttggctgccgacctcaaagccgccggcgtggagcacgacatccgctgcaccatcctcggacacctgcagcgtggaggcacacccgtcgccttcgaccgcatcctggcctcccagttcggtgtccgcgccatggaggaggtcatccaaggcaacttcggccagatggtggcctaccgccatcccgacatcgtggccgtgccgctcgaagaggccgtccgcgcccagaaccttgttgaccccaacggtcagctggtccacaccgccaaaggcctcggcatcgagttcggtcagagcgatccctgttgacactattgaataatcattgaaaaacaatatcatgaaaataatgaaactcatccttgccacggccatcgtggcactgaccgcagccagctgctgctcgaagagcaatgcccccaaggcgctggtgctctattattcactgacaggcaataccaaagccgtggccgaagagatagccaaccgcctcggtgccgacatcgaggagattgtctgcgtcaacccttacgacaccaacttccaagcctgtatccaacgctgcatgcaagagcgtgagcaaggcgtaattcccgacatacaacccgtaaaagccgacctcagccaatacgatgtcatcttcttaggctaccccgtctggttcggaacttacgcaccacccatcgacaaataccttctcaccgaagacctcagtggcaagaagatagtccccttctgcaccttcggcagtggtggtctggagtcaagcactgccgacctcgaaaccgaagagccctttgccgagatactgccaggctatggtgtccgcgccgcccgcatggatgccatgcccaaggaggtggagcaattcctgattgccggaggcttcatcaagggcgattactcgccgcttgcggacttccccgagcaacatgaagtgtccgccgaagaggccgccatcttcgacgccgccgtcaacggctaccccatgattcacgcccaagccacgaccgtagcctcccgcgccctgcccaacggcaccgaatacctcttcaccgccgaggaccttccccgcgaggacaagcccgacatgccccccgccggtaagctgcaggtctatgtcaccgtcgccaatggccaagcacccgtcttcaccaaagtaatccgataaaagacatccttatcattcattatcaccacctgtccgccggccttatagaagccgacggacactttttatacccgctcagcggctgacaatctttctcttcttcatgcatgcccaagtgataaaacatcacccaaaagaaaaaaaacactatctttgcaccctcaaatatcgcaaagaaagcaacacaaaaatcgctttatattactaactataaatagattaaacaccacattatctttccctatcaccataggcaaaagagaaaaaaacacaatttatcgtcttaaaataataaaaaaaacactatgcacaacaacaataaaagggagtacacctctcccgaaatggaaatcctgaacgcccgcgtggagcgcggcttctcggggtcaaatccctcgaccgatccaatcaacaacccctctggcaac

SEQ ID NO: 3962 - DNA, 22534 bp, synthetic construct
  source 1..22534: mol_type = other DNA
  misc_feature 1..22534: note = Synthetic
ggttgaacgaatagttctcgccgttcaccttgaaaggtgtgtttgtgcctcctatgcccgtcatcgagctcgaggcctccaacatggtggtgtgggtgtggctgaaccggatgttgaaccggttgtcgctgttgattatccaatccaaacgggccagcagtttatagtccgaagcatcgaccgagtagttctcataagccccgggatcatagccatattcatttattaaataattccttatgctgtccatcctgccaacggtaggacggttgtaaccgttgcctccccactcgctgttctcgtcttggcgggcctgtgccgtcgctccctgcacccgctcgggcgtatattctgcattcaggaagaagaacagcttgtccttcactatggggccgcccagcgtgaaccccgtcacattgttcagcgcactggcttgcgacaactccacattgcccagccgcctaccgctcaggccgctgctggtatagtaatcgtatacagagccatgccactcgttgccgccctgcttggtcaccatattgatggctccgcccagaaatccactctgtctcacatcaaacggcgtaatgcttatcgacacctgttctatcgcatcgagcgacaacgggttgcctcctgccggcaggctcggacctatgccgaatgcattattgaacgacgctccgtccaccgtcaccgccgaactgcggtaattgccgccacccacagtaaaaccagtgcccgaggctgtcccctgcggggtcaaacgcatgatgtcgttcaaactgcggcttacggtgggcacagccatgagtgccctattgtctatatgtgtggcaacacccgagttctgcacatccatgcccgaattggctgcatcgtcgcttatcaccaccacatcgagcgtagtggccgacaccggcaactcaaaatccacctcaacattgtcgcccagcggtgccgacacattcagccgttcggcagccctgtgtccctgcatctctgcctttatggtataggggcctcccgccaccactccgttgatgcgatacatgccgttggcattggtcaacgcgtggtaggttatgcccgatggcgtatacactgccgtgaccaaagcgtcctgcagcggcccgtcaacatcggccacccgtcccacaatagacgaagtggtggtctgagcccatgcgggcaacgaaatcaataatcccacaaaaagtgccaaaatggctcctactctacttttcataacaattctaatacaacaataattatttataaaacacaatataacaattaattatccgtatcacccgtaccacgggaaaggtacaaaggtacaaaaaataacctatatcaccgcaagcgattcgggaattaactattattaaaaaactttggcatttttcggcacaacgatgtgcctccctcaatctgccatttctggataacaagttgtttgaacgttttctgtcaccctgaaagacaacgaacggataacgggcgaaactcgaacggctgatgaaggcgttaatgggaaagaacaacgacaccagagcgaagctccgatgacgttgtaaatgatatgccgcgatgcgacaccggcggcaaccgtgttatcggttgccgccggagttccggaacgcaccatttcccgaccctctacggcgttaccgcacacggatgcggccttctggccgcatatactggtcaccgattataaaatcaagatagtcataaagatataccaacaatgctttcgtgtggctacacacagcggcgtcgatgacccggacaccgttgaacacatgaccgttgccatggtggagaaggatatagtcggtgcctgccacacgatagatgcgtttgggtttaagtggttcgtagcagcgtttcctggcattccacacctgtacgttgcatacacgccgtttgacctccacacggaagagaaagccgtttttgtcggtgaccacagggctatttactgtagggtcaatttcgtagataagtccggaaacatacaggaacccaccaccgattgtaggccaatggcggcagcccatctccaacgcatcaagcagagcctgacccgtcatttcgacaagacatagcttgttccgtaatggcgccaccgcccagaagtcgccttctgtcaggtcgccctgcagaaggtcggcacgcatacctccacgattcatcaccgcaatgtcggcttttgctacagcgcgaaaggcatcggtgaagtaattgcccagcgtgcagtcggcaaaactgtcgttggcatcaacgcgcctcaaggcaacggcactgtgtccatcccagaaatgggcttttttttcaaactcctggcggatgacagccagcgtgtcgtcgacggcagtggcacttgcggctgatgcagcgacggcatcacggggaatgaggtcactgtttatgtcgccgttggcgctgatcaccacccttccgaatgagcggaaataagcccccgacgaggtccagaggacggctttgccaagtcggttgtagaggatagtgtggggaatgacgctgtgcgaatgtccgtcgagcactgcatctatgcccgaggtgcttgccacaaggtgtggcatgtcatcgatgcctacatgggccaaaagaatgacatagtcggccccattctgccgcgcttcatcgacgcggcattgcaacagcgagtcgagtgcggtgggatagaaagtgtaaagccatcggcaaaggctgcctcggaagaaagtgggcggggacaaggcggggacatgaggggttgtgagcccgataaaagccactttgcggttgccatagcagcgtatgtcatagccgggatagatggagcggttctgaccgatacaggagaaattgcagcacagaaccttggcggtcagttggccgacacgctgttgcagcgtctgaaggccgaaatcgaactcgtgattgcccaatgtgacatagtcgtaacccacagcattcatcagccgcacaaggtaactacccgaggaaacggtaccatagggtatgccggaaaggaagtcgccgcaagacacaagggtgacattgggtgtgaactgccgcatctggtcgcggagagaagccataagcgggtagccctccactgcaccgtgaacgtcattgtcgtaaaggataacgatatcggaagtgtctatcgtctgcggctgagcaatggcaggaatccgtcccagcaaaagggcgaccaagaggatggtggtgagtgttctgcgtgtcataacggtcaaaaaaaaagaaagacgtgctgccattttgcggcctcacgtcttattatgtcctttatttatgccgcaccccactatctgacataataggtcagacgcatgttgatgctggcacgtttcttcttggatgtggtgttgaatgttccgccccaagagtagtcctcatcagaagagttgggggcagtgatttggaacacgcccatgttggcagtctgcaggccacccagacgggcgccggcactcttggcgatggtctcggcacggttgcgggcatcggccgtggcctcggcaagcatctctatcttcaggtctgcaagcttggtataataatagttgacatagttgccactgatttgtatgcctttgtcaagcaactcggatatttcgcgtgagattgtctccactttgtccacatcgctgctttccaccttgatactctgcctgagacggtagccaacaaaggtattgtagccgcgctgtgtctgctgatcccaatggtactcggtctctttgtcgcagtctatggcatcatattccatttcatctgccttgacacccttgcttttgaggtagtcgcggacagtgttggaaatgtcttttatctgtgtgtagccctgtttcatgtcagtgttcagcacattgaaattgagcctccacacaatgaggtcggaagtaaagtcgcggtcggccttacccaccaccgagacggtcttggcgtggccacgtgccttgttaaaatatttgccgcccagccacaccgccactatcgcgctgatgccgaggataagggcaattattattccgctgcgtttcattactcttaaagattaataggcggggaaagcaatctcgcgctctatcacctgataagccacattattgcggtagatggtctggcgcacccagttgtcgtcctcgtcatactcgaacacatagctgtgtttccagttgaggtgctcgtcatagttgaacgaggagagctcaatcaggttgtcgtggtcgtcatagtagtaggtggtcagtgccacaaggaaatcgtcggcatcatagaaacgccactcaatgcggttgccgtggctgtcgtacttgtagaggtaacgctgcatcaactctccgtcgcggtcgtaaaactccatctcggtgttgttgccgctggcgtcatacttatacacacgcttctcggtcatggtgccgtcgggggcaaagctctgctcctccaccaatcggttgttgtcatagcgcgaagtctctttcttggtcatgtgctcacccatatacacggtgcgctcaatgcggttgccgttcttgtcgttgaggtaggcggtacggcctatcaattccttggcgcggttatactcgttccagcccaatgcatagccgtgaacgtcgaaataatacgaataccagatgtactcgccatccttggtacggtatttatcctggaaattgcctcgcttgtcgaacgtgatggagtcgatacagataaggcggcggccaccgttgcgaccaccgtgaatgtcgtaagtatactcaatgacatacacggcattgccgttgatacccatttcctgacgtgatgatttacggggcttgttgccggcaaaagcggtgcctgccaacagcaagaccaacgataaaacaatgtatttcttcattttaaccaatatttttcaatacaaaatatgttgcaaagatacaaatttttctttacataaacgtacatatctataaaatattgcaccaccctcccttttttctacttaatagtcacagttgccagcttaataccgcacacatgttccaaatttctgctccagatttcgttgccaatcaccttcgtctactacaaagacatgattctttgcaatgagttcttttctccatcgatttggcatgaccttgccagttgggagctggtttatcagttgcttgcgaaaaaaaatgttcaaagcgtggtcgaaattcgttaaacacacgtacaccacggggaggtctatcttctcttcgcaaaaacgataaaggaacgtgtctcggaatttatacttgaaattgttgaccaaccatgttttatggtggagttctccgggtttccctttatctcgttcgtccttcatctcttggatttcctctggagtatactcctttatttctatccacaactggaaagtagggaattccgcaagaacatcaacggctttcatgggcgccccatggaaagtgggagacagccgttccctctcgtcaaatttgtacaacgccaaggcattgggaaaatccaaacgaacccgctcttcttgcaaatccaacttcataaatcctccaggccttttctgatttcatcatccaatattcttccgaaggtctcgtcaatagcattggggtatagacttcccatttcatttgtggcattgtgacgaataatcccggcattatctttatacaaagtgtgataaagcacactatcctcctgagtagttgccaattcgaactccttcaacaatacataatcgtgtgtcgcaatgaatatttgaacgcccattcgttgaagttccaaaagaatctgaaccacggtttgcgacaactgtgggtttaggttggcctccggctcatcccaaaacagcattgttcctttggtcaaagtctcattctgaatcagcctataaagaaggcctaatttcctataaccttcggccagaagggagaactccagctcgccagaggcatttctcatatagaaagtctcgttcttttcaaccactcgaccggacatggcattgttcagaatgttgagaagcctgacacgctcggggctttgcttccccctgacaatgggtaaaaaagccttgtcgattatatctagatagacctcctcaaaagccaatttcttttgactgaaaagtgagcggaagcctggagcattggccaacatatcttttacaggaataaaaatagattcggcctgattatcctctttccatagactatggctcaccgaagtcttattgagggttgtgatgtcacacgtgatagtcctttctttggtttccccctcgttacgccggtacacaactacgcggcctgcacctctaccctgagatcggtgtaccaatcggcctatgctgcggggcataaacaccccattcaatttttgagcaaaagaccgatcctccatcttattcatcacagagcaagctgaatacagaactttcatcaagtgagtcttccccgtcccgtttttcccaatgaaaatatttatacctgacgagaaagagacatccagctctgtaaacacagtgaaatttgatgccttaaatcgagttatcatagagccacattttttgtttaattacctaagactacgacacatgtaacgtattctaataaattatattgttatcacctacaaaaaaacttttcacaaatcttgtccttcccccacccgtctcttttcctaacggcagtggcggcagtcaggcataaagtggtcttattgctccttcgactccgcctttcttgcccacaggaagaaaagtgctgtggcacacagtgtgatgaccgcgccgatggtgtatcccagccagcggggcatcacggctccgaaaccttccttctcggccacaaacaggaaacaccccgtcaccatcgtcatgaacatggccggcagcaacgtgatgatatagggcttgtggcggcggaacagatacaccgtcaacgtccacagcgtcaccgtggccagcacctggttgctccaggcaaaataacgccatatcacgtcgaaacccttggcatcgataagcgaatacaccagcacgccagccgtgatggcaaaaataggcaatgccacaaacagacggttctttataggcttctgctcatagtgcagaaaatcggccacaataaggcgggccgaccgcaacgccgtgtcgcccgacgtcactgccgccgaaatcacgcccagcacacatatcaccgctatcaccttggggaaccacgtgttggctatcacacccaccattgcgggaccgcccttgcctgccgtgtccaccggactgtcgggaccgaagaaataactggccgccgccgcccacaccagggccacgataccctcggtaatcatggctccgtagaacaccggccgcgactgcttctcgttggtcatgcaacgcgccatcaaggggctctgcgtggcgtggaatccgctgatggctccgcaggctatcgatataaacatcatggggaagataggattatgcgccgcgtcgggatgacggttctccatcccgtcccacacctcgggaataggcggctgatacaccacaaacgccaccacaatggccaccgccatcgccagcagcaggaacccgaacaccgggtatatcttaccaatcagcttgtcgataggcagcagtgtggcaataagatagtatgcaaaaataatacccacccagacaaaaatattccagtcgggagtgaagttattgttcagcagcaccgcgggcgtattcacaaacaccgcacccaccagtatcatcaacagcaccgtgaaatagcgcatcacctgcttcgccccgttgcccagataggcaccgtgtatctcaggcagcgacgccccgtcgcgcctcaaagagataaaacccgctataaagtcgtgcaccgcgccggcaaaaatactgccgaacactatccataaaaacgacgccgtaccgaactgcgcccccataatggcgccgcatataggccccaccccagcaatattcaaaaactggataaggtacacgcgccaaggcttcatcggcacatagtccaccccgtcgggatgcgccacagcgggagtcgtacgcttggggtcaacctcgaggatgcgttccaccaccttcgaatacaccagatacccaagcagtaacaatacaacagcaatgataaacgataacataatactttacttttttggatttgcaaatttacacaaatttcccgacataaaaacccgtccgcgaaaaaaaagacatacatcgcaaattatcacacccttaccgccaaacgcccccaacagccactcccgccaaacgcgcttttacccaccgccgccctgcatttttccgcccctcacgcccgcctcaccctgccgcaacctcttgccccacctgcatccgccctcgccactaaccaaccttgtgtgaaaaaaaatgcaccccactcccctctgtttacaaaaaattagttatctttgcacctcgaacattaaaaacgtacaatcctatgaagaaatcattattcattgcagctctggcagttatactgtcgtgcaacgtcttcgcgcaagacaccaaaagacaattctccatcaacaccaacgcctggacaaccaactactggaacgacatcatctactccaccgcccgcggattggtgacccatttcgccttcaaaggcaacacgcacgactcaatcatcgtcgagagcatcctcccctactgcggcaccgtcttccccatcggcatggccaaacagggattctacgaccccaacgacatctacggcccctaccaccgcgccttcagcaccccgtttaaacaactcggcgactacggcatcggcatcgacctcgcctggacccccagcgccataggcctctatctgggcggctacttcaaaagccaggaagtctgcttcatgcccaacgacctcaacatgcgtgccaactacttccagccccgcgccggtctcctcatcggaaagaacaccctcggattcgaagtcggcaccttctacgacaaagtagtgggctgcagcggctcctaccgtcctacatccaaagacatgttcctcgacggctggggtctcgacctcgccctctccttcggctccacacgtcgcagctactcacgcaccatcctccgcttctccatgcccttccacaacttcttcaacgaagcctatgccgacggctcactgaatggcatgaaacgccgtgtgggctacatcatgttcagccaccgcatattcttctaacccctcccgcgaccaacatcgcggcataacaagtggcagcccggccaaccacaccacagccccgctgccatccacccacgggtccctgcccaccaacggcaaggacccgtttcctttcctccgccccaaccgcacccacttcctatccctccaaccccacccctcaatatctcgtcccaaccccatccatcaaccacactcctaaacccctgtcccgcaaaccacacctccccacaaccccctcccccagccacccacagcatccccgttcctcctcccgtgcaacttcgcccagccccgccacttcaacactattccaacactatttcaacagtacttcaacactatttcaacgcttttaaagcgtcgaaatacagccatagtagcgataaaacactgaaacagaagcggacccacaccgaacccacaccgcccgcacaacgttttaacacccccaacggcaaccaatcatccccatcaagcaccgcccttcgataaaaaaaatcacaatccacaaaaaaatcagaaaaaaattcttatctttgcattcaaaaataaactagagattatgaagtatacagcctttagttcaataaaaaagaggctacgccaaatgcgcaagcctcaaagaatcttcggcttatagccttattgtgaaaagcttaaaaagcgatgcaaagatacaaattttttttgaaactacaacataaaaaataatcatgggacataaaactgtaggtatcgaccttgggaccaactcattaggaatagctgttcgggacactgatttaggcaaagacatctttgaccagcttgaattttacacatctattatttttaaatccggagtgggcaaaagtgacaaaggagagtattcatacgcatcggaaaggacgctataccgatcaagaaggcgtttgtatcagtcacgaaaatatagaatctgggccacattacggctattaataaaacatggttgctgcccacttaccatcgaagagttagaacagtggagcaaatacgacaaagcaaaaggtcagaaacgacagtaccccatcgacgcaacacaattcgaacaatgggttagattagactttaacaatgacggtatacccgaatacagtagtccctatcagttgagagcagaaatgattgaaaggcaattggactgggaagatgagacggaccgatataagtttggcagagccatgtaccatatagcccaacgaagagggttcaaaagcagcaaaggggaaacactgaaagatgccaaagatgacgaggacagctcgacatttgacgttagtaatgccatgaaaaagtccgaggagaagaaatcaaaaggacttaaggaatacatggatgcccatggtttaaagactgttggaagcgcattttacaaactagaacaagagggaatccgtatcagaaacagcgaatatcaggccgttcaatctcaaaacctgaatgaggtaaaagaaatatgccagtatcaacatcttgaccaaatcaacgaagagttattcaacgggctcattagcaccaaaaagggagaaggtactattttctaccgtcgccccctatgctcacaaaaagggaatattggaagctgcacattagaaagagggcgccgcagatgtcccgtcagccatccggattatgaggaattccgtgcactatccttcatcaacaatattaaatttaaacttgatgagaatgatacatggcagagcctatcaggtgataaacgggcgaagttattgaacaaagtatttgtccgcgccaatgccacattcaaattcgaggacattaccaaatggctaagtaccgaataccctggacatgaattcagttacaaaaaacgcaccattaactataatgattatactactgtagctgggtgtcccattatataccgacttacaaaaatactaggagatgactggcgtacccaaataatctccactgacaaaaccagaaaggtacatgtcaaaagtaagaaacctcacgacataataagcgaacactctatcagttataactatgaagacatctggcatctctgcttcagcagtgatgattacgaaacactagcggaatttgcagaagtgagaatggggttttgtgctgaaaaaattggccagataaaacgattgtggagtataatgcaggatggatatgcctcgcttagcctaaaagccatccgaaacattttacccctgttgcgagaaggtatgatatatagtgaagccgtatcgctggcaaaggtatcagacattttaggttccgagaaatggaatctcaagcgaacagacataatcgaaggtgtaagggaagaatcttgcaaaaacgaatatgtcagaacaatctatcatatagccaacacactaatttcagactacaaatcaagaactattgatgaaaaacaaggctacagaaatacatcatatatactggaccaacaagacaaggaaagaatccgcaaatgcattattgacaccatcagtgccaaaagatggatgcaaaagtctaaagaagaacaagattccatctataatgacattgaaaccttatttcaggatttctttgcctccacacgccgtgactactatgtaatccctcgacagacagaacgactaaaggaatactttgtttccatctttccggagattcctgaggaaaaatgggataacctctaccatcattcacagattagcctttttcaaaaacaacaaccctctattatggaagatggggatagattattacacatattccaattgggttcccctaacattggttcaataaagaatccagttgcaatgagagcgctgcatgtggttcgccgcaccataaacgagctattggctaaaggaatgattgacgaaacaacccgaattgtagtagagacagccagggacatgaatgatgcaaactggagaaaagcgatagagcgataccaaaaagaaagagaaaaagaaaacgacatcattacagacatcatcaaagaattcagacccaattactcggaaagcgacatagaaaaaggacgtttactatttgagcaaattgaatcaggcaacacaaaagacgagaaagctgcgaaatatgccaaggcaacacaagccgaaaaagcgaaagccgagaaatttgctttggaccttgaaaagtacaaactttggaaggaacagaagttcagatgcctctataccggaacctatataagtataaaaaatctgttcgacgagaatatggttgacattgagcacaccataccccgcagcatatcatttgacgattcattggcaaataaaaccatttgcaatgcccactacaacagaacaataaaaatcaatagaataccatctgaattggatgaatacgagagcattttggaccgcatcaagccttggatggaaaaagttgaacatatcaagagccaaatagaaaattggaagaaaaacgcccgtacagcgactaccattgaacgaaaaaacgaatgtatacagcaaaagcatcaatgggagatggagttgaattactggcaagcaaaggtcaattccttcaaaattcaaaaagatgaacttgaccaaggtttcagaaacagacaactggttgacacaagaattatcactaaatatgcgttccattatctaaaatcagtatttgaacgtgtagatgttcaaaaaggttctgttacttcaacattccgtaagatacttggggtgcaaagtgtcgatgaaaagaaagaccgtgagaaacattctcatcacgccattgatgcggctgttctcaccatgattccgacttctgtccaaagagacagaatgatagaactattttatcaaagacaggaagctgacgaattagagaaagatgccattcaacagaaattgttgaaagaaatatcctcatgccgacttggaactataaacggtatggtgagtaccatagaacaaaacatcttgattaaccatatcacaaaagaccaaacactctcaccagccaagaaactgcgtcgaattggcaaagtaaagataaaaggccagtggatgcagggagactccattagaggtagtctgcaccaagaacaattctacggcgcaattaaggacaaagaagaagggcaacgattagttattcgtaaacccattaatagaattggggaaaaggatcttggctctatagttgacccccaggttcgattgtctatagagactcaggtgaaaaaacgaatggaggaacaaaagatttcttttgccaaagcaattgaacaagaaatgtacttgttggacaaagacggacagcctataacaaagggcaaaaatggaaaagcaatattgcctataagacatgtacgctgctatgctaaggccggacgaggttatttaaatgttgatacggcattacaaataaaacaacaaacatacccatccaagtacgaatacaaaaacacttattatgcccaaaatgaagacaattacctatgcttgtattatgagggaatagcaaaagggaaacaatcaaaagcttttaaattaataaattacttcgacatcgcacaattacacatacgaaatatagatacaatgctctgtgagcctgagttcgctttctatgaagggaatgaaaatatgccacttaaagctgtaataaaaaagggcacacgagtattattttacgtgaattatcccgatgagataaacgatttggacaaaaacaaactcagcgaaagactgtttgtggtatacaaattcaacataatgcgtacacctactttatacttacgacatcatctagaagcccgaaaagacaaagattgcgattcatccgagaccgcaacagatttcagtttaggaaaaaaaatatcgtacctcacactaaaagccaataatttgaaagcacttatagaacattatgacttcgagatagatgcattgggaaatattgatttcagcaaaaaggaagcccacagatgataaaacgaacgctatgtttttccaacccagcctacctgtcgatgaagaacgggcagatggtggtgcgacttgaacggcaaggcgacatgccagaacggcaaaccaccattcccattgaggatatcggcatggtggtgttggactgccaacaaatcacacttacccacggcttgatggcagcactgctggacaacaatgcttctgtcatcacatgcaacgaacgccacatgccagtggggttgatgctgcccctggaaggccacacagtgcagagcgaacgttttcaagaccagctatcggcatcgttaccactacgcaaacagctatggcaacaaacagtgcaacagaagatactgaatcaggctgcagtgctgcgggaaatgcgtcatgccgagacaggcaatatgcagcaatgggccacagcggtgaagtcgggcgacagtggcaaccttgaggggcgtgcagctgcctactactggagtgaaatgtttccagacactgaagaaacctttacacgcgaccgggaaggggtataccccaacagccttttcaattatggctatgcggtgttgcgggcagtgatagcacgggcactggtgagcagcgggctgcttccaaccctgggcatacaccaccacaaccgatataatgcctattgcctggccgacgacattatggaaccctaccgcccgtatgtggacaagctcgtggtgcaaaccatagagaaatatccaaacaacgacgaaatcaccaccgacataaaacgctccctactcactgtacccaccctcgaagtgcatatcaatggccagcgaagcccgctcatggtggcggcaagccagaccacagcctcgttggcacgctgttttgccggggaagcacgcaaaataacgtatccagagatgtgatggaccgctttagcgaataccgaattatgtggctgcttgtgttcttcgacctgcctaccgacacaaagaaggagcgtaaggcggcaaccgacttcaggaagcatctgttggccgacggctttacaatgtttcagttctccatctatgtgagacactgtgcaagcagggaaaatgcggacgtgcacttgaaacgtgtgcgaaccatgattccccaatacgggcaagtaggatgcctcaccatcaccgacaagcagtttgcagacatcgaattatataactgtcagaaagaggtaccgcccaacgcacccggacaacaattggagttattttaacatttttagaatagaaaaaagcatcaggcataattaaaaatcccgcccaaaagagcgggatttttttagttcatgacacattttgaaacactgtattccatatagttaccgacatcgtaatgtcaaagaactaatatcgaactaactttttaagcaattcacaacccgtgcgcggacgtggtacagcgacgtggtaatgtcaaagaactaatatcgaactaactttttaagcaattcacaacggagtgctggtggatagggattggctgctgaatgtcaaagaactaatatcgaactaactttttaagcaattcacaaccatccgcaaagttattgtcgaaaaagcctaaatgtcaaagaactaatatcgaactaactttttaagcaattcacaacgcagccgtggcatacttggagatagattacaatgtcaaagaactaatatcgaactaactttttaagcaattcacaaccgcctgcaccatgatggcatataccagctgaatgtcaaagaactaatatcgaactaactttttaagcaattcacaacagccgtccgttatcgtcagcgagtgcagcaaatgtcaaagaactaatatcgaactaactttttaagcaattcacaaccagcatcaatacccttaaaaatctaaaacaaatgtcaaagaactaatatcgaactaactttttaagcaattcacaacaatggggcgaactgctctgtattgctgcataatgtcaaagaactaatatcgaactaactttttaagcaattcacaacggactacctttctcccaaagcgtcggaatgaatgtcaaagaactaatatcgaactaactttttaagcaattcacaacatggataagtcgtataatcaagctgtcgaaaatgtcaaagaactaatatcgaactaactttttaagcaattcacaacggaggatgcgtcgctcatagatagcgtactaatgtcaaagaactaatatcgaactaactttttaagcaattcacaaccgtgagattcggcagttggggtcagttccaaatgtcaaagaactaatatcgaactaactttttaagtaattcacaactactttgccattgttgtttaaattgctggaaatgtcaaagaactaatatcgaactaactttttaagcaattcacaactgtgtctctgcaaagtacttaacattaaaaaatgtcaaagaactaatatcgaactaactttttaagcaattcacaacatagcctcaatactctaattaaagaggttgaatgtcaaagaactaatatcgaactaactttttaagcaattcacaactattgaaaaacgtttaaaaattcataaagaaatgtcaaagaactaatatcgaactaactttttaagcaattcacaacattatatctgtcagaatagtaacttatacaaatgtcaaagaactaatatcgaactaactttttaagcaattcacaacctacaaggccgtcaagacaaacatcccaccaatgtcaaagaactaatatcgaactaactttttaagcaattcacaactattgccatggatgaagtaactttgtgcgaaatgtcaaagaactaatatcgaactaactttttaagcaattcacaaccggggggcggcgtatacgtagttaccatataatgtcaaagaactaatatcgaactaactttttaagcaattcacaaccgagaaccacatggtgataggcaacgaagcaatgtcaaagaactaatatcgagtacgcattattggcggaggcgttacagttctacttcctggcggaattcggggatttcgatgttgcgccagccggctttgaggagggtgtcgcggaagttgagctgggtttgctcttcgccgtggaccaggaagagggtcttcactttgcgtttgttttggcagtcgatgtattgcatcatttctttgtagtcgccgtgaccggagagagattcgatgcggcgcagttcggctttgacctcatggggatggccgaagatggacacttccttgtcgccgcgcatgattttggccccaagggttttgggttcgcagtagccgacacagagtatggtggtggaggggtcttcgatgtggttggcgagatggtgtttgacccgtccggcctccatcatgcccgaggcggagatgatgacacagggtttgtggcgtaggttgagttcctttgaggcttcgacggactggatgtactgcaggcggtcgaatccgaaggggtcggggtctttcttcatgtagtcgaggatgggctgaccgaagcattcggtgtggaggcgcatgatgttggtggcggagatgctgagagggctgtcgacaaagacatcgatgtcgggcaggagttcggcatgctcgaggcggtcgagggcatagatgatttcctgtgcgcggccaacggcgaaggaggggatgatgagtttgcctttcttcttggtgcaggtgtcgagcacggccatgaggagttcctgctcggcatccttgagggtatcgtggatgcggtcgccataggtggattccatgatgaggtagtcgacctgcgggaagggttcggggtctttgagtatgtgtttgctgtatcggcctatgtcgccggtgtagcccagcttgatgatgcggcggccgtcgcgtattttgaggtacacacagctactgcccaggatgtggccggcatcgtagaactcgacagtcacttcgccctcgatgttgaagggtttgtggtaggggacactgatgaaacagtgcatacactcctgtgcctccttctcggtgtagataggttcgacggggtctttatgttgctccttgagttttttgttgaaggtgtggacatcggcctcctggatgcggcctgcatcggccagcatgatggcgcagaggtcgcgggtggcgggggtgcagaggacggtgccacggaatcccagcttgtagatgtaggggatgagaccggagtggtcgatatgggcgtgggagaggatgaggtaatcgatttcggtggggtcgaaaccaaggtcgcggttcatggcgtcggtttcgagacctttgccttgatacattccacagtcgagcaggattttcaagcccttcttggtggtgatgaggtgtttgctgccagtcacttcgcgggcagcacccataaattgcagtttcatatagccaattgcattaattacacattactacggccaccaacaacggggacaactgtttgcacgacggggcattaaacatttcaccgtcaacaattgaatgtgcggcaggcggccgacaactgagcagcaaaaatacatctttttttccaattggaaagaaaagtatagcgaaaaatgtttgcaaagagagcaaagggcaaagctctcaggcatttgtggcaggcgagggaagggaatagccacgaagcaaaaggacggttggcggcacgggaaatggaggcagggagccgcttgcgaggagatgggaaagaggattattgcaagaggcggcctctctaggcggatgaaagagtttttttgtgatgaatgggaaaatatgagtatatttgcagcgggaatataacaccctacaaaacatttaaccccttggaagataaacaacggacatatatagccatagacttgaagtcgttttacgcctcggtggagtgcgtggagcgtggactggacccactgacgaccaacttggtggtggccgacgcgagccggacggagaagacgatatgcctggccgtgtcgccttcgttgaagcaatatggcatagggggacgggcacgactgtttgaggtggtgcaacggctgcgcgaggtgaactacagccgccggatggccttggggatgcgggcatttgaggggaagtcggtttcggacacagagctgaaggcccgtccggaactggaggtggactatattgccgcagtgccgcgaatggcctactatatagagtacagcacacggatatacaagatttatttgaagtacctgtcgcctgaggatatacatgtgtattcgatagacgaggtgctgatggatgtgacggactacctgaccctgtatcacactaccgcccaccaactggctatgaccatgatacgcgacgtgctgcggcagacgggcatcaccgccaccgctggcattgggagtaacctgtatctgtgcaaagtggcaatggacattatggccaagaagcaacccgccgacagggacggggtgcggatagcggaactggacgagatgagctaccgccgccagctatgggaccaccgaccgctgaccgacttttggcgcgtggggcgcgggattgccaaccagctggccgcctacggcatagacaccatggggaaggtggcgcgctgctcggtggagaacgaggaactgctgtaccggcttttcggcgtgaacgccgaattgctgatagaccatgcatggggttgggagccctgcaccatagacctgataaaggcctaccgcccagagagcaactcgttcagccacggacaggtgctgagctgcccatacacctgggagaaagcgcgagtggtggtgcaggagatggccgacgcgatggtgctggagctggtggagaaacggatggtgaccgaccaactggtgctgaccataagctacgatgccgagagcctgaccaatcccgccataagcagaaaatacacggggccgcggaccacagactattatggccgcacggtacccaaggcggcacacggcacagccaagctgaagagtgcggggtcgtcgtcgaaagtgataatagaagccgtgatgcagctgtatgacaatataacgaaccccgatttgctgatacgctacatcaacctgactaccaaccacattatggacgagcaggtggccaagcaacaagccgaaccgcaacagctggacctctttaccgactacgaggcactggaacggcagcggcaggccgaggaggccgagagggacaaggaacgcaagatacaggaagtgcagatacagataaagaaacgctttggcaagaacgccatactgaaaggattgaactttgaggaaggcgccaccgcacgcgaccgcaacaaccagataggaggacacaaagcatgacagacgaatatgacgacataatagaccttccgcaccacgtgtcgcaacggcacgcaccaatgccgctcgaggcgcgggcagcccagtttgcaccctttgccgcactgaccggtcacaacaacgccatagaagaaaccgcacgtcaggctgccaaggacaacgaatagcaggacgactcaccacggaacgaggacgaaaccacgcccacccaaccggcacacggcatacggatggccacacagccagccacaagcataaccgtaaatacggatgactgtggacaacgggaatgagggaaagaaaaaaaactttgtttttcctttcatgtgtcatattttttgtatctttgtatcccctaataaggggagcctacgggatataaccccactattagtcaattatttaaaggagaaataacatggcattgaaaagagttatggtcctcacgggaggcggcgactgtcccggcctgaacgcagtgatacgcggcatagtgaaacgtgcgtcgcaagaaaaagactgggaagtgataggctgcatcgagtcgttcaacggcgtgttgcgtgagcccaccgagataatggagctaaccgagaagacagtggaaggtcttcagatacaaggcggaaccatattgggtaccaccaacaagggtggcccatttgcttggcccgtgaaacaacaggacggcacttggaccaccgtggaccgcagcgacgagatgatccgcaagctgcagtatctgggcgtggacgccgtgattaatattggtggagacggctcgcaacgcatctctttggggctggcccagaagggactgaacattgtgggcgtgcccaagacaatagacaacgacctgtcgtcgaccgactacactttcggattccagaccgccgtgcagatatgcaccgaggccatcgacaagctggtgaccaccgccgccagccacaaccgagtgttcatcatggaggtgatgggacgcgatgccggctggattgccctgcacagcgccatagccggcggggcggatgtatgcatcattcccgaaataccttatgacatcaacaagattaaaaacaagatagagcagcggtacaacaaacggcacggatactgcatcattgtggtggccgaaggggccaaggccaagggtgggtccgctgtaggttcgcaagccaccgaggtgggctaccagcacatccgtttgggcggcataggccaccagctggcagcagatttgaaagaagccggcgtggagcacgacatccgctgcacaattctggggcacctgcaacgcggtggcacacctatcgccttcgaccgtatcctggcctcccagttcggcgtacgcgccatggaggaggtcatcaacggcaactacggccagatggtggcctaccgccaccccgacatcgtggccgtgtcgctggaagaggccgtacgcgcccagaacctcgtagaccccaaaggtgcactggtccacacagccaaaggtctcggcattgaattcggtgagtgataaatgcaagatatcacccacagtcataattaaacaacattattattcaaaaaaaacaaatgtacaacaaaaagaaaagagagtacacctctcccgaaatggaaatcctggacgcccgcgtggagcggggctttggattaagttcactaaccgacaacacgcctagcggcgacggcaacgagcaggtcgaggacagcaacaacaattacgataacgctattttcacttgatttaatcgcaagaaaaatgaagaaaatagtagtatcgtttttgtcgcttttgacaattgcaggaattatgagctcctgccagaaagaccaacatgccggtaacggcagcaagtttaccgccaccatggagtcctgcacttccagccaaggaaagactgtgctggacg

SEQ ID NO: 3963 - DNA, 22206 bp, synthetic construct
  source 1..22206: mol_type = other DNA
  misc_feature 1..22206: note = Synthetic
tgaatctccgcccaagaaaacttttgaacttctcctccccgaaacaaaaattcttcctatctttgcacaacggtgttgcacttggtagttgagtctacgttatggctaaattaaacaggcggcacaattttccgggatgttttccgtttaagggggaaaaaaaagacaagcatgaaacgactgctgattattggcctgttgctgcttacggtgtcgtgcgggcgccaccgccacgacgacaagcagatattccgatacaacgagagcgccggcatcgccacgctcgacccggctttcgccaaggaccagagtattatatggccctgccgccaactgtacaacgggcttgtggagctgagcacgatggccgacggcgctggcaacgacgcaggccaggctatgcaggtgcagccttcggtggccaaaaggtggacggtgagcggcgacggcctgacctacacgttcacgctgcgcgacgacgtcttcttccacaagagcccgcttttcggcacggccgacagcacgcggcgtgtggtggccggcgacttcgtctacagcttcggccgcatcacagaccccgcggtggcttcgccaggggcgtgggtgctcgcctccgtggacggtaccgaggcgccggacgacaccacgttcatagtgcgtctgaaagagcctttcgcgccattcttgagcctgctgggcatggtgtactgctcggtggtgccgcgtgaggtggtggagcactacggcaaggacttccgcaaccatccctgcggaacaggccccttccagttccagtactggaaagagggcgtcaagctggtgctgcgcaagaacccgttgtatttcgaggtggacagcagcgaggacggcgccgcacgcctcccctacctcgacgctgtggctgtgacgtttatcgtcgaccggcagacggtctttctggagtttgtcaagggtaacctcgacttcatgaactcgctcgacgccagctacaaggacgagattctcactcccgagggcaccctgaaggagaagtacgcccgcagcatcaatatgagcagcacgccttacctgaacaccgaatacctggggttcaacatggaaggcggcgactcgcccctgaaagaccgtcgcatacggcaagccatcaactgcggcttcgacaggaagaagatgatgcgctacctgcgcaacaacataggcacccccggcgagggcggcttcatccccgtgggtctgcccggcgccgccgccgagcccctctacagctacgaccccgtgcgcgctaagcgcctgctggccgaagccggttacccggacggcaaggggctgcccaggataacactcgccacgacggccaactacctcgacctctgcaagtacatacagcagcagctcggcctcataggcatggatatacaggtcgacgtcaacccgccggcggctttgcgcgagcagatggcacagggcaaggcggcgtggttccgcggctcgtgggtggccgactatcccgacgccgagaactacctctcgctcttctacagccccaaccactcgcctgcgggtcccaactacacgcgcttcaccgaccgttcgttcgaccgtctatacgtcgaagcgcgcagctgcaccgacacaggccgccgcaatgctctctaccgccgcatggacgctctcgtcatgcagcaggctccggtggtggtgctctactacgaccagatactccacttcacccacaagaacatcgtcggcatgcgcaccaacgccatgaacaccatcgacctgcgacgggtgaaaaaacaataaatcacaacaaaaacttgcacaatcgaaaataatgacgtacctttgtagtcgtcattgctgcctgtcgagggcggtaatattttgaatattaataataaacaacatgtaaatcatgaaaagaaaagctttaatcgctctcgcggcaatggtgctggtcttctcggcctgcgtgcgcgacgaggacttggcccttctcaagaaaccgatacgcctgcaaggctctatggaccccaccatcggagtgcctgcggcacatggcaagatgacgctgcacgacatcctaggcatgctcagctccacctacactggccatgtctatgacacaaccgacatcatcaccatattcttcgacaccacgttggtcgacaccgtgcacaatgtcacccccggcttgagcgctaaaaccaacgtgataggcaaagacaccacgctgcgctactacgtcaacatatcgctgtttgacggcgccgagttcgaccagatgctggccgacaacaacatcactatcggcgacctttggctcgatatctacgccctcttcaaagcccatgcgccaagcaatgtggccgaggtggtcaacaacgagaacttcgtctcgtcgagtgtcgacaatatcaagatatactacactaagcacgacggcacagaggtgcccttcacgggcctctcgctcggcagcaccacgctgaagcacctcatgcagggcgacaccgtggatcgtgagaacatcaacatgaagagcatcatcaacgacctgcccaagcgcatccgcgtcgacttcgactaccacttctggctcaccgaccagttcatcctcagctacccgatagccaactatgaggcactttacgacagcctcgacaaggtgatgatcagctacgatgtcaatctggccgccgagtttcccttcgacatcaagatcaaccgtctgccctactcctttaccatcaacctcaacggcgacagcctgccgcgcctcgatatacagcagacgctcgacagcatcgcccgtggcctctccgtcgacctcagcgacgccaacctcaccatggccttcgataacggcatccccgccaagttcaacatcgcggcctacctcatcgacgccaacggcgccattatcggcgacaccctgatacacaacaccctcatagcagcagcccccgtggcagccgacggcaccggacactatgtggccagcggcacacgcgccaccgtcatacccgtgcccatcaacgaacaacggctgcgcgacctcaagcagacaaagaagataggcttcaagctcacgctggctaccgacaatggacccaacaacgtctccattcgccgcgacgactacctcggcatcaacgcctacatcaaggtgcatccgcaggccaacgtcaacataccgctcaccaaccaaggcatcatcaaataaccggaaaggaggaacataccatgaaaaagacaatcatagcagcagtaatggtcatcctttgcggtagcgcaaaagctcagtacaacgagaccaacagccttttctacaacacattccgcaccccgcagagcggcgagctcaaccccgcccttttccccaacaaggcatccttctacctcagccttccgggcttcggcatgcagttcggcagccctctggccattaacgacttcatgcacactcagggtgactccatcacggtcatcaacctcaacaaagcgatggacgccctcggcaaggacaacaacatacacttcggcatcaacgccaacctcttcggcctcggcttcaaggtcaacaacatgttcttcaccttcaacagccgcttggtcaccaaccttaacatcaatattcccagagaacttgtcgacgccgtgcagcatggcaacaccgacgcttcgggcaaccccatccctgaggtcaacgtcctctgtggcgacatcctcaacagcaccacctatgccgagatagccgtcggcgccggctaccgcatcgagcccctcaacctcaccgtcggtgcccgcgccaaatacctctacggcctcgccaacatacagaccgacaacaccatcgccgtgatcaccacagcccccgactacagccagatacgcgccgacatctactacgatttcatcaccgcaggcgtggcaggtctcgactccaacggccgctttaagatggacaccaagaacctcctctccggcaacagcggcttcgccttcgacatcggcgcccgctacgacatgggtcccttctccttctccttcgccatcgacgacctctccgcaggcatccactggaacaagaacatcaacgccgtgcgccccaaggacggccacatcaccctcaacttcggcggcgaggatatcaccaccatgctccacggcggccgcctcaactccgactcactcaacgcccaatatcaaaacctcatcaacggcatccgcccctcgtcgacgaccaaagtcagcgactactggtacagcatccccaccaaattctacctcggcggcaactacaacttcctgcagaagttccgcgccagcctcctcttccacggccagctcgaccgcggtatcttcagcaagaaaaacgccacggaaatcaatgtgggcgaaatcaccaacaccttccgcttcaacaccaccgtctccttcggcgtcaacctcttcaactgggctgaattcatcgtcggcaactccttcgtcggcgacggcaacaagttcgacgccatcaaccccggctttggcatagtgctcacacccgccaccatcttccagatctacctgatgggcgactacatgagcagcctgtacctcgtcgaagccaaagacttcaacatcaggctcggcctcaacatcctcattggcgatggcggcaacggccgcgtggctcaggactgatggcagttaaaagttaagagttaagagttaagagttaaaagttaagagttaaaagttaagagttaagagtttggagttcccgccaacaattcgagtaattcgccattaaaccttgtggtatgccgtcggctctgccgacaaccttgaacttggaaccttgaaccttgtggtatgccgtcggctctgccgacaaccttgaaccttgaaccttgaaccttgaaccaatcactatccactgaccactgaccactgaccacttttcgagtaattcgccgttaaaccttgaaccttgaaccttgaaccttgaaccaatcactatccactgaccactgaccacttttcgagtaattcgcaaaattcgccgttaactaaaactaaaaacttaaaactaaaaactaaaaactaaaaacctcctccgtgaacataatcgccatagtaggacgccccaacgtcggcaagtccacactcttcaaccgactcaccgaaagccgcgacgccatagtagactccgtggccggcgtcacacgcgaccgccagtacggccactccgactggaacggcaagcacttctccatcatcgacaccggcggctacgtcatgggtggcgacgacgagttcgagaccgagatacggcgtcaggtgtcactcgccatcgatgaggccgacgtcatcctcttcctcgtcgacgcacgcgaaggcctcacccccatggacgaagacgtcgccgacatgctgcgcaagcagcccaaacccgtagtgctcgccgccaacaaggtcgacaacagcgcacagatggacggcctggcggagttctacgccctcggcctcggcgacccctaccccatcgcaggcgtcacaggtagcggcacaggtgacctcctcgacgcactcgtcaaagacttctccgaaggctccgacgaccccaccgacggcctgccacgcatagccgtcgtcggtcgccccaatgtcggcaagagttccttcatcaacatgatcaccggcgaacaccgctccgtggtcacacccatagctggcaccacgcgcgactccatctactcgcactacaacctcttcggtttcgacttcaacttcgtcgacaccgcaggcctccgacgcaagaacaaagtcagcgaagacctcgagttctactccgtcatgcgctccgtccgcgccatcgaagcctccgacgtctgcatcctcatgctcgacgcgagccagggcctggagcagcaggacctcaacatcttctcgctcatcgtccgcaaccacaaaggcgtcgtcatcgtcgtcaacaagtgggacctcgtggagaaagggaccaacacccaccgcgactacgagcagctcatccgcgaacgcatagcgcccttcgacgacgtgcccatcatcttcacctccgtcatcaacaaacagcgcatcttcaaagtcctcgaaaccgcacgcgccgtctgcgaagcccgctcgcgccgcatcgccacagccgaaatcaacgaccgcctcctgcccatcgtcaaagagcagaacccgccgccctcagtcaaaggcaagtggataaagataaaatacatcacccagctgcccacgccctacccgcagttcgtcttcttctgcaacctcccgcagtacatccgcgacccctacaaacgcttcgtggaaaaccggctgcgcgagatgtgggacttccacggcgtgcccatatccatcttctttagagcaaaataaatgaaccttgaactttgaaccttgtggtatgccgtcggctctgccgacaaccttgaactttgaaccttgaactttgaacctttaaaataacacattatgaaagtcacagaagaaaacttcaacagcatcatcggcacagacaaacccgtcatgatcgacttcggcgccacatggtgcggcccctgcaaagccctcgcccctcgcatcgaggagatagagaaagaatatgaaggacgcgccgtcgtgggcaccgccgacgtcgacgagtgcagcgacctcgccgcgcagttccgcatccgcaacgtgcccaccgtcctcttcttcaaaggcggacagcccgtcgacaagtccgtaggcctcgtggccaaagagtccctcaccgagaaactcaatgccctcctctgacatcgtctcgcgctacaaatccctcgacttcttcgcacgccaagtggtcgagggatttattactggccgtcaccgctcccccttccacggcttctccgtcgaattctccgactaccgccagtacaacaccggcgagagcacgcgcaacatcgactggcgcctctacggccgcaccgaccgcctttacgtcaaacagttccaggaagagaccaacctccgctgccagctcgtcgtcgaccaaagcacatctatgcttttcccccttgaaggacaaggtgacatagagcatcccaacaagcttaccttcagcgtgtacgcctgcgccgtgcttgtcgagctcctccaccgacagcgcgatgcctttggccttacactcatctccgacgccatcgacaccgccaccccctgccgctccagcgccctgcatcagcgccacatactcgcgctcctcgacaacctgctgcagcctgttcaggccgcgcagcgccccatgcgccccacctcgctcgcggcaagcctgcacgtcctcgccgagcaactgcaccgtcgctccctcgtcgtcctcttcaccgacgccttcgtccgcgacggcgagcaggaagcactcctcgacgccctgcgacacctgcgccacaacaagcacgaagtcatcctcttccacaccttccaccgcgcacacgagctgcagctcgactacggctcgcgccccacacgcttcgtggacctcgagagcggccgcacactccgccttcagccggcggagatagcgcagacctacagcgaccacatgctccgtcagcaggccgacctgcagcagcgcgccatgcagtaccgcatcgactacgtccccgtcgacgtcgcccagggcttccaccaggtcatactccccttcctactcaagcgcagcaggcaatagcccccaaccttctctcggctccaccgaccagcacccttttttttgacacgcatggccgcgaattttcgcccgtcttacgggctgctgtggaaatatcgtaatgcccgtttgacaccaaatcgcacttatcgtactgcccgttttgacaccaaatcgaaattaaccgattccattttcacaactttttccattttttgacccctgtttttacaactttttccattttttaacccacatttttacaactttttccattctcaatttttaaaagttcgagtaattcgcccaaaattgataactgagagaacggcgaattttgcgacccccgaaccaaaggtcggcgaccttgtggagccaaggggtgatgtggtaagcctgcgagcaccactgaaataaaaagaataaagcgagtcagcaccgctgaaataaatcaaatccagcgaaaacgcattctttatgacttctttgtgccttctctaatcacccaagcaaagcctcaataggaacggtgctatccattaggcctatgcgggtttccgcagcgtgacggttgacgccggtgtaggccaacgaggcatcctcgtagcggcggaatttcaaaatggcgtcgttcatttgggcgcggttgaagacacccacgcgcagcagcaggtcgaagtcgtcgatagtcaggcctgtgacacgttcaaataatgatggttccaacttgcggataacatcctcgaggctctcctcacggtagtcggtgaggtacatgaagatgggaatgcgcgtggcgaacttcatcagccgggaaacgacgtgtcgtcgtacatataaatctgcggcaccgcgcgccgcatggtggggagtatctgttctgtcgtctgcataatatgtcagtttgtccgttattatttcaaacagacgcccttatgcagaaataatgtaaaaaagaggataagttggctaacggtaattcaggctgtggaccgcatcgtgaacgacgattatcatttcgccacgaacatcaagcgttatttcgtatgcaaaatggaaatcctcgcatataaattcttgccagtcgttatcaatccactcctgtttaagcctggctttggaaaatatggtagcatagtcggcaagagactccaacccgtcgtaaagacgatttttcttgcgttctaccgtctcatagctgagggtgtgccaatgcttcaaaatagaggcatcatagaatgcatctattgcctggtcgacacgttcctcgatgattatcctcatgcctcaggatgatagaagttgtaaatcttctcggtcaatctgcggcgagattcttcaagaggtatgcaacgtgcaatttcctcatctgaaataacacggtaagcctttcttgcagcaataccatactctgcggcaggctcactgacacgctgtatttcaggctcgttatcgttatattcacgtaccatacttgctatcatttgtatttgcaaaaatacaaatgttttttcatatagccaaattattcttcttttctcatcatttcaaagagcgctctgttatatatttttgccaagcttttcccctcggcgtgggtttgcttcaactcctccacaagctctccgttcagggggcggttgatggggtcttatggccgtcttgtagccgtttagtagccgtttagtagccgttaaggttgggggtggaatatgtggaagtatgacggaagcgagaggtcaacgaatagttttgcaaaatgacgagattatgttcacgagagtgacagtgacagttgtgacagttaaaaaaattctatatctatatatctatatatatagatatatagatatagatgatattttgggttgtgaaagccccacaaaacaactgtcacaactgtcactgtcactcttaccccgatgtagggtggtggcgagaaagctaccgaagtgtacggagtgtttggatgtgatagatattcaatgacataaagctaacgggcgaaaatggagggagagagggctgacttttttgtgtgtagtttgagaaaaaattcgtatctttgcaccataaaaacaaaacccacgtaatcgcgggttttaagaaaactcttcggcttatagccttattgtgaaaagctcgaaaagtgatgcaaagatacaaagaaataatggattgagaaaaaaaactttcaatatggagcagaaaatattaggtattgacctgggaaccaattctcttggtattgcattaagaaacacggacaatggcggtgacattgtcaatcaattggattattattcttcaataatctttaattcgggagttggaaaggacaccaagggagaatattcatacgcagcagagcgaaccagatatcgctcaatccgccggctataccaatcacgcaaataccgaatatgggccaccttgaaactgcttatatcccacggatgctgccctatgtcagaggagagtcttgaaagatggagcagatatgacaagaaaaaggggttgaaacgcgagtaccccattgacgacaccttgtttgagcaatgggttcgcctggattttgacggcgacggcatagccgactacagcagcccttatcagttacgggcagagctcatggagcggcagttgaattgggagagtcaaagtgaccgttataaattcgggcgtgcaatgtatcatatcgcccaacgaagaggtttcaagagcagcaagggagagacgctgaagtatgcgggagacaatgaggatttgtcgacaatcgaggttgaggcagccatgaagaaatcggaagagaagaagtcgaaagggattgacgaatacatgaaagagcatggccttgaaactgtcgggtgtgccttcgcgaaactggagaaagagggggtcagggtaaggaatcatcccgaatatcaagctgtccaatcgcgataccgagaagagattgacaaaatctgccgaaagcagcatatagacacccttgtcccagaactatttcatggattaatgagcaccaagaagggagaaggcactatattctatcgccgtcccttacgttcgcaaaagggcaatatagggaaatgcacccttgagcccacgaaacggcgctgtcctgtcagtcaccccgattatgaagaataccgtgcattgacactaataaacaacatcaagtaccgcatatcacccgaggatgagtggagaactcttacggacaacgagcgtgaacagatatttgccgacttgttttgtagagcgaaaggcaccttcaaatttgccgacatatgtatgtggattgagaagagccacaacggtgtccaccttgacttcgataatgacaccataaactaccgcgactacgcgacggtggcaggatgtccgataatatcacgtctgaagaagattctcggagaagagtggcgcacaaaggagatagtcacaaaacgtgagcgtgtaaacaacaagtcgggtgagatacatgttgtaagctataattacgaggatttgtggcatctgtgcttcaccagcgacgactacgaagagttatacgaatttgtacagacgcacctcgggtttaatgaaacgcaagccaaagagatgacccgcatgtggagttcgatgcaagacggatacaccacattaagcctgaaggccatcaggaacatcctcccattcctgcgcaaaggaatgatttacagcgaggctgtatccttagccaagattccggacattatcggcaaagaaaactgggcagaaaagagggcggaaatcctgtcggcaatcaacgaccttaacaaaaacaacgcccataccaggcttgtctacaatcttgccaacacagttatatccaattacaaggcgctgtcgttcgaagaccaatttgcatacaagaacaccgactatgtgcttaccgaagctgacaggaaagatatactgcaatgctgcaagggttatttcggcgagaaaaaatggtgcgggatgtcgggtaccgaacaaacggcgctacaggatgaaatctccaaactttaccagcaattctttgcatcctcaaaaagggaatattataaacttcctaaaaccagcgactcactaaaagattatctctccagtttgttcccggatatcaacaaagaagaatgggataaactataccatcattcgcaaaccagccttttcccgcaggcgcagcccaaattaggaacacctgatatcggttccataaagaatcccgttgtgctaagggccctccatgtgctccgcaaggccataaacgccatgatagacaaaggcaagattgacgaagacacgcgcattgtcgtagaaacggcacgagagatgaacgacgccaactggcgccgcgcaatcgagcgctaccagaaagaacgcgagaaagagaatgctgccattgccgagataatacgtgagttccgtcccaactacactgatagcgacattgagaaagggcgtctgttattcgagcagaacatcattgagggaacaagtcgcgacgcaaagctgaaagcagaacgttttgccctcgacctgcagaaatacaaactctggaaggagcagaacttccaatgcctgtatacgggaaaacacattaatgtgtccgaccttttcaacgatagcgtcgttgatattgagcatactattccgcggagcctgtcgtttgacgattctttgagcaacaaaacagtatgctatgcacacttcaacagatacacaaagaacaaccagataccatcagagctgtcgaactacaatgatattctgcaacgtatccaaccttggagagacaagcttgagcatataatgtctcaaatagagttgtggaaggggaaggcgcgcacagcgcccactgttgagcgcaaaaacgagtgtctgcaacagaaacaccagtgggagctggagcgcgactactggcgtgcaaagatcaacactttcaccatacagaaagatgatatggatcttgggttccgccatagccagttggtcgacacgcgcatcatcacaaaatacgcattccactatctgaagtctgtattcaaccgtgttgacgtggaaaagggcaacgtcacagccaccttccgcaagatactcggtgtgcaaagtgtcgacgaaaagaaagaccgcagcaaacattcgcaccacgccgtagacgcagccatactaacacttgtccccacagctgccaaacgcgacaagatgatggaactgtactacaagatagaagatgctcccgattcggaaaaagagagcctccgcaccgccctccagcaagaagtgcgcgactgtcgtattggctctgtaaacgggcttcttgaaaccattgaacgcaacatcttggtcaatcatatttcaaaagaccagacgttggcgccatcacacaaaaggcggcatataaacggccatatcgttgacgggcaatggcaggccggcgactccatcagaggaagcctccacaaagacacattctacggtgccatcaagtcgtcgacgggcgatttgtatatggtaaaacgcacgccaataaaaacaatgaccgaaaaagacattgagaccattgttgatgagcgcttgaaggagatgatacgtatacagctaaagcacaagatggagagcgaaggactttcggcctcaaaagcaatggaaagcgagttctatatgttagacaaaaacgggaaccccatcacccacgattgcaacgggaggcccattgcacccttgcgccatgtgcgttgctacgcaaaagcaggaggagggttcctgaagattgacaccgccctaccaatcaagaaacagacttacccatcgaagcaagaatacaaaaacacctactatgcccaaaatgacaacaactacctctgcttattctatgaaggcatggtaaagggcaaggtgcaacgttcgttccgccttgtcaactatctggatgtggcaaaaatcaatcttaaaaatgacaaagcgctgtttcatgagcccgaattcgctttctacaaaggcaacaatagcatgccattgagggccataataaagaggggcacacgggtattgctatacaataactaccctgaagaggttcatgatctcgaaaaagaccaaataagtaatcgtctttttgttgtagtaaagttcaatttacacgggtcaacaccttctgttttcattaaatcccatattgacgcctcttctgaaagtaaaccacttgagcttagggctgacaaattaaatgcactcattgaacactacgacttcgaaatcgattcacttggcaaaatcaatttcaaataacacatgatcaagcgcaccctctgtttttcgcacccggcttatctgtctctacgcaacggccagttggttgtgaaactggagaagcacgacgacgagccggagaaacaggcaacaataccaatagaagacatcggcgttgtggtgcttgaccatcgacagataacgctcacccacggcgtgatggctgcattgctcgacaacaacgcggcagtcgtcacctgcgacaattcgcacatgccagtaggcctcatgcttcctctggaaggacatactgtgcaacaggagcgcttccaagaccagcttagctcctccctgcccttgcgtaaacaattgtggcagcagacggtgcagcagaagatcttaaaccaagcagccttgctgaaggagctgcacggcatcgagacaggcaacatgcgccaatgggccaaagaggtgctttccggcgacagcaccaatcttgagggacgcgccgctgccttctattggagcaagatgttccccaccatcaccgacttcacacgcagccgcgacggtgtataccccaacgccctgctcaactatggctatgccatactgcgcgccgtaatagcgcgagctctcgtgggtagcggcatgctcccaaccctcggcatccatcaccataaccgctacaacgcctattgcctggccgacgatatcatggagccataccgcccgtatgtcgaccgtctggtggtggagacgatggccgtgtgctgcgatgttgaggtcaccacagccatcaaaagccgtctgctcaccgtacccactctcgaagtgcacatcaacgaacaacgcagccctttgatggtcgccgccagccaaacaacagcctcgctggcacgttgcttctcgggcgaaagccgtagggttgcataccccgagatgtaagatggaccgtttcagcgaataccgcatcatgtggcttctggtgttcttcgacctgcctaccgacaccaagaaagagcgcaaggctgctgccgattttcgcaagaagcttgtcggcgacggattcacgatgttccaattctcgatatacgtgcgccattgtgccagccgtgagaatgccaacgtgcaccttaagcgtgtaaaggccagcctgccagaatacggacaggttggatgcctcactatcaccgacaagcaattttcggagattgagctatacgtctgcaagaaagaggtcgagcccaatgccccaggacaacagcttgaactgttttagtaggattggaaaaacaattacattgaacaaaaatcccgcctgttttggcgggatttttttagtctttgacagctaatagcacattgtatatcactagattattgacatcgtgatgtcaaagagctattatcaatgtctacttttcaagcaattcacaacgtagaacttccgcagccatttctcgccgacgatgtcaaagagctattatcaatgtctacttttcaagcaattcacaacgcttggcttcgtactcgcggcgctcctcgggatgtcaaagagctattatcaatgtctacttttcaagcaattcacaaccaacggcgtgatagtgctgtgccggaagcgatgtcaaagagctattatcaatgtctacttttcaagcaattcacaacccatcgggaagcccatacggcgcaggctcggatgtcaaagagctattatcaatgtctacttttcaagcaattcacaaccaaggggcgtatgtcgtcgctggagacgcggatgtcaaagagctattatcaatgtctacttttcaagcaattcacaacgcggacgacctgcacgcctttgcgcacggcgatgtcaaagagctattatcaatgtctacttttcaagcaattcacaaccagtcgcggtcgtaaacgctactttcaaagatgtcaaagagctattatcaatgtctacttttcaagcaattcacaactccgcaccgtctctgttgtgtcgtggatgtgatgtcaaagagctattatcaatgtctacttttcaagcaattcacaacttcacggcggcagtgttggcattggtggccagatgtcaaagagctattatcaatgtctacttttcaagcaattcacaacacaggaatttgaaacggcagtacgcgagctgatgtcaaagagctattatcaatgtctacttttcaagcaattcacaacccgccacagtgccgggcgcggcgtacctttgatgtcaaagagctattatcaatgtctacttttcaagcaattcacaacggcgacatgacgctggcagcgttccatgacgatgtcaaagagctattatcaatgtctacttttcaagcaattcacaacccgaaccactcataggcgcggaaacacttggatgtcaaagagctattatcaatgtctacttttcaagcaattcacaacggtgtcgttggtggtggtgaactccacaacgatgtcaaagagctattatcaatgtctacttttcaagcaattcacaaccgtcaagagcgtcaggcagaagggcaagaggatgtcaaagagctattatcaatgtctacttttcaagcaattcacaacaatagggaatgacggccaatggcacgaatggatgtcaaagagctattatcaatgtctacttttcaagcaattcacaacgcatgtggtgttgtgctctccccagctgcggatgtcaaagagctattatcaatgtctacttttcaagcaattcacaaccctgcacgtcgtctatcgtgccttcgctcggatgtcaaagagctattatcaatgtctacttttcaagcaattcacaacgttagtaaaaagcacgagactatgaaccggatgtcaaagagctattatcaatgtctacttttcaagcaattcacaacggcgtaggcggtgaggtcttccacctgtcggatgtcaaagagctattatcaatgtctacttttcaagcaattcacaacacaatcaaagtatatctttgcaccgctttcgatgtcaaagagctattatcaatgtttacttttcaagcaattcacaacgcggcggtggtggatcggggccggaggtgggatgtcaaagagctattatcaatgtttacttttcaagcaattcacaacggtcgaggcggcgcgtccagcggatggtggatgtcaaagagctattatcaatgtttacttttcaagcaattcacaacgttgccgtaaatatatgaactatctatggaatgtcaaagagctattatcaatgtctacttttcaagcaattcacaacacgcaggacaacacgcccacttcgggaactaaagtcaaagagctattatcaatgtttacttttcattttgcaaagatacgcatatttttcaatccacaccacatctgtgaataacttttccgataattattttttcatctgggcgacaccctgaccgtgcgaacgttgtcccccacgccagccaccgtaacttgcgtgttgataaaaaccacttggccggtcggcccattctctgtaattttgtgggcagaattacaatattgtatttatcatcaagcacaaggattatcaaggccttgtgtgaatttttgtcacacttttaaaacacaaaaagatatgaagggtaaaattattgactacatggaaatggcgcagggcgcgcggtatggaattgaaaaagagagcgatagactgacggaaaggctgactcagatggaggattacaggaagctgctggacggtatcgacgaggtgattgcggataacaaacggcagcaggaggagatagagtcgctgcagcagcagctgacagaggagaagaggcagagggcagaactggagatgaaactgacggaactgaacaaactgacggcaggtgtggccaagaaggccgaggaggagactctgctaaaagtgctgcgtacctatgtgaaccgctcgaagaagaaaacgtccgacaagcgggcttacatcaaatcggtggtattggagattgccatgcagaacggcctaacacttcccgacgatatggcagacactattgacaatctcgacgacgagcagacggagcccaaggtggtcaacgtggcaggaaactataacgacattcacgataataagaacgtaaacttgaaataaactatggctggaaatactgtatatgtgcagggaaactatgtggatgtgcacgacaatgagaatgttactttgaatattgagaaggcggaggtgaggatggatgacaatgagacgacaagtcctgtcggccgagccgacggcacaccacaagacgatgagatgcgggagcgtgcggaggtgcttacctccaatggcgacttcatggctatactgcagagggctgtggaagcggggttctgccggcaggagggatggcggtacaagtggggtgtgaaggtggaggccgcctatttcgcgtcgctggcgaacgagaggttcaatctctcgaaacgcaagatcaacggcaaaacgccggctgtcacttggattccatttgaggctttgtttgggttgaaggagctcagaacggctttcaacgactataaacaatgcaaaacggcacttgtgagagaatgtgagatagacaaattgttcgcatagtatcggtctgatattttgttatttaacctcctacgatggtccatcgtgggaggtttttctgtttcagggggtgtacttttgcatcgtgtttcggacggaacaagaaaaaacgaattaaccccgagtggaggcgaggaggatgttctcgagtaaatggccaaagaatccgtgcttcttctcaccaaaactcaaaaaaaaagatgaacaataacagaagacagacatttgggaagacgacgtcgctgacgggattgatgaccttcggcacgacagacgacaacaagcacatcatggacttcgcatgcacggagtatgtggagatggaggcgttcgtgggcgactgcaaggtgcaggctatgcgcgacggcaacgtgtacatcacggagaagccgaagcgtgtgcgcggcaaggcgctgttccgcgaggacaacagtacgctgacgcttggcagggacgggaggtactacttcgtgttcacgctgccgaagaggcagcagaaggcgctgccggagaagctggtgcgccaggcggtggcgatagccgagaagttcggtgtttatggtttaaaacttaaaaagtaaggatatgagtgtacatgtgatttactataaggatggggcgaagatgatgcgtcccatcctgacgagagagagctacctgaagctgcgcggcggtgagaagcagaaggccatagtgaaggccatcaggatgggtgacgtcagccagaagcacttgctgcagcagatgaactacagctgtctgcccaacgaggacgggacattgaaaggcaccaccaggatgagcggcagcgtgggtatggatatcgaccacattgcggccgacgagatggagagcgtgaaggaacgcatccttgcgaaaaaggaggaactcggattgctgatgctggagaggagtgcgagaggacaggggtatcacttggttttcagacgtcgtcaagagctgagtcaagaagataacctgcgctgggcgagtgaattgctggatgtggaattcgacagcggagcaaaggacatcacgagggtgttttttaccaccaccgacgacgcggaagagttgctgtttcttgacgacgggatttttgagaacggcgaatttggcgaattgaacgaagctgcgcaggttgattgcgggcgaattactcgaaaaggtgagaacggcgaattggaggaatgtgaagaaagcgttacagcgttacagcgtaacagttcaaaatctgccaatcgctatccggaggagtacaaggggattgcgtacaaggacatcattgcgaagtactgggagctgttcaatgacgggaaggagccctcgacgggtgacagggacacgctgacgtaccagctggcgtgcgacctgcggcatatctgcggcagggatgccgagtggctcgaccaggtgataccgtgctacgacggcttcacggagggcgagaaacgtcagaagattatgaacgcgctgtcggcgaagagcgaggggatgccctacaggttgaagcaggtgctggcggcgctgaagtcggcgacggccatcaaagcctgcggcgggacgctgagcactccgccggagatgcccaagaagctgcctccgctggtgaagctgctgacgaagaacgtgccggagttctacaagccggctgtggccagcgccgtcttccccgctttggcggcacacatgcatggggtgaagttccgctactgggacaacgtcgaccacgaagccaccttcatgaacatattgattggcaggcagagtatcggcaagggtactatcaaaaagccaatcgaatatatcatggagagcatacggcagagagacctgcccaaccgacagcgcgaggccgagtggaagcagaagaaccctggcgccaaacagaagaaagatccgcggccgacggacatctgcatacagatgctgatagacaacctgacggatgcggtgttcaaccagagaatcgtcgatgcccacaacaacggggaaagattcctctacaccatcgtggacgagattgacgccctgaagaaggtgacctcgaagggaacgaccgacgaggtggggctgctgataaggaaggcctttgacaacgcctatgccggtcaggagcgcgtgggtgccgactcggtgagcggcatagcgccgctgcgctggaacttcaacgcctcgaccacgcctccgaatgcgcgtaggttcttcggcaagatggtcaacgacggcaccgtgagccgactggatgtggccaccatcatacgtgccgacgacaacgacgaggcgccggtgctgggcatctacgacaaccagtttgcgcaggagctgaagccctacctgcagcgcctggaggctgccaacgggctgatagaatgtcagcaggcgaagaagctggcgctggagatgaagcaggagaacagcgatatggcgcggctgtatgactcggaggcctacagggtgctgagttacagagccaatgtgatagcgtggctgaaagggatggtgctgtatgtggcgcaggggtacaagtggacgaaggagatagcggattttgtgcggtggagcgagcagtacaacctgtggtgcaagatgctgtatttcggtcagcagcttgagagggaactgcgggaagaggtggagatagagcgtcagagtgggccaaggaatttgctggagttgttgcctgacgagttcgggaaggaggagtaccaattgatgcgtcaaaggcagggtaagagtggcgacggtacaaatactcttaatgtatggatcaaacgtgggtatttattccgcgacgaggtgacggggaagtattgcaagacggagtcatatttgaagaagtttaagggtttaaaggtttaagggtttaagagttatgattacgattgagaataattatgagtgtttcgtgcagctctggctacggctggagcgcacgaggcagatgttcgggatgcaatacaagaggttctgcatacgcagggtgctgtgctgcagtcgtggttagggagcgaggctacggacgacttcgtctgggaagtgtgcttcaacaccgtcgtcgacgagcagcaggtgtatgggttagacatgctgccggcgccggcgctgcatccgcgtgcgagccgtgagttcctgcgggctttggtggccgtgaagctcggcatcggtatgcggaaggtggatttgaaggctttggacagagcctattcggcggccttcccacacagtacgccgctgaatgtcaacaagaagaagagagaaccgccgagaggggcaagaatggcgagacgggagggacaacatgatgccgacgagggaggaaaaggtgtatttgaagcagggaaatagctgaaagacagcagacagggaaatattttcggcagtattcgtagaccgcaatgcggaggttgtacttttgcaccagatttcgaaatcaaaccaaccaccaaaccttaaccaaattatcaacccaaccaaaaccaagtaagctatggcaaaaactttcggagccgtcctcggcaaacagtcaggccgcatcggccaaatcgtcggtcgcgtcacccgcggcaagcagtacttcgcag

SEQ ID NO: 3964 - DNA, 20047 bp, synthetic construct
  variation 627..633: note = note, n is a, c, g, or t
  source 1..20047: mol_type = other DNA
  variation 11820..11902: note = note, n is a, c, g, or t
  variation 203..241: note = note, n is a, c, g, or t
  misc_feature 1..20047: note = Synthetic
tccaaactttggaggcgggatagcggttaggggcgggaggcggagcgacggtggggctgcggctttgagggagccgggcgaaggtggccatagggagctggggggggcagcgggggttgaggtgagggctgcggagcaggacggcgggaagtgagagacaaacttttatggcgggatggcggtgtgggtcggaagggggagcnnnnnnnnnnnnnnnnnnnnnnnnnnnnnnnnnnnnnnntggggctgcggtggggctgcggtttggtgggagccggccgcgaagcggccggcgaacggaacgaagtaagtggtgggtaaaaactcacactccacaggtgtggaacacagcatcctctatcgaatcgaggtgtaagtggtgggtaaaaactcacactccacaggacagcggggtggctgcacgcctgtggagtgtgggggatatgggtgtgccgctggccatgggggctgcggcagtggggtcaatagacggggaaggcgatttcgcgctcgatgacttggtaggccacgttgttgcgatagatggtttggcgcacccagttgtcgtcctcgtcgtattcgaagacatagctgtgtttccagttgaggtgctcgtcgtagttgaannnnnnnctcgatgaggttgtcgtggtcgtcgtagtagtaggtggtgagggccacgaggaagtcgtcggcgtcgtagaagcgccattcgacgcggttgccgtggctgtcgtatttgtagaggtagcgctgggtgagctcgccgtcgcggtcgtagaattccatttcggagttgttgccggcggcgtcgtatttatagacgcgcttctcggtcatggtgccgtcgggggcaaagctctgctcttcgaccagtcggttgttctcgtagcgggaggtctcctttttggtcatgtggtcgcccatgaagacggtgcgctcgatgcggttgccgttctcgtcgttgcggtaggcggtgcggccggtgagctggcgagcacggttgtactcgttccagccgagggcgtagccatgcacgtcgaagtagtaggaataccatgtgtattcgccatccttggtgcggtatttgtcttggaaattgccgcgtttgtcgaaggtgatggagtcgatgcagatgagctgacggcctccgttgcggcctccgtggatgtcgtaggtgtattcaatcacgtagatggcattgccgttgatgcccatttcctggcgggaggatttgcggggtttattgccggcaagagcgctgccagccaccagcagaatcaacgataaaacgatgtatttcttcattttaaacattattgtgcactataaatgatgttgcaaagatacaaatttttctttacttaaaacgcacactgccgtaaaatattatgtcgcgatatgttttttgtgtctatgttggtcggtaaatgtgttgtcgttacttgggctaatactgttggcaggttccaaatttagggctgaggtcacggttccatgaggctgtgttgacgacaagaacatgcccttttgcaatgagttctctattccatcgtgcggggttggggattccggcgggaatctgctcgcacattttctttcggaggatggaattcatggcatcatcgaggtttgtgaggaagacgtagactattggagaatccgtcttctcttcgccgtatcggtagaggaatgtgtcgcggaatttgtatttgaggtagtttaggaggaaatttgtggccgagcggctgccttgatgggttttgctgttttcctttttgaattcggcaatttccgcaggcggatattctttgatttctatccagagttggaatgtggggaattcggcaagcacgtcgacggccttcatgggtgcgccgtgaaaggtgggcgaggaaggctgaggctcatcaaacttgaacaatgccgttgcgttagggaagtcgaaacggactttttcttcagtcaaatcgagtgtcataagtccgctatccccctcctgatttcgtcgtctaagattctgctgaaagtttcatctatcgcattggggtacaggctgcccaaatcggaggacgattcatggcggactattccttcatcgtctttataaagggtgtggtaaaggatattgtcggcctcggttgcggcaaggtcgaattctttcagcaggacgtagtcgtgtgttgcgatgaaaatctgcactcccattctttgcagttcgaggagtatttggactacggtttgggacagttgggggttgagattggcctccggctcgtcccagaagagcatggtgcctttggtgagtgtttcgttttggatgagcctgtagagcagtcccaactttctgtagccttcggccaggagggagaattccaattcgccggaggaattccgcatgtagaacgtttcgttcttttcgacaactcggcctgacatggctttgttcagaatgttgagaagcttgactctttcggggctttgctttcctctgacaatggggaggaaggccttgtcgatgatatctaaatacacctcttcgaaggccaatttcttttggctgaacagcgaacggaagcccggcgcattggccagcatgtctttcacagggatgaagattgattccgcctggttgctttctttccaaaggctgtggcttactgaagttttgttgagggtggtgatgtcgcatgtgatagaccgttccctgttatcgtcttcgttccgcctgtacactgttacgcggccggttcccctgcccttggagcgatggaccaaacgcccgatagactgcggcatgaacacgccgttcaatttctgggcgaaggtgcggtcctctttctcgctcatcacagaacaggctgcatacaggactttcatgaggtgggtttttcccgttccgttcttgccaataaagatattgactcccggagcgaaggagacatcaacctcggtgaatactgtaaaattcgatgtcttgaaccgtgttagcatattgccttgaatctgtcagggtgtgacttgctgttttgtggtattaacggcttttcggctcaattattgtcttacagtgaagacaataggtgggcctgagggccgatgtgggctgagggcggggattagtgttgttgttctttgcgcttgtttttgccggcccataggtagaagaggcaggtggcggcgagggtgatggcggagccgatggtgtagcccagccagcgggggatgacggagccaaagccttctttctcggcaacgaagaggaagcagcccgtgaccatggtcatgaacatggcggggaggagtgtgatgatgtagggtttgcgtttctggcaaaggaagacggtgatggtccagagggtgacggtggcgagcacttggttgctccaggcgaagtagcgccagatgacgtcgaagcctttggcatcgatgagggagtaaaccaggacggcggcggtgatggcgaagatgggcagggcgacgaagaggcggtttttgatgggtttttgctcgtagtggaggaaatcggccactatgagacgtgcggagcgcagggcggtgtcgccggaggtgatggcggccgagatgactcccagcacacagatgacggcgatggctttggggaaccaggtgttggcgatgacgcccaccatggcgttgccgcccagggtggcgccggtttcggggttgacggtgagggactggagcatggggtcgtggtagaagacggtggcggcggcagcccatatcagggctacgatgccctcggtgatcatggctccgtagaagacggggcgcgcctggcgttcgttggtcatgcagcgggccataaggggcgactgggtggcatggaagccgctgatggcgccacaggcgatgctgatgaacatcatggggaagatggggttgtgggcagcgtcgggatgctggttttgcaggccatcccagagttcgggcagctcggggcgatagaccaggaaggccaccacgatggccacggccatgccgaggaggaggaagccgaagatggggtaaatcttgccgatgagtttgtcgatgggcaggagggtggcgatgaggtagtaggcgaagatgacgcccacccagaggaagatgttccagtcgggggtgaaattgttgttgagcagcacagccggggtgttgacaaagacggctcccacgaggatcatcagcaggacggtgaagatgcgcatgaactgtttgggaccgttgccgaggtaggcgccgtggatttcgggcagcgaggcaccgtcgcggcggatggagatgacgccggctatgaagtcgtggacggctccggcgaagatgctgccgaacacgatccagaggaacgaggccgagccaaactgggcgcccatgatggccccgcagatgggaccgacgccggcgatgttgaggaactggatgaggtagatgcgccacggtttcatgggcacatagtcgacgccgtcgggatgggccacggcaggggtcgtacggttggggtcaatctccactatccgctctataagcttggaataaagcagatagccaagcactaataacacaatagcaagtagaaatgataccatgatatttaattttttgaacctgcaaaggtacatattttttttcatatagcacacttttttctgttctgacggatttgaggggtggcgtcacggggtcgtgggcgaagataaatttgcacggtattagaaaaaaatgtaactttgcctgataaaaacaagaaaactttctcatcatgaaaaaaagcttatcaattgtagtcatggctgttgcgctgatgggcagcgtttcggcacaaactcctaaaagttctttcacgctgaacacccgcgcgtggtcaaccaattattggaccacaatcctctacggtttggcgcagggcacggtgacctattttgcctttgacggcaacgcgaccgactcgctcatagcccgcgccgtcatcccggcggccgactgggtgttccccatcgggatgcagaaggccggttttgccggccccaacgacatctacgggccttaccaccgggcgttcagcaacccctttaaacgtccgggcgactatggcatcgggctcgacgcatcgtggaaaccatcggccatcggcctctatgccggcgcctatttcaagagccaggaggtgtgcttcatggctaacgatgccagtctgcgcggctactatttccagccccgcgccggagtggtgctcggcgggaggaagaacgccattgaggctggcgtgttctacgacaaggtggtgggctgcggcggcacctgggaaccccgctcacaggatatgctgctgggcggctggggactggactttgcgctgtcacgcaccatggccaaagggcgccagaaaaccgtgctcatgttttccatgcccctgcacaacttcttcaaccccgactacgccgacggcagcctccgcaacctcaaccgccgcgtgggctacatcatactcacccaccgcgtggtgctgtagaacttacgccatataaggatatgtctgtgggagttcttcagtctttcgactgcattatcttctcacatcctaactctattagttattgatacaaacaataaaagataaggtatcatgcatcttcataaagagcaaaaccaactaacccataaagtgttatgatacaaaaaagggaacacgcaaacgcgcactcccaagatactcttcggcttatagccttattgtgaaaagcttaaaaagtgatgcaaagatacacataaaaaccgacatactgaaaaaaaatattcaccatggcacaaaaaataatgggcattgaccttggaacaaactctattggactggctttaagagaccctgacaaaagcacggatatttccgatcaattggtgtattttacttccatagtcttccctaagggtgttgggaatggtcaaagtggagaattttcctatgccgcagaacgaaggagatttcgttctacacggagattataccaggcaagaaagtatcggatctgggccacactcgagctcctaatcaaccatcaatgttgcccgctgaccattgacgaccttgaccgttggcgcaaatacgataagacaaaaggcctgaaaagacagtatccaattgatgccatcccatttgagcaatgggtaagactggactttaacggagacggcatccccgactatcgcagtccataccaacttagagaggaattgaccctaaaacccattgactgggatagccaaattgaccgatacaaatttggtcgtgccatgtatcacattgcccagcgcagaggatttaagagcagcaaaggtgagacattaaaagacagcaaggaatccgaagacttatccaacattgagataagtgcctcgatgaaaaaatcggaagaaaagaagtccaagagcctaaaagattatatggaatctcacaatctcaaaaccgttggatgtgcctttgcccaattagagagagaaggtatccgcgtaaggaacagcatttatcaagccgtacaatcgcaatacttagatgaagtccgtgaaatctgtctctttcagcatatcgacaccatcgaccattcgcttttcaccggactaaccagcaccaaagccaaggaaggcactatcttctatcgccgaccactacgctcacagaaaggggctgttgggaaatgcgtattagagcctttcatcagaagatgtcctacaagccatccggattacgaagaattccgagcactatcattcatcaacaacatcaaattccgctgcaacgatcaagaagaatggaaatctctatccccctctgaacgagctaacctatacaacgattgcttcacgcgcacgaaaccgaccttcaggtttgaagagatacgcaaatggttagaaaagagttatcctggcaatcaattcagctacgacaaccacaccatcaattatagggattacacaactgttgcaggatgtcccgtcatctgtcggctgaagaaaataatgggtgatgattggcgcacccacatatttacaaccaataggacccgaaccaactatcatacgggagaagctcattcaattgcatacaactacgaggacatttggcatctggcatacagcagcgacgactatgaagctctggcagaattcgcacgagagacgatcggatttgaccaaaaacaagccgatgagcttacccgcctgtggagtgtcatacgagaaggatacgcatctctaagcctaaaggccattcgtaacatcctaccattcctgcgagaaggaatgatttacagcaaggccgtagcccttgccaagattcctgacatattaggccgtgactgctgggaggaacatcgcgacgctattatggctcgattagatactatcgctactgaaaacgattatgaccgatgcgtattgagtatcaccaattctttaatttccaactacaagtctcgcaccatcgacaaccaacaagcccatcgcaacactgcgtacaagttggacagttcagacaaaaaagatgtgaagaactgtattatcgacaccctaagcactcgacgctggaacaatatgactcacagtgagcaaaacaacctccaacacgatgtcgaagacttgtaccagcaattcttctcctccacaaagcgtgagtactacaccataccacgccaaagcgacaaattaaaagagagcctaatcaagcaattccccgaaattccctcaaaaaaatgggacaaactctatcaccattcaatgatagacttattcccatcccagaagtgtcaaaacaaaaatacgggcgacattgttatgaatataaaacaattggggactcctgacattggctccatcaaaaaacccgtggcactacgggcactccatgtattacgcaaaagcatcaaccagctgctactctctgggatgattgacgacaagacccgaattgttgttgaatcggcccgagacttgaacgacgctaactggcgtaaggcgattgagcgctaccaaaaagaacgcgaccgggaaaacagtgctattactgagataattaaagaatttagacccaattattcagcggaagatatagaaaaagggcgattactatttgaacagattgaaacgggaacaatcaacaaagagggtaacaactcactgacgagctcttcccacatggggaaagtaaaagccacaaaatttgccaccgacatgcagaagtacaagctatggaaagagcagaaattccgctgtctttatacggggaaatatattagtcttacaagcttgtttgacgacaataaggtggatattgaacacacaataccccgaagtatatctttcgacaactctttatcaaaccgcacattatgtgactctcatttcaatcgttattcgaaaagcaaccgcattccaactgaactatccaactatgcagacattaaagaacgcataaaaccatgggaggagaatgtctcacacatcaaatctcagatagaactctggaaaggttatgccaaaactgctccgactgtggagcggaagaacgaatgcatccaacaaagacacatgtgggaactggagctgaattactggcaagccaaactacgcactttcacagttatgaaagatgatctcgaccttggattccgaaacagtcaattggtcgacacccgcatcatcacaaaatatgccttccactacttaaaatccgtcttcaaccgggttgatgtgcaaaaagggagcgtcaccgcagatttccgcaaaatcctaggcattcaaagtgtggatgagaaaaaagaccgggagaaacattctcaccacgcagtcgacgccgcagtcctcaccatgatacctgtagccgccaagcgcgaccgaatgattgagctattctacaaaagccaagaagccccagactctgaaaaaggttcctacttgcaccaactgaaagaagagattaaaacatgtaatgtggggaatatatccaaacttgttgatactatcgagaagaacattctcgtaaaccatatctcaaaagaccaaacgctctcacaagccaagaagccacgctattctggcaagaaacggattaaagaccaatggctgcaaggggattccatacgcggaagtcttcacaaagaaacattctacggagcaattcaaaacaataataccgtgcgtttagtcgtaagaaaagagccccgaagccttggcatcaaaaacaataaaagaataaaagactacgacgagcaacgcatcaaccttattgtagacaaaaaaataagagttgacattgcttatcaagtaaaatactacatgcaagaagaaaatctaacctttgcagatgctctcgaaaaggatttctattgcttagacaaaaatatgaaagccatcaaactcgacaaaaacggtcgtcccatttcgcatattagacacgtccgatgttttgcgacttctgggcaaggggagttacaatatgatacagcactatgtatcaaaacacaaacttacccttccagatgcaaatacaaaaacaattattatgttcaaaacgatgataactatctgtgcctatactataacaatgaagaaaaagaacataaagcattccgacttatcagctattacgatgtcgcccaactgcatataagaaacgtgaacgcattgtttttagaacccgaattcgccaccttgaagaaagggaatcgaaaacacggagcaactgaagacattagactcaaggctattattaaaaaaggcacacgcatactattatacagcaattatccagaagaagtaagagactacgataaagaaaagttaagcaataacctatatgtcgtatacaaattcaactatatcaataaaccttacatctacatatacttaaaacaccaccttgaagctcgggaagaaaagaaaactcacaaagaagaaaactcgtaccttcgctttaccgccaataagttcaaagcacttatcgaacacgtagatttcgaagtggacccgttaggaaacatcacattcaaataacacgccctgccatgattaagcgcactctctgtttctccaaccccgcctacctctccatgcggaaccgccagcttgtcgtccgcctcgaaagacacgccgacggcgaccagcccgaagtcaccatccccatcgaggacatcggcatggtagtgcttgacaaccgccaaatcaccatcacccatggccttatggccgctctgctggacaataacgcctctgtcgtcacctgcgacgagagccatattcccgtggggcttatgctcccgttggaaggacacacggtgcaaagcgagcgttttcaagaccaattgggcgcctccctgcccctccgaaagcagctgtggcagcagactgtcgggcagaaaatcttgaatcaggccgccttgctgcgcgaactctacggggcagagacgggcaacatgcagcagtgggccgccgatgtacgctccggcgacagcaccaatctcgaaggccgcgccgccgcctactactggagccagatgttccccgacatcagaggcttcacccgcggccgcgacggactgtatccgaacaacttcctcaactacggttatgccatcctgcgtgccgtcatagcccgtgccttggtcagcagcggactcctccccaccctcggcatccatcatcacaaccgctacaacgcctactgcctggccgacgacatcatggagccctaccgcccctacgtcgaccgcctggtggtacaaaccatcggccagcacccccgcaccgccgaaatcaccactgacatcaaacgcatcctcctcaccattcccaccctcgaagtgcgcatcggcggacagcggagcccactcatggtggccgcctctcagacctcagcatcccttgcccgctgctatgctggccaaatccgccgaatctcctaccccgacatgtaatggaccgcttctccgaataccgcatcatgtggctgctcgtcttcttcgacctccctaccgacaccaaaaaggaacgcaaagctgccgccgacttccgcaaacaccttttggccgatggtttcaccatgttccagttctccatctacgtgcgccactgcgccagccgtgagaacgcagaagtccaccttaagcgggtccgctcactcctgccacaatacggacaggtgggctgccttaccatcactgacaagcagtttgccgacatcgaactctatgtctgcaaaaaagaagtgccacccaatgcccccggccaacaactcgaactcttctgaccataggacaagaaaaacgcccacacataaccaaaaatcccgcccaaatggacgggatttttgattccattgacattcgattagacattatatatcagacgactacacacatcatggtgtttatcgtatgtgtcaatgtcctctttttaagcaattcacaacctcaggccattgttctatgattttgtctgggtgtttatcgtatgtgtcaatgtcctctttttaagcaattcacaacctgcaccgagagcgaccgcgtgatgcacctggtgtttatcgtatgtgtcaatgtcctctttttaagcaattcacaacatatagcacgatagcgaaaaaattcgtatggtgtttatcgtatgtgtcaatgtcctctttttaagcaattcacaactgcagtctattactctatcacagacctccgggtgtttatcgtatgtgtcaatgtcctctttttaagcaattcacaactaccactcgagagggacaactatctttgcggtgtttatcgtatgtgtcaatgnnnnnnnnnnnnnnnnnnnnnnnnnnnnnnnnnnnnnnnnnnnnnnnnnnnnnnnnnnnnnnnnnnnnnnnnnnnnnnnnnnnctttttaagcaattcacaaccaatggctgtttcaatgttccacccaattggtgtttatcgtatgtgtcaatgtcctctttttaagcaattcacaacctgcttgcttgggcagggcctcggaggtggtgagtttcagaaaaaggggacggagaactatgttccccgccaccttagtagttttcacaacggaataatccttattgtgaattgcttaaaaagtgttgcaaaaatacgaagaaaaaacgacatacacaaaattattcaacaaaacactatgtaccagctattttctcgccgagcaccatacatttgcatcgccagagtttagtgctgaagaatctgtttggaacagtatttgaaaccgaagatatagcaacggaaaaaaggcatgaagacgcctcctcgtaatcgaacagaacgtcctgtttgatcgtaaacgcacttgaaccggaatcttcggcttacttattcaccctgttgccagcatggccagccacaaccgaagcctttgaggacaatcggaactatgtctcaacgcttatccacagtgtacatgaccacgagatctgttctacataagttagttgtggaggtatgggacggcgtgtggggttggggctttggtgggaggacgagggcatgagctgcgcttctatcgacttatgacgggggatgggggggcgaggacttcggggttgcaggtggccgcttatattggttgtcttttgttctttattcctgttttgattctcttttatttctgaataagaagtcaaatgggaaccaatacctatagacttgttggaaaagtatgggaacgagggtatcagtgcttattggttgtcttactgggcgggctgaggtaatccgatagcaggtttggctgtggagtgcctggctgagcggggttgcggagaggaagaagcgggtgggttgcggaattgcggaagtggagaagactttgaggcggctcgagcggggctgagggggttgcatttgtttggtctgtttattctccgcgccactggggctggggcgggaggtgggtcaaaggtatttggaaaagaggttctgtaccagttcttggtcggccgggagccactggacggtgggcagtaggtctgcggtgagccatcgggcagcgaggtgttcgttgagggtgaacgagggggtggtgaggtggcagaggtagcagtgcatggtgaggtggaagtcggggtaggtgtattgtaccgtggtgaggtgccggaggatttggatgtcggcgtcgagttcttctttgagttcgcgggcgagggcttggtggtgcgattcgccgtttttgattttgcctccggggaattcccaccagcctttccaggggccgtagccgcgttgggtggcaaggacggcggagccttgctggcatacggctgccactacctggatttggggcaggggttgcgcgggggcaggggttgaatcggactgattggtcgatggggtgttcatgggttgcagtggtttggaaaaaaatgctccgccaacccgtggcggagcacaaaaacaaaaattatgaaacaaatgctattgtatatcgtttttgtcgaggggttgggacaggaggcctgtgaagttgccgcccgagtcgaactccatgcgggtgtatttgagtttgttgcccagaccacggactttctggcttatgaccacgtaggtgtagggtttgggttttttgccgtcgacacgccatttggagtcgtaggtgtagactatcatgcgttcgattttgtagctctcgcctttgtatttctgttcgaggtatttgacgatggcggcggtgtagtggtttttgtcgagcactttgccggacatgacatgggcgtcggaggccacgtcgtatacttcttccatttcgacgccttggcggttgatgtagtaagccacgacgaggctgggcacgcggttgacccattcggggccttcgaccaccttggagggcgggcagattttggcgaagtgggcggtgatggtgggtgtggtgtcgatttggatgacttcggggacgtcctcgacgggtgcgggacgtttgccgcctttgttgcttttgaggttgcggaggtgctcgtcgtcgacatcgtcgtcggggttgttgagggtgtagaactcacgctttacggcgtcggggtcgggggcgttgcttttctgcagacggccgcgggggtcgaagataagctcgttgtcgtcgtatcccacgccagtcttgacaatcatcatgcggtagtatacgtcgccgtccatctgctcgacatagtcgatggagcggatgcggtagccggggtagttgtcaataaagtagcggttcatggcggtggggcagtcttcttgtctggtggggaaggagctgtactgccagtcgccgttgtgggtgaagtaggcacggccgtgctgcccgtcgtagacgaattcggccacatattgtccgggtgaacgataccaggtcttcaccttgtaggagtcgtactttctgtccagggcgttcaaaacggatttgggcacctgggtctctttaatcttggtctgagccattgtggccaacggcaggaccagaaggagcaaaagaactatctttttcatttattcaaaatattttgccctcaaaacgagctatttgtttttttattgcctcaaaagttaaaaaaatattcgccagcgaacacaaggtgttggattacagccttattctctgccatattggatagttgacgggctatttgaagagtacgtctttgcggtcagggctgatggagacggctttgacatgtacaccggtggctatttcgatggcgtcgaggtagttgaggaggttttgggggagtgctttgtattcggtgatgccgacaaggctttgtttccatccggggaaagagcggagttgcggcttaatttccacctcgttgaattcgaagggaatctcctgggtggtgaggccgtcgatggagtagttgacacacatcttgatttcgtcgaagtcgttcatcacgtcgggtttggtgacgaagaggtcggtgacgccgttgagcatgcaggcgtaacggagggcagggatgtcaatccagccgcaacggcggggacggcctgtggtggcgccatattcgtggccgatgtcgcagagttgtttgccggtttcgtcgaagagctcggtggggaatggacctgcgcccacacgggtgcagtaggctttgctgatgcccatgacgcgtcctatgcgtgagggggctacgcccagaccggagcagacgccagctgtgatggtgctggaggatgtgacaaagggataggagccaaagtcgatgtcgagcatggaaccctgggcgccttcggccaggactttcttgccttggtcgaggcagtggttgatgaagtattcgctgttgatgagctggaattgtttgaggagcgtgagtgagtcgagccattgcttctcataatcgtcgatggccatgccgtcgattttgaaggaggcgatgtcgaaattgagggtgtgagcggtctggaggtgctgacacttgaggagttcgtatttttcacggaagtcgatggccatgatgtcgcccacacggaggccgctgcgtgcaatcttgtcggtataggcggggccgatgcctttgagggtggagcctattttagcattgcctttggcctgttcgttggcggcgtcgaggagcctgtgggagggcaggatgaggtgtgccttcttggagatgaacaggtttttggtggcgtcgacacctttctggcggagggcttcgacttcgtgtttgaagatattgggttcgatcagaacgccgttgccgattacgttcagtttgtcttcgtggaagataccggaggggattatgtgcagaacgtgcttggtgccgttgaattctaaggtgtggcctgcgttgggaccgccctggaagcgggcaataacatcatagtcgggggtgaggacgtcgacgattttgccttttccttcgtcgccccactgaagacccagcagaacatctacattgctcatagtgatatgtctttttgcgttgttagtgtttcaatatcgtatgcaaagatacggtttttttttcaattagagatattttttcttcagcgggtgcaatgccttggttttatgtactgatttatcagcctgttatcttgttggtcttggggtcgcagctacagggtgtgggtgctggcgcgcttgcataagcgggtggcagcttgtctggttgacacatttgggggcaattgcacggcggggtcacccattggctctgtcccgctgctgcttgaaccattccacaaattcggggaggtcgtcgagcggacggaacccggccttgaagggttctttgggcatggggcagagctcgacatagccgatgagggtggtgcagtcgaactcgccgatgagtgcctcgatggtgacatagacgccaaccaggaggtcgtcgtcgtcaagctggtcggggcggggactgatgccgttggcaaggtcgggcagggccacgcgcaagcctatgatgtctggctcttcttcgttttcgagctgcatgaaggccatcttggaggtctcgaaacggtacttgtcaaaaagcactttgagggctttgcctttgggttggcggaaggggacgaactcccaccagtcgatatcgggagcattgtcggtgagttcgacaacatagcggaagaggtcgaaatcgccttcggcgctgatggtgagggtgcggccttgggcggtttgctcgcctatctcgaaggtgaggccgtcgcagtaggcggaaagctgttgctgcatttggtcgatgagttgctggcgggcaggctcgtcaaggtcgttgagcatggtgagacgctcgttgttggctataaaccagttccagaattgttcgggatgtttgtcggtagggttcatgggatggagtttgtttaaatgatgattgcttctttttcgagggtgacgccgtagaggcgtttgacgtcggccgtgatggcgtcggccagggcgatgacttcgctgcctgagcagccgcccagattcacgagcacaagggcttgtttttcgtatacgccacagcggcccagggtgcggcctttccagccggcatgttctatcagccaaccggcggcaagtttgtagccatcggccacgggataggccacaatgtcggggtggtgggttttgagttgctcgtagtgctgaggggtgacgatggggtttttgaagaaactgcctgcgctgcctgtttcgtcggggcgcggcagcttgctccatcggagtgaggccactatgtcggccagctgacgggccgtcgggtggacaagccccgcggcggagagggcgtcggacaatgctttgtagttgacctggggggtgaaggtggagctgagccggaaggtgactgaccagactatgtactgcccttgaagggactgtttgaaaatgctggaacggtagccaaactggcattcggcattggtgaagactttttcttgcccggtggctgtatggatggcgcggacggaatgtatgatgtctttggcttcgagaccgtaggcgcccacgttctgaaccggggccgcccctacggtgccggggatggcggccaggttttcggcaccatgccagctgttgttgatgctgtgctgcacaaaagcgtcccattgctcgcctgctgctgcctcgacgaggagagtgccagaggtggagtcggtgctgagcagatggattcctttgttttcgagatgcaggatggtgccatgatagtggcccgtgaagacgacattgctgcccccgccaaggacgaagaaaggagcgctggacagtgtgccttgtgctatcaagtcgagcagctgctggcggtccgtcacttcaatgtagtggtcagcggtggcgggaatgccgaaggtattgtatatcataaggcgcagaacgggttagaaaacatatccgatattgaggtaaaggctggccctgtgggtgaagtcgttccagttgaagtcgagcgatacggggcccagcgggctgtcgtaggcagcgcggagggcgaatccgaagttgaagtggtgcgacgcatcaatacgtctgggccagtcggacgagtagatgacgttgggcatgaaatagaggtagactttactgaacagctgatagcggaggtcaacgcgggctatggcggcgaaatcgtctacccgaatgggcctgatgagacccataaaagccaactgatggtcgaggtaacgcccagggacgctgccgcccaccaagttgtcgtaccatgcggaacttttgctcaccaccagccgtgaattgagctgggggataacggtgatagtgggggtgacttgcaaataggtctgtgcggagatgttgaagtcgagaaagctgaggtcgagctgtcggaaaaggttgttgttgtccacatgccacccgatgtcggccaggccataaaagccgcgtgtggcgaaataggcattgtcgagattgtcgaaaaggctgtggaagaaagccccgaagaaccctttggcattatcgaaatggaacatgccgtcgtaaagcacgttgtcgagcgagaagctgtggccgttggagtagaagttttcgtcgataccaaaggcgaaagtgatgtcacgcaggtggaactcggacaggaaaaggctgaagttatggtggtttactttccacacggagtagcgggacgtgtcggacaggctaaggttgagggtgcagttgtggtagcgataggcgaagttgatgtcgccgagacccatattgcaccatgacaacttggtgccaaggcggatattgtaattgaggttggcgtcgatacccaacttgaagcctgacagccgctgctcgttgatgccgagatggaacaggagggcagccttttcctgcgagtcgtagcggaagcctaaggatagcaggtggggctcggccggttcgaactggatgagcagacggtaagagttgagagaggtatcgactggtgaaaccgtgtcgtcgggcagcagtttatacaggatgcttgcataggactctgtgcccatcagaatgccgatggctttctgtatctcgtcgatggttgacacggtgccactacgcaatccgcttttgttgatgagccagtgggcatcagttgcgagcacccctttgtatagaaccgatgacaaccagatggaatcgttgttctgtaccaccctgacccgtggggcttgcagcgttttgctgcatgggccgtatgtttcgagcttggctttaagctccatcaactctttgtggtgggccttggcacagagatagccgcgggccaccatggtgtcgatggcgttcttgctaaagcttagcatattgtagccagtgatatcggggtgcatatagaggttgcaaagctggcggttctgactgcggttgttttggactgcgatgctgagatactgcgacaattgctggggcagggacttcatgtcctcgggattggtgcgcagctcctcggccagctctactccaataacgaagtctgctcccatctgaaggcataggtcaacggggaagttgtttactaagcctccgtcagccagaaggtgcccctcccactccactggcgagaaaacacccggaatagccatgctggagcgtatggctttggggaacaggccgtggtcgagaataacagagtcgcctgtgaggatatcggtggccacacagctgaagggaatgggcagttttttgaaatcaatggagtcgttgtagccaatactcagtcggttgaaaaggttgataaggctggcaccgttgattacaccgctgggcagggtggagagaatgttgaacgacttctccgcgaaattgcccgaaccgaaggggactgagaaaagataggtgctttgcctggcccggatggtagaggattggtagtagcggtccacattgttgctcatgtagaccgaccagtccatgtcggcaataagggcggccatctcgtcaggggtgtagcccaacgaatagaggcctccgataatggatcccatactcgtgcccgcaacacagtcgatgggtatgcctatctcttcaagatatttaaggactccgatgtgagccgcccctttcgcgcccccacc

SEQ ID NO: 3965 - DNA, 19104 bp, synthetic construct
  misc_feature 1..19104: note = Synthetic
  source 1..19104: mol_type = other DNA
ttcctcaacgagaatcggatatttgcgaggcgacagggtagggggcttgaatttgcaattctcaacaaaaaaggcttgccggttgcggcaagccttttttatgttctgttcacaaagaggaacaactattcgacaacgacattttcggcaatcgagccacgataggccggacaggtcttgtgcgaacacgaagcaatcgtcgctgcaaaaagcagcacgacggaaaggacagctatctgttttttcatctcgggattaattttggttgttattattaattgtcactataacgcgaaatttttttatagcgtatacgtgatgcaaaaaaaattgtttcatcgtaaacgtcgctccacacctggaaaagggtggggaatacggtttgaaaaatttgccttctaaggccctgtttttgttctcaacgtgattttgtatgaccaaacctgcgaacgtcgattaggcgtgaaatctgtaaatttacttttgtaatcggttacaaaagtaaccgaattgtatttttgtaaattgattaccttttgtaaatattacaaatgtatacgaggaaatatctgtaaattgggctttttacttgtcagtgagtaagtgtagactgctaaaatattgaactaatacatactaaatgtttttattaaagtattactataatgaaataggagcaaatcggaaatgggcaaaaatagcgttttataagatttaaaaaccttatatagtgtatcttatgatgtatattttaaattgttacttatgtaaacaatatgcttacaaaaataattttcactttgtttacagatgtttcaaaaattatttgtacttttgtaaatcgattgaaagtaacgttataaatgtaaaattatggttgacaggataaatctcattttaaaggccaaaaatcttacctcgcgacagttcgccgaggagataggaattcagccgtcgggtatgtcgcatattttgtctggacgcaaccggcccagtcttgatttcgttatgaaggttgtcaaccgatatcctgaaatcgacatcaagtggctcacccttggcgagggcgaaatgtttgtcagcccatattcgatgcctgttgctccgaagccgccggtacaagcggaccccgtcgagctggcagcggcagcatcgattccggcacaggcatcggtgtcagtgccgacacagacaccggtatcgatgccgtcacagatgccgccgcagacccagatgtcggtgccgccgcagacccaggtgtcgcaggtggaacaggaagttgcgccggcatccaaggcgcagccgcaatttgaacccgaccttttctcgtccttcgagctgccgtcggaacccgaagcggctcaaaatcctgtttcggtccagccgcagccttccgcaccgcaacctgtcgttgccgctccgtctgttgcaacggcacccgaggcgacggcgccgatccaggcctcgacacccggtcaggctcgtatgcctgaaacgaataatacggctcgactggctcaactcgacgagaatcgcgtaaacgaccagccgtcgacgacgggtgccgaaaaaccaaatctaacgaagaagaggatcgtgaaggtcgttatactttatgacgaccactcattttcagaatattaccctgaataaaagcagaacaccccgcatcccattcggggtgcggggcgttgtttgcgctggggcataatctccaccgtatttgctgtggagatttgggtgttcgcttgtcaatgctctatttcctgaaggtgcttggccagcagctcgtcgctcatatccagaagcgggagcgtcttgcgtatgtcctcggccaggaaatggtcgggatattcgtcaagaaactgctggtaggccttgcgggcttcagccttgcggccggcattgtcgagggctatgcctttctcgtagtagcattcgtcgaggttggcatagtcgggatagttgttgatcacgcggtcgtaataggccgtcatatcgtcaatatgccccattccgccagccacttgtgcagcgcggtgcaggtagggcgcggccatcgagtcggtggggaacgcgtcggcaaactggatatacaggccaatgattttgttgccttcagcggtgtcgacgcttcccatctgggcggcgttcatcagcggggcctctatcgagtcgatgctttggaccagttcgtcgcgcgtcggttcctgtgggcctctgttgcaggcggcaagagccagggcggctaatgttatggttattgtgctttttttcatattgcggtttatcttttggttgatttcttcattttgtattttggatgcactttgccgttggcgacatcgttgagcttgcgctttatcatcgttttgcgcagcgggctcaggcggtcggtgaatactttgccgtgcaggtggtcgatttcgtgttgtgccacgcgggcaaacataccgcctatctgctcctggtgctcgttgaagtcctcgtcgaaccagtgcagcactatgccttcggggcgcagcacgtcctcgtggatgtcggggatgctgaggcagccttcgttgaagtacttcttttcgccgacttcttcaatgatttcggggttgatgagcacgtggcgctcctcttcggggccataggtgtcggtggcttcgtcgtaggggcggaaaccaatgacaaccagctgtatggagcggtctatctgcggtgccgccaggccaacgccgtcggcggagtacattgtttcgaacatatcgtcgataagttgtttcaggccgggatagtcggccgtgatgggttgcgcctctttgcgcagtatggggtcgccaaggcctacaatgggaagggtcatatatggtttaagggttttagggttaaaggtttgaaaggttttagggttgaagggttaaagggttaaagggtttaagggttatagggtttaagggttttagggttaaagggtttaagggtttaagggttgatatataaaatgatatgtttactgtcgttttgtttcgtactcttttttctgcatatagttctgaagtatgagcacggcgctgacggtgtcgatcaggcctttgttctggcgctgcttgcgcgacaggccaccgtcgatcatcgcctggaaggcaattttcgacgtgaagcgctcgtcgatgcgctcgacggggattgaggggtagcgtttgcgcagcgtggcgacgaagggctcgatgaagcgggccgactcggaaggcgtgttgtcgaggtgcttggcctcgccgacaacgaagagctcgacgctttccttgcgcaagtattcgtcgaggtatgccgccagccggtgggtctcgacagtggccaatcctgttgcaatcagctgcaactcgtcggtcaccgccaagccagtacgctttctgccatagtcaattgccattattctgcccattttttcttttgctttttcgggctgcaaaattacaaaaatatttgcaaatggatgctatttgacaagaaaaaaagtttccaaacgtcaaaaaatgcattttgaaaataaagcggttacagaaaaatgatgaagaaatagcaattttttttgcccgtgtcgcgaaaagttagtacttttgcacctcgtaatcggcgttggactcgtttctcctttctttggtcctcgtcggttctggtcccttagctcagtcggttagagcagctgactcataatcagcgggtccttggttcgagcccaagagggaccacaacggcaaagcggtttctgcaaacggaaccgctttttttcatcttcgggacgaaaaaatagcattataatgaaaattattttggtatgtcgtttttttgacttatctttgcagtctgttataaaaatgtaaaacattaataaaaaactaacaattatgaatatagattggcaaaaccttccgtttggttacctgaaaacggattacaatgtacgttgctggtatcgcgacggcaaatggggcgaaatcgagatctcgtccgaagaaagcatcaacatccatatggccgcttcgagcctgcactatggtcaggaggcttttgagggcctgaaggcctatcgttgcaaggacggcaagatccgtatgttccgtcccgacgagaacgccgcccgtctgcagagcacctgccgcggcattatgatgcccgagctgcccaccgagcgctttgtcgagatgtgcaagctcgtcgtcaagatgaacgagcgcttcatcccgccctacggcaccggcgccagcctctacctgcgcccgctgctcatcggcaccggcatcaccgtgggtgtgaaacccgccaacgagtacctgttcctcatcttcgtaacccccgttggaccttacttcaagggcggtttccaggccaacccctacgtcatcacccgcaagtacgaccgcagcgcccccctcggcaccggtatctacaaggtgggcggcaactatgctgcttcgctgcgcgcacacgtcgaggcttgccacggcggtcagtatgcctgcgagttctatcttgacgccaaggagaagaaatatgtcgacgaggctggcgctgccaacttcttcgctatcaaggacggtgtctacatcaccccgaagtcgacctctatcctgcccagcatcaccaacaagagcctgatgcagctggccgaggatatgggcatcaaggtcgagcgtcgtcccatcgctgtcgaggagctggccgactgccaggaggccggtgcttgcggtaccgccgccgtcatcagccctatcgagcgcatcgacgaccccgaggccggcaagagctacgagttcggcaagaagcccggtcccatcagcaccaagctgtacgagcacctgcgtgccatccagctgggcgaggccgaggacaagcacaactggaacgtcattgtcgactgataggcagaatgtgtattctgcgcaaggcccttgcgcaggattgacttcgcatcaacgaaaaaaggaatcccgaaaaggggttcctttttttgtcggccagatgtcggtgccttgtgtatcttgtgccctttcgcgagccgtccgcaaggccatttcgccgttatttcttcgttacttcttcgttatttcgccgttatttcttcgatagggaatcgaagaaataacgttgaactaacgttgaacgatagtcgaaatggcggagcggtggcggggtggggcataaaaaaaggatgccgttgcgggcatcctttctgttgttttggtgtagcctggatttaggcaccgattttggccttgtaggcggcagcgtcgagcagggcgtcgacgtcggcggcgttggcgggtttgaacttgatgatccagccttcgccataggggtcgttgttgatggacgaagcgtcctcgagggcggtgttgaactcgaccacctcgccggtgcagggcatcagcaggtcggcaacggtcttgacggcctcgatcgagccgaaagcctcgccagcgtcgacggtgtcgccttcgcagtcgacgtcgacaaagacgatgtcgccaagttcgtgctgtgcgtagtcggtgatgccgacgacagcgatgtcaccttccattcttacccattcgtcatcctgggtatacttcaaattttcgggaatgttcataattttctgttttattaaaagtttattaattgatttactttgtttattttcagtgttgtacggtgcttggggctgttgtggtccccgatgtttcaggtttcaaaaatacactttttcgtcagtatggcaaaatttttttttggatgttggattttttttctatctttgcgtatcgaaataaggggcataagattgcctttttatattgcaataatctaaatcacaaagagttatactaaaatttagttccacctactgacgggaaaaatcaggattgtctgatttccgcagcatttaatttctatatgtacaatatttcagaactgtcagcaaaagctcatatcgaattgatagacattgctaaagagcttggcgtgcaccgggcggaccgattggagcccaaagagttgatatacaagattcttgatgtccaagcgaacaatcctacagacaatagtgaccagaatgcagagcagcctcagcagcgcgtgcgccacgcgcgtgtaaagccggtgccggttgccgagtcgaacgccaaaaactataaggctcacaaggagaaggctgcgcgtgcggcaaaggctgcggcacagcgtgtgccgcaggatgtgcagccgatagaggaaaaaacggccgaaggtgaaaaatacgagtcggagttcaacttgaacatcagcgacttggagattcccgttgtgcctgttgtgcccgaagtggcaagtccgcgcgattttttccagaaacgcaacagcgaaagcgtcgagacgggaagcggtgagcggaaaacttcgtacgaaaaccaaaacgaaaacgaaaagcgggatgcggaaggcgacgaggtgcctgtgcagccgaaacgccgtcgcggtcgcccgccccgcaaggccgtggaagcggaaagcggtgagcggaaaacttcgtacgaaaaccaaaacgaaaacgaaaagcgggatgcggatggcgacgaggtgaagatggagagcggagaggtgagaacggagaatgcggaagtgaaggctgaaactgctggaacgaagcgcagaggccgcaagccgcggaaagcggagaacgaagaggcggaaagcggagagcggaaaacttcgtacgaaaaccaaaacgaaaagctggatgcggaaggcggagaggtgaaagcggagaacggagagcggaatacttcgtacgaaaaccaaaacgaaaacgaaaaagtgaatgtggagaacgtggagaatgtggagcgtcgccagaataaccagcataagcaaaagaatggccaaaacggccaaaacggccagaacggacagaacgagcggaacaaccgcagacaggagttcccatatgaggttgaaggtttcgttgaggcggaaggtgtgctggagctgtcaccggacggtttcggtttccttcgctcgtcggactacaactatttggcgtcgcccgacgacatttacctttcgcagcagcagatcaagtcgtatggcctgaaggctggcgacacggtgcgctgcacgatacgtccgccacgcgacgtggagaagtatttcccgatggtcaaggtgctgcaaatcaacgggcgcaaccctgaggagattcgcgaccgtgtgccgttcgagagcctgacgccgctgtttccgcaggagaagttccagcttacgggtcatccgcaggagactttgtcgacgcgcatcatcgatctgttcacgccgattggaaagggtcagcgcggattgatcgttgcccagccgaagacgggtaagaccacgctgctcaaggagatagccaatgccattgcctacaaccatcccgatgtgtacctgatggtgctgctgatagacgagcgcccggaggaggtgacggatatgcagcgcagcgtcaatgccgaggtgattgcgtcgacgttcgacgagcctgccgagcgtcacgtgcggattgccaacattgtgctggagaaggcgaagcgtatgacggagtgcggccacgatgtggtgattgtgcttgattcgattacgcgcctggcgcgtgcctacaatacggttcagcctgcgtcgggcaaggttctgtcgggcggtgtcgaggcgaatgcgctccagaagccgaagcgtttctttggtgctgcaagaaagattgaaaacggtggttcgctgacgattatagctacggcgttgacggagacgggttctaagatggacgatgtgattttcgaggagttcaagggtacgggcaatatggaactgcaacttgaccgccgcttggcgaacaagcgcatctggcctgcaatcgatattgtgagctcgtcgacgcgccgcgacgacctgctggtgaagcaggaagtgctgtcgcgtatgctggtgcttcgcaaccagctgacggacctgaaccctgtggaggctatggagatgctgaagcgctttatgtccaacacgaagaacaacgaggagtttatattttcgatggacaagtgagggaagcggaaaacttcgtacgaaaaccaaaacgaaaacgaaaaaacggagaagtgagaacggagagcggaaagcggaaaacggagagcggaaaacggaaagataattcgtattgtcccttttaacttcctttttaacttccccttttatttccttttaactcctccattaactccctttaaccccgattttaaacttaattaaatatatgaaaagaggatttggaagcgacaaccattcgggtgtgagtcccgaagtgctgcaggccatcgctgaggccaacagggaacacgctttggcgtacggcgacgacgaatactgtgcccgtgtgggacagtgtttcaaggaggtgtttggtgcggatgccagtgtgtatttcgttttcaacggcacgggtgccaatgtactgaacatcgatgcgatgtgccgttcgcataatgctgtggtgtgtgccgacacggcccatatcaatgtggacgagtgcggtgcgccgcaacgcattgtaggctgcaagctgctgacggtggccacgcccgacggcaagctgaccccagacctggtgcgcacgcaactgcacggcttcggctttgagcaccattcgcagccccgcgccatctcgatcacgcagagcacggaactgggcacgctctataccatcgacgaaatccgcgccttggctgacttggcgcacagctacaatatgtatctccacgtcgacggtgcccggctggccaatgctgctgttgcgctgggctgcacgttcagggagatgaccaccgatgcgggtgtggactgcctttcgttcggcggcaccaagaacgggctgctgatgggcgagtcggcggtgatactgaacccggcccttgatgtggagatgaaataccgtcgcaagcagatggggcagttgtgctcgaagatgcgctttgttgccgtccagtttgaggcctacctgaaggagacgcctggcgaaaagccgctgtggtgccgcaatgcggagcacagcaacaggatggcgcagctgctgcttggcgagctgaggaagacgctgccgcaggtgaagattgtgtatcctgtgcaggtgaacagtgtttttgccgagctgccgcgtcctgtctggacggcgctgcaggaggagtgtttcttctacgactggtcggagagcggcaccgatgcggccactggtgcgccgacggacattgtgcgctggatgtgctcgttcgacacgacggaggatgacatccatcgtttcgtcggggctctgaaggcttgtctgcagaagtgaagtgtgagaacggatttaaagatttatggctatattattcccttcattctatgaagggagtttttgtatttaattgtgatatatgtagttggcggattatgcaatttgaattgttcaaattgcataattttttttgcataattatgttgcagtttgaaaaagaagttgtaattttgcaaaaaattaataatataaatgaaaagtacagagaatccttacaatcgataatagacgttaacgatacgctttgtcgtgaagaattgtcacaattaacattgaggcagaaggaattgctgtttgctatagctgaagagggggtagcttctaaattgacattctcggcattcataaaaagacatcgcctctattctgccagctcggtgcaagctgtaatgaaaaagttaaaagatgacgatgtaattgtggaagagaagggtctgtttcgtgttggcgacagaatttttggtatatggctaaaaatgatgacaggaacaactataaatgaaatattataagaaaagacctacgtaatcgcaggtcttaagaaaactcttcggcttatagccttattgtgataagcttaaaaagttttgcaaagatactatatattttcggaataaaaaaataaaattttcaatggaacaaaaaatattaggcatagatttaggaaccagttctttaggtattgcggtgagaaatgttgatttaggtagaaacattagtgaacaactagaatattacggttctataatatttaaatcgggtgtaggaaatggaaaaagtggtgaatattcatttgccgctgaaagaacaaaatatcgttctacgagacggctttatcaatccagaaagtatcgtatatgggctaccttaaaattactgatagcttatggttgttgtcctcttaagagtgaggatctcgacaagtggtccaaatatgataaaggtaataatttgaaacgtcgttatcctgtagatgccaaagaattcgaacagtgggtacgattggatttcaactgtgatggtatacctgaatacagtagcccctatcaactacgtgctgaattgatgaagcataaattggactgggataatcaaactgaccgcttcaaatttggacgtgcaatgtatcatattgcacagcgtcgaggttttaaaagcagtaaaggcgagacacttaaagaagcaggcgagaaagatgacatcgtttcaatagatattaaatctgaaatgaagaaatccgaagaaagcaaatcacgtatgttgaaagagtatatggctaacaaccatcttgaaactgttggttgtgcttttgctaggttagaaaaagaaggtataagaataaggaatagtgaatatcaagccgtacagtctttatacattgacgaaatcaataaaatatgcatatttcaacaaattgacaagaagttaccacaactttttaattgtcttataagtacgaagaaaggagagggaacaatattctaccgccgtccacttcgtacacaaaagcataatgttggcaaatgtacgctcgaaccaactcgtgacagagtgtctgtaagtaatccagaatatgaagaattcagggcgttatcatttatcaacaatattagatatcgcgcaagttctgatgatgattggtcaagccttgataatgaacaacgaaatcgcttgtttgatagtatttttactcgttcgaaagcgacatttaaatttgaagatatacgtaaatggcttgaaaaggagcataagaatcagcattttagttatgaggaacatactatcaactatcgtgacacaacctccgtggcaggttgtccagtgataagtagattaaaaaaaatattaggagaagactggcgtaatgcatcattagataccaatagaaaccgcataaataatataacaggcgaaatacataaagttagttacaattacgaggatgtatggcacttggcatatactagtgaagattatgaagaacttgcagaatttgctagcaaaaggatgcacctcgatgataaacaagttgatgaacttacaagactgtggagtgtcgttcaggatggctacacttcgttaagtcttaaagcagttcgcaacataacaccgttccttcgcgaaggaatggtgtatagtgacgctgttgcgttggcaaaaataccagatattataggttttaaaagatgggaggaaaacaaagcagatattcttttgaattacaagcaaattcagttggataacaattatcttcgtatggtatatcgagtaacaaatacattgatatccaattataaatcaaaggttcttgatgaacagcaggcttttaaaaatacacaatacaagatagatgacatagaccgcaaagaggtgatgaagtgtataatagaatcaataagcaaaaaacgatggatggaattacaggctaacgaacagaatcgtttgcgggaatcagtggaatttctatatcagcagtttttctcctcgtcaaaaagagaatactttaaaattcctctggttagtgacggcttgaaaaggtatttgtatataaagtttcccgatgttcaacaagaaaagtgggataaattatatcatcattcccaaattaacaaatttactttacaatcccctcaacaattgttatgtgatggccatatgatgtatgtgttccaattaggcacacctaatattggagcaataaaaaatcctgtagcattaagagctctctatattttgcgcaatacaataaatgaattgttggcaaagggaataatagacgaaaatacgcgtgttgttgttgaaacggcacgtgatatgaatgatgccaactggcgctgggcaatcgaaaactatcagaaagctagaaatgaagagaacagagccattgcagaggtcatcaaggagtttcgtccacaatacaatgatgccgacatagaaaagggacggttgctttttgagcaaaatatagtagaattagattcgcctcagcaaaagactaaagcagaacggttcaccatagattttcaaaaatataaactatggcaagagcaaagatttatttgcatttattctggaaaaaccataaatgtgtcagacctgttcgatgataatattatccaaatagaacatacgataccacgcagtatatcttttgacgattctttaagcaacaaaacggtgtgctttacttatgctaatcgtgaaaaaaacaaccgcattccggctgaattgtctaactatgctgatatacaggatagaattcaacattggaaagaaaaagtggagcacatcaagtcacagattgaaatatggaaaggcaaatcgcgtattgctactactgtagatcgtaaaaatcaatgcatacggcagaagcacctttatgaactggaattagactattggcaggcaaaattacaaacatttacagtccagaaagatgaacttgaatttggatttcgacacagacaactagtggatacacgcatcattactaaatacgcatatcactatctaaagtcggttttcagtcgtgtcgatgtgcagaagggtagtgtgactgctggttttcgcaagatattaggcatacaaagtgctgatgaaaagaaaaacaggaacaagcattcacatcacgctgttgatgccgccgttttgacaatgataccagtggcatctcaacgagacagaatgatagaacttttttatcgatacgaagaggcttgtgacagtgaaaaaaatacgttacgattattgatggacaaagaaatacaatcctgcaggcttggaactatcaataatattgtcgatataatagaaaataatattttagttaatcatatttataaggatcaaacactttccgtggcaaaaaaaacaagatttgtttgtggaaaaagaattgtaggacaatggaataagggtgactctattcgcggcagccttcataaggacactttttacggagcaattaaaacatcggacgatgaatatttgatggtggttagaaaacctttaaaaagtttgacagaaaaagacttagactgtattgttgatgctaaacttagaaaatgcatagaaaaacagatatatgattatatcgagaaagagcaactttcgtttgcaaaggcaatagagaaagatatatatatgttgtcaaaggaaggacaacaaataaaaagagataaaaatggtcgtccgatatctcctataagacacgttcgttgtaaagccaaggctggacgaggtctcttaaagattgatacaactataaagataaaacagcagacatacaaatctaaaaagtgttataagaacaattactatgtgcaaaatgatgataactatttatgtctatactatgaaggaacgttgcaaggcaagtacaagagatgtttccgactgattaactactttgatgtcgcacaacttaacctcaatagtacagactctttgtatgaagaaccagaatttaagttctttgaaggaaacaagatgatgcccttgaaagcaataatcaaaaaaggcacgcgtgtaataccttacatccactatccagaggaagttaaagaaatggattctgacaggcttaacaaaaggctatttgtggtttataaattcaatgagatgggaactccaaatatctatttggtgaatcatatcgagtcacggaaagaaaatgactgtgattcttctgaacgggcaactgagttttcgacacaagcaaacatttcttatctgtccctaaaggctgacaaatttaaggctttaatagaaaatgttgattttgaaattgatcctatcggtaatattgtttttaaatagtattaactatgatcaagcgcacactttgtttctccaatccggcctacctgtcgctgcgcaatgcccagcttgtgatacgcatcgaaaagcaggacgacagtcctgaacgacagaccacagtgccgatagaggatatcggtatcgttgtcctcgaccaccagcaaattaccatcacccacggcgcaatggccgcattgctcgacaacaatgcagccgtcgttacctgcgacaaacgccatttgcctgtggggcttatgctgccactcgaagggcatacggtgcagagcgaacggttccgcgaacaaatcaacgcctcgctgccgctgcgcaaacagttgtggcagcagactgtgcagcaaaagatactcaatcaggcagccctgctgcgcgagctgcacaatgccgaaacgggcaatatgctccactgggctgccgatgtgcgatcaggcgacagcacaaacctcgaagggcgtgctgcagcctactactggaagaagatgttccccgacttggatgactttacgcgcgaacgctatggcgatgagccgaatgctcttctcaactacggctatgctatattgcgcgccaccgtggctcgtgccctggtcagcagcggcttgctgcccacgcttggcattcaccaccacaaccgctacaatgcctattgccttgccgacgacattatggaaccttatcgcccctatgtcgaccgtcttgtggtgcagacgatgcaactctatccagatattagcgaggtcactaccgacatcaagcgcaatctgctgaccataccgactcttgatgtcgttattggcggtcagcgaagtccgctgatggtggcggtcagtcagacgacggcttcgctggcacgctgttttgctggcgaggctcgaaagataacctacccagtgctttgatggaccgtttcagcgaatatcgcattatgtggctccttgttttcttcgacctccctaccgagaccaagaaagaacgcaaggcggccgcgcgattccgcaaagaccttctgacagatggtttcacgatgttccagttctctatctatgtacgccattgtgccagtcgcgagaatgccgatgtccatctcaagcgtgtcaagaccttcctgccagaatacggacaggtaggctgtctgaccatcaccgacaagcagttcggacagatagaactttttacctgtcggaaggagacacctccaaatgctccggggcaacaattggagttgttttagtcttttattcaggattagaaatatcttctataaaactaaaaatcctgcccaattgggcaggatttttagtttctttgacattgtgcaagacattgttttagttatatttgtatacttcgtaatgtcaaatatctcttctaatgtcttctttttaagcaaatcacaacaaagtcgttataatttgaataacagtaacgaatgtcaaatatctcttctaatgtcttctttttaagcaaatcacaacaatgcttcaaaatacaaattggagatatctaatgtcaaatatctcttctaatgtcttctttttaagcaaatcacaacaagatatgattaaggatgttacagtaaatgggtgttaatcacctaaataatattatttgttgtaaccatctgttaatttgtcgtttgtatgatatgtcaaagtgcggtgttgtattttttaggaatgcaaaattacgaaataaatctggaatagggatgttgtggatgatttttattttgtgggttgggattcctgttgtgcgttgatggtgatgcggaagacggtgccttgtccagggatggagtatttgagggcgatgtgtcctttgtggtagtcttgtatgatgcgtcgtgcgagtgagaggccgagtccccatccgcgctgtttggtggtgtagcctgagttgaagatgtatttttgctgtgatggtggtatgcctttgcctgtgtcggcgaggtcgatgtggatgaggttgccttgtgtggtgagtatggtggtgaaggtgccgttgccttgcattgcgtcgatggcgtttttgcagatgttttcgatgacccattcgaagaggtaggggttgaggggtgcgatgacggggtggtcggggagtgtggtgacgaagttgactttgcgcggcgagcgtttttggaggtaggcgatggtgtgttggatgacttgtgtgacgtcctgcggtgtgagttcgggtgtgctgcctattttggagaagcgccgtgcgatggtgtcgagccggtcgatgtctttgcgtatttcgtcgaggtagggctgtgtgagggttttgccctcgaggtagtcggcccatccgctgagtgaggagatgggtgttccgagctggtgggctgtttctttggccatacctacccatacgcggttttcttcttcgctgcgtgctgtgcggaagaggttgtaggagatgagtaggaggacgagtgcaaggaagaggtagacgagtggtatgatgcgtaggagtcggagcatcggtgtgggctggtagtagacgtaggcggtgcggctgttggggagttggagtgtgatgggctggttttggtcggccatctggctgagtttgtcgttgagcttctgcggtgtgtcgaactgtgaggggttgatgttgcctgaggagatgacgttttggcgtgtgctgtcgacgatgatgactggtacgaggacgctgttgttggtgacttcggtgaggaatgaggtgttgaggttgtcgagtgtggcgcgcatatcgctgtagatctgggactggcggtagaggagtgtgaggggtatgccccagatggtgtagttgaagggtgggttgtcggagaaggtttggaggagttgtggcgagggtttggtgccgatgagctggcggtcttgctgtggggtgggtgtgatgttgccgcaggaggtgatgagggtgtcgcggttgaggatgatgaagggtgtgcgcgagctgtcgacgatgtaggatacgtatgagaggctgaaggcggcgtcggaggaaaggtcgctgttgttgaaggagcggagtacgtcgatgtagagtttgactttgcggcgttcgtcgatggcgacttcgttgaagaatgtctcggtcgatgatatgagctgtgctttctggctgacggcgctggcccagatgcgtactttttcttcttctgactggcgtatctgctgtgcgaaggtgttgatgatccagagggctgcgagtccgaggatgattgttatggacattatgatccacttgcctttgcgtggctttttgaatttgggtgctgtgtgtcgggctggtgtggtcattcctgtcgtgttgttttggctggatggatatgggctatggctgtggtgggtatgaggagtgctgcgttggcgatggcggcggtggctatgcttacgaggatgaagatgagggggttggggtcgatggggacgtatggcatcgagtagctttcggggtcgaggcggaggatgtggagatggtgctgtatgaggcagagtgctgcggcgacggcgttgccgaggatgagtgccttgaggatgatggtgttggctttgaggatgaagatgtggcggattgagcggttggtggcgccgagtgtcttgaggagtcctatcattgctgtcttttcgaaaatcattatgagtagtgcggagacgatggatgcggaggtgacgacggcgaggatgatgaggatgaggatgatgttggagttgagcaggttgagccaggcgaacattgagggttgctgctcgacgatggagtggacggcgaggttgaagggggtgttgtcctttacgagtgcgagggcttggtcgagctggctgaagttgcggatgttgatttcgtaggccgatgcggcgtcgggtggccagttgttgagccgtcggatgaggtcgatgttgccgatgatgtagtgatcgtcgaattcggcgaggtcggtgttgtagatgccggtgacgaggagtgcgcgtgcgcggtaggtgttgtcggcccagaagtaggtgcgtgccttgtcgccgaggttgaggtccatcttttgcgccagtcgctgcgagatgatgatttggttggtggcgttggtgtcgccggttgcgggcaggtgtccgctgacgaggttgcgtgcgaagaaggtggtgtcgaaggtgtggtcgatgcctttgaggatgatgccttgtatctggctgtcggttttgagcattccgcctttggtggcggtgggttggatgttggctatgaggggcaaatgcctgagggcgtcggcctcggacgggctcatcgtgatgtaggcgtcgtcgtagtcggcggtccaggcttggctgtggacggtgatgtgtgctccaaagccggtgactttgtcggtgatgttttgctggaagccgcgcaagatgctgacggccataatcataacgacaatgccgagggcgatggtatatgtagcgatgttgacgagcggccgcgagaagttgtgcttgtcgcgctgcaggaatcgctgtgctataaggtgttcgtatttcaattgttgatttttaattgtgaccagtgacctgtgaatagtgacctgtgaatagtgacctgtgacacgagctcgctcgtttcactggtcactggtcacaggtcactattcactcatcactattcactattcacaatcagaaagccattgcgatgtcgacaaagtcgtcggcgttgagcgaggctccgccgatgaggccgccgtcgacgtcggggttggcgaagagttcgcgggcgttgctgggcttgcagctgccgccatagaggatgctggtctcgtcggccacctgctgtccgtattttttggctatcagcgagcgaatataggcgtgaatctcctgtgcctgctcgggcgtggcggtcttgccggtgccgatggcccacacgggctc

SEQ ID NO: 3966 - DNA, 5829 bp, synthetic construct
  source 1..5829: mol_type = other DNA
  misc_feature 1..5829: note = Synthetic
ttcggatccacctcaatcatacgttcaataaacttggagtatacgaaatagcccaagagcaacaatacaatagctataatgaatgttaccataacaacttttttttgacctgcaaagatacgacattttttccgaatatccacatttttctcgaatgatttatgcaaccatagcccccgccccctcgaccaaaacaaccaggatagacacacgcagaagatttcaaaatgttaaaacctagaaaagaatttgcatttcttgatgattattcgtaactttgcactttcaaaatcacaataattctatggcaaatactacaccataaaataaataatggaacccacgcaaagcgcaggttcccagaaatcttcggcttatagccttattgtgaaaagcttaaaaagatgttgcaaaaatacaaaaaaaatccgaaatagtacaaatatgaatcaaaaaattttagggatagacctaggaacaagttctttgggattagcacttagagacctaaacaatggcactgacctcttccagcaattagaatatttctcctccatcatctttcaatcaggcataggtaccggaaaaagtggggaattctcatttgcctcagaacggaggaagtatcgatctcagagaaggctgcaccaagctagacgatatcgtatttgggccactcttgaattactgattgaacacgggtgctgtccacttacaattgagggactagaccattggcgcaaatacgacaaaaacagcgaaaagaaaagggaatatcccataaataacacaagatttgagcaatgggtacgcctagactttgatggagacggtaaaccagaatacagcagtccgtaccaactgagagccgagctcgtgaatcgtaaccttgattgggatattcaaaccgaccgatacaaattcggacgtgccatgtaccacattgcccaacgtaggggattcaaaagcagcaaaggtgaaacactatcaagtgccagcgaaaacgaagatttgacatccatcgatataagtaccgcaatgaaaaagtcggaagaaaagaaatccaaagacataaaactattcatggaaacaaataacctaaaaacagttggatgtgcttttgccttacttgagaagaatggaactcgtattagaaatagccaataccaggcagtccaatctttatacattacagaggttaacgaaatatgcaaaattcaaaaaatagacaccattgatccacaactatacagcaaactgataagcactaaaaaaggcgatggtaccatcttctaccgtaggcctttgcaatcccagaaaaggctagtggggcgatgtactctagaaacaacgaaacacaggtgtcccataagtcatcctgattttgaagaattccgagccctttcgttcatcaataatataaagttcagacttgattcaaccgagccatggcgcactttctcatcagatgagcgacacaagctattcagcgattgttttacacgatccaaatccactttcaaattcgaggacatccgaaaatggattgagaaagaatatcccggacactcctttagctatttaggccacacaatcaatttccaagacgacacaacagtaccagggtgtcctattatccaccgacttaaaaagattcttgacaatgattggcacagccaaaaaatctcaacagagaagaaaaggacagtctatcgcactagaaaaactcatattatagaatacaactatgaagacctatggcatctagcatacacaagtgatgattatgaacaacttgctgagcatgcagaaacagtaatgaaactcagtcctaagaaggtaggcgaagtcactcatctttggagttccatccaagaaggatacacaaccctcagtcttaaagcaattcgcaacatattaccattcttaaaagaaggaacaatctatagcaaagccgtgatactggccaaaatccccgaaatcataggaacaattcgctggaatgagaatcgtactactatcataaaagagatcgaaatcatttccaatacaaatgcctacaaacgttgtgtgttcggtatagccaacacacttatagccaactacttcagtgaacataaacttgacagtaatgataaaaataacattatcaagtgtacaatagataccatcagcgaaaaaaaatggaacggcctcagccaagctgaccaaacaaagctaatatcagacgttggtgaattataccagaggttcttttcttctcctaaaaaagactactataagacacctcggctaatagatgtcatcaaagatgccatgaccaacatgtttcctgatatagccaatgattcttggaataaactttaccacccatcccaaataagcatttttccccaccaaaaacccataataacaaatgacggaaactgcgtaatggaggtgtttcaacttagctctcccgatcttggctcaatcaagaatcctgttgttttacgatccttgcacgtactacgtaatagcatcaatcagctactcctcaaaggtatgataaacgaagatacacgtattgttgtagaaaccgctcgtgacatgaacgatgccaattggcggaaagcaatcgaacgatatcaaagagaacgagaaaaggaaaacgaagccattataacaataatcaaagagttccgtccaaactattctcagactgacatcgaaaaaggccgtcttcttttcgaacaaatagaaaatggctatagctataacaagcctagtattacgataaacacatcttacattgagaaagaacaagcaatgagattcgccatcgacatgcagaaatacaagctatggaaggagcagaaattccgttgcatctatactggaaatataattagtcttagtgacctttttgccgacaatattgttgacatcgaacatactattccacgaagtatctcatttgataattctttaaaaaaccgcaccgtctgcaatgctcattataatcgaacaattaaaggaaaccacattcctactgaacttgctgactacaataatatcaaagaccgaatcaaaccatgggaagataaggttcgtcacatcaaatcacaaattgaactttggaaaggcaacgcgaaaagtgcacctaccattgaacgtaaaaacgaatgccttcagcagaaacatatgtgggaattagagctagactattggcaaagtaaagttcgcacctttacaatagagaaggacgaactagcccttggatttcgtaatagccaactggttgacacccgcatcataaccaagtatgctttccattatttaaaaactgttttctcacacgtcgatgttcaaaagggaagcatcactgctgatttccgaaaaatcattggtatccaaagctctagcgaaaagaaagatcgaagtaaacactctcaccacgccattgatgcagcaatcttaacagcaatacctagtgctgccagacgagaccatatgattgaactgtattaccaattaactgaaacctccgaatccgagaagaagaatagcattaagaaagcgctgaacgacgaaatacaatcttgccacattggtaacgtttccaaccttgtcaataatatcgaacaaaaaattctcgttaaccacattagcaaagaccaaacccttacgccttcaaaaaggcaatttcgcattcacaacaaaagatactggaaacaaggagactccatccgtggaagcctccaccaagaatcattttacggagcaatatcagaccaacaagacaacctacgacttgtaattagaaagcccctaaaagacctaactgagaaagacctcaatactatcgtcgaccctgctttacaaaaagccattatatcccaagtacatcaagtaatgacagaacaaaatgtcacattcgccaaagccatagaaacaccaatatatatgacaaataaaaaaggcgaacctaccaaatacgacaaacacggcaacccaatttctcccattcgacatattagatgtttcgctaaagcgggcagaggtgaacttaaatacgatactgtcttaaaaatcaagcaacagacatacacctctaaacaaaactacaaaaacgtttattacgctcaaaatgacgacaactacctttgcctactttacgaaggaaccattaaaggctccgttcaaagagcattccgtcttatcaactatttcgatattgcccaacttcgtatacatgacccaaatacgctgtttctcgaacccgaatttgcaacattaaaaaagaaagacaacaaaaaacctgaagttatccacgattataaaacaatgccccttagggcaatcataaaaaaaggaactcgagttttattatacaaaaaccatcccgaagaagctaaggactatgacaacgagaaaatgaactcacacctatatatagtttacaagttcaatataatgggtacaccaaatatatacctaaggcatcatttagaagcccgaaaagaaaaagaatgcgataatcctaacagctatttatcccttaaagcagataactttaaggctcttattgagcacgtggacttccaaatcgacccgttgggcaacatttattttaattaatagccatgatcaaacgcaccctctgtttctccaaccctgcctatctttccacgaagaacaggcagcttgtcgcccgcatagagcaggtcggcgaccaacccgaacggacagccaccgtccccattgaggacatcggcgtagtcctgctagactgccaacagatcaccatcacccacgggctactctcagccctgatcgacaacaatgcttccgtcatcacctgcaacgaccgccacatgcccgtaggcctcctgctaccgctcgaaggacacaccgtgcagagcgaacgcttccaagaccaactcaacgcttcgcttcccttgcgcaaacagctgtggcagcaaaccgtccaacagaaaatactcaaccaagccgcccttttgcgacaactccaccacatcgaaacaggcaatatgcaacaatgggctgcagaggtccgatccggcgacagcaccaatctcgaaggacgtgccgccgccttctactggagccagctgctccccaccatcgaagatttcacccgtgggcgcgatggcatctaccccaacaacctcttcaactacgcctacgccatccttcgcgccgttatcgcccgtgccctggtcagcagcggtctgctccccaccctaggcatccatcaccacaaccgctacaatgcctactgccttgccgacgacatcatggaaccctaccgcccttatgccgaccttctggtagtgcaaaccatgcagcaattccccgacacactagacctcaccaccgacctcaaacgctgccttctcacagtccccaccctcgaagtgcgcataagcggacagcgcagccctctcatggtagctgccagccaaaccaccgcctccctagcccgctgtttctcaggcgaaagtcgccgactctcctatcccgaaatgtaatggaccgcttctccgagtaccgcatcatgtggctgctagtattcttcgacctgcccaccgacaccaagaaagaacgcaaggccgcggctgacttccgcaagaatctacttgccgacggtttcaccatgttccagttctccatctatgtgcgccactgcgccagtcgcgaaaatgccgatgtgcacctccgacgtgtccgcgccctgcttccgcagtatggacaagtgggctgccttaccatcaccgaccgccaatttgccgacatcgaactgtacatctgcaagaaagaagtcca

SEQ ID NO: 3967 - DNA, 23360 bp, synthetic construct
  misc_feature 1..23360: note = Synthetic
  source 1..23360: mol_type = other DNA
gactggcaccgaagacgaaggtggctcggcgccagtgatcgctgaagagaaacaccgcggccacaatcagccccaccaagaacacgcccatgagcgcccgttgcaggcggaggggtagcgacgagggcggcagggcccgatcgtgcgggttgccgctgagatccgcgatggggtcgacgcgctccacggatccggtattagagctcgcgctgggatagaccggcgagcttctccgcccgctccaccacattgcgcacgaggaaggcgcgggtcagcgggcccacaccgcctgggttcggcgatacggcaccggcgacctcccacacatcggggtgtacatcacccatcagttggccgtccttgcgggagactcccacatccagcacggcagcgcccggcttcaccatgtcggcggtgagcatgtgcggcacgcccgcgccggcgataatcacatcggcctgctgggtttccgccttcagatcggcggtgccggtgtggcacagcgtcacggtggagttctcggaacggcgggtgagcatgagcccaatggggcgacccactgttacgccgcggccgatcaccacaaccttggcgccgttcagctcaatatcgaagcggcgcagcagatgaatgcagccattgggggtgcagggcagcggggcgggctcgttgagcaccagcttgcccaggttcaccgggtgcaggccatcggcgtccttggcgggatcaatggcctcgagcacggcgttttcgtcgatgtgcttcggcagcggcagctgcacaatgtagccggtgcaggcgtcatcattattcagctcctcaatcacctcaagcagctcgccctgggtgacatcctccggcaggtccttccggatcgagttcacgccgatcttctcgcagtccttgtgcttcatgcgcacataggactggctggcggggtcctcgcccaccagcaccgtcgcgagccctggagtgatgccctgttccttgagtctttcgactttcttcgcaagctcgacgaaaatttcgtcgcggtagagttttccatccagtttcatcgcggtcatggatccattatgtcagacgcccgccgcgtaggatgggcccacgtgaacaccgcgcccgttaccagccccagcaccgccctgccctatgcccatgtggtctttgataacccggtgattcctccgaataccggcaacgccatccgcatgtgcgccggcacgggcgccaccctgcacctgtgcgagccactcggcttcgatctcagcgaaaagcacctgcgccgggccggtcttgactatcacgacctcgcccaggtgcaggtgcactcctcgctcgcagcgtgcctcgactcgctgcccgatgctcgggtcttcgccttcaccaccagcggcgctcttagccactcggaggtgcactaccagcccggcgatgtgctgctcttcggcaccgagccaacggggctgagcgcggcggcgctctcccatccccgcatcaccgctcaggtgcggattccgatgctggcggggcggagatcgatgaatctgtccaatgcggcggctgtggcggcctatgaggcgtggcggcagctgggctatccgggctgtgcagcgcagggagctggcgctggcggagccgattaagcagggcgtagccatcggcgctggcgatatgcttcagctccatctgtaccggcccctccaccaagtcgaggcggacgctcaccagccctaagcgctgctgcagcggcccggcgctgagcgtgagctcctgaatatgctccagctccactacgctcatggtgcggttgaagcgcccagtgtggatgacggcgtagtcctccaccaggctgagcccgcggtagtgatagtgcagcggccccaaccatcgcgcctggcggggagaacgcaccgttggcgagtgcacctgccctggctgcgccggcccctgcaggtgcgcgggttcgacctcgctgagcagcaggagtatcgcggtggccgtggcatagtcgcccaccggcagcaccgtagtggtggtggaggtatcgctgctatcgccatagccggccaccgacaccgtcaccttccaccagccgatgcgccgccacaatagcggctgggtgatggataccccgtgcacacggtgcagcggcactgtttgcgagcgacgctcggtgagcccatagcgcagcagcagctcatgggtggtggcattgtgttcagcacgaaagccccacgctcgattagcgaagcccaccacagagggtaagccaccgaggagtataggcagcacgatcgcgaatccggcgggggtgagcacgaccaggatgagcgccagcgccatgacgatggtggaccactggagggccagcgcgagcaaggcctggcgcacaggaacagcggccagcagctctggcgcggcggccgcggtcgctgcgggcgcggggctctcggcggctggctgttcagccgcggcactctcggtagcagcgggccctgctgcgtcctgttctccgcggctatggcgcagcacagtgtctttgacctgctcggcggtgtttttatctaggtactcgatcttcagcaccgaatcatcgccgcctgcagtttcaatgtgcacggcagcaagaccgcagatgcgggcgacgaggggctcggccacatcgacggcctgaatcctatcgcagcgcgcggaccgggattggcggctgaacacgcctttttccaccaccacttcatcgctgccgaggcgatagccattgcgcttccaccagatccgggacagcgcccacgtcagcccgagcacaagcacggtgccgccgatacccaccacgatgggtaggagggaaaaagagtcacgatcgcgcaggaaatcaacaatatcgccgaggagctcccgctggttgatgccgatggcgacgatcagcgccagcagcgcccgccagaaacgaatcagcggggtcagcgggtgaacgcgctggaattcggcgttgtctgcggtgaccgcgggcgcgccgttgtccggtgcggcggcatcggggtgtagttcttctttcacaggccgctcatcctctccttcgccttctcactcaggcgcacgcgcaactcggaggccacatcctcgggcaggcccggaatgctggagtcgctggtggaggacgcggtgtgcagctcgatgttcttcagtccaagagcacgctcgatggggccgttattgatatcgacgaactggatgcggccatagggcaccacggtgaggctgtagaacaggcggccgcggcggaccagcagctcatcctcggtttctgcccagccgattcgcgccacttgaactacggtgagccaggcgataaacgcgctgagcccagccatggcgatcgcaccaatgatgagcgcaatctgccatccgccagagacgaagtaggcgccgatggccatgccgagtgtcgcaaggatcagaacgggcatgcggccgataagccgcgccttcaccaaggctggggagacgggctgaaacgtcacgcccatggcgtcggcgtcgcgctggttgagttcggtgtgagaagccataggcccacttttagcacagtgcgcaccgtgcgcccgccgcttagcgaaagtcgcgggagcggatgtccagcatctccccgagggccaggggctcgaacttatcggcctccacggtggccgccccggtggcggtgcgcacgataccgcgcacgagcagcgcggtcgcggtgcgcgcgagccggcggtagcgcgcccacaacccaggcgagaccaccacattgatcaaaccggtttcgtcctccatgccaaaaaatactgccccgctggcggtctggggacgctggcggtgggtgatgatgccggccacgaggatgcggcggccatcctcctgcgcaagcaactgcgccgcaggtatcaccccgcgccgctcaagctcggcgcgaatgagctccagcggctggctggctggggtgatcccggtgctggccacatcggccaccatgagctcaaaggtgttcattcccggcagcggcggcgcggtgatcgccgagagccccggcagcatgccctgctgctcactggcagccactcccgccacccattgggtttggcggcggctaatcccgagcgccgcgaaggccccggcgcggccgaggctttccacatctcggacgttcagctcggcgacgcgggcgatatcagccaccgtcgatgccggcgagaggctgtgtcggatcttctcgagcctgtcggcagcctgccgccgcagccctgataccgagcacaaccccaaccggattgccccgttgtccacccgtggttgcacatccgaatccagcaccgagaccggctccacctgcaccccgtgccggcgggcatcttggatcagggattggggcgaataaaagcccatgggttgggcacgcagcagacccacgcagaactctgctgggtagtggtatttaaaccaggccgaaaagtacaccaaggaggcgaaggactgggagtgggattcaggaaaaccataggcggcgaaggccataattttcagccatagccggtgggcgacatcctcgtctatattgtgggtgcgtttacagcccgcatagaacttcgtgcgcagcgtctccatcctctctggtgagcgtttggagcccatggcgcgtcttaaagcatcggcttctacgccgctaaaaccggcggcgtccaccgctatctgcatgagctgttcctgaaagagcggcacgccaagggttttacccagcgcattttccaggcaggggtgatcgaactccacgggctcgaggccgttgcggcggcggatataggggtgcaccgagccgccctgaatcggccctgggcgcacaagggcgacctccactacaaggtcaaagaattcgcggggtttcagccgcggcagggtattgagctgggcgcgggattccacctgaaacacccccacggcatcggcgcgggcgagcatggcatagacctctggctcggcgaggtcgagttcccacaagtgcacggtgatgccatgctgctctgccacgagatcgatcatgtggtgcagggcctcgagcatgcctaaacccaagaggtcaaatttcaccagccccgcggaggcgcagtcatccttatcccactgcaccacggagcgtttgtccatgcgcgcccattccacgggcaccacatccgcgatggggcgatcacacagcaccataccgccggagtgaatgccaaggtgccggggctggccttcaaggctggccgcgagctggcgcacctgctctggtgggtcggcgatgccccgcgaccacgcatcacagctgccctgagcaaagccgagggcgcggccggcgtcacgtatcgcccccttatggcgataggtgatcacattggccaccatggcggcgtagtcgcggccataggtgtcgtagacatattggatcacctcctcgcggcggccagattcaatatcaatatcgatatccggtggcccttctctttcgggagagaggaagcgctcaaagaggagtcgcgcactgatcggctccacattcgtgatgccgagagcgaataccaccgcagagttggcggccgagccgcgaccttggcagagaatattctcccgccggcaaaaatccacgatcccgcacacgatgagaaaatatccagcgaagccgagctgctcgattacgtccagctcatagtcgatctgcgcatgggcgcggtgggcgatctcggtgggccgagacgcatagcgctggggagcgcgctccgtgaccagctggcgcagctgcgccagctcattgtccccgtggctgggcagattcggtgccacgagggtgagctgcacggcgcattcctccgccagctgcaggttctctgccatgagttcgctggcatgcggcaccatggtggccaatgccttctcccccagtagccagcgtccgcccatggggtcgagttccgcggcatgatcgaccacgctgcggcgcgcggcgagggcatccttcgcagcggcgagccgccgcgcccccatcgtggcggccgtggccacggcggagacagtcccccgcaggtgatactgggcgcgaagccggtccagctcagcgtgcacatcggcgtccgtggggcgacgagaaatccggtattcgaggcggatattctccggcccgaatgcgtcgatcagggcggggagctgtggggcccagatggcgtcgacaagcacataccagcgaccgccggcagcggtaccgagcgccgccagcgagggatagaccgtgtggtctttttcccctgcggtcatcgccgcggcggatataacgcggctgaggcggcgatagccttcaacgtccttggcgagcacacacaaggtggccggaatccccagttgctcgccgacactcagctcggcaccgatgatcgtgtccagctgatagtgcgctgcggcctcggcgaatttcaccacaccatagaggccatcgcgatcacacagaccgagggcgcggtagcccaattccacggcgcgagcgacgagttcttctggctcagatgcgccgtgtaaaaagctataactcgagcggcaatgcaggtccgcgatacgtccgtccgattgtcgaacatgcgctgcgttaggactagactgagcgggctcagtctggaggtgcccatcatagcggccagatagcagcctttctagctttgaccagctcaaagggcgggcattcacccccaagaagcagccattccattccatgcgccccacgctagcatgtttcgcacatctgttctagccaattattacacctcccgcagaccaagctgtacagattgaaacgaaggtgctagcgtagagcagcgtcaaatagacagctctttctactactttttctaaggatgttcccatgaagcgatttacccgcaccaccgccgccctggccaccgtggccctgtccgctaccgcgctggtagcctgcggcagcgatgattcctccaccatcaagctcggctctactgattccaccctgaagcagttcgccgcgtgggaggacgcagccaacgaaaacgacatcgatctcgaggttgtgaacttcagcgatttcaatacccccaataaggcgctggccgagggcgagatcgacgccaatagcttccagcacctgaagttcctcgccgagcacaatgtgggctctggcgatgacctcttgccgatcggctccacctacatcgtgccgctggcactgtactggaaggaccacgattccctcgacggcatcgagggccaagagatcgtaatcccgaacgatccctccaaccagggccgcgctatcaacgtgctggtgcaggcggatctgatcaccctgaagaatgacgtgaataaccccaccccggccgacatcgataaggataagtccaaggttaaggtgcagccggtggatgccgcgcagacccccaccggttggggcgagggcaagccggccatcatcaacaactccttcctggatcgcgccggaatcgacccgaagtcctccatcttcgccgatgaccctaactctgagctcgcagagccctatatcaacgtggtggttgtgcgcgccgaggacaaggacaatgagcagctgaagaagctcgccgagatctggcacacccaggctgtggtggatgccgatcaagaggacaccgccggcacctccgtcgccgtggatcgccccgccgatgagctgcaggagatcctgcaccgtctcgaggacgagatccgcaagggctaatccccgcaccacggcccccttttcctagggggcctttgtttccattcacctacgttttaaggaacatttcgctcgtggcacaacaaccacacgcggccgccgccggctccatcccttccggtactactggcaccgctattgaattccgcaacgtgtctaagaccttctccacgaagcgcggcacggtgaccgccctggataacgtcaatctcaccgtcgcccccggagagatcctcggcgtgatcggctactccggtgccggcaagtccaccttggtgcgccagatcaatggcctcgatgtgccgagctccggcgagattctgctggacggcaccaatattgtgggcatgccggagaagaaggtgcgccaactgcgccgccatatcggcatgatcttccagcagttcaacctgttttccgcgcgcaccgcagccggcaatatcgcctatcccctcgagttggccggcatctccaaggccgagcgcacaaagcgcgtccaggaaatgctggacttcgtgggcctctctgataagggcggctcctaccccgagcagctgtccggcggacagaagcagcgcgtgggcatcgcccgcgccctggccaccaatccctccttgctgctggccgatgaggccacctccgctctcgaccccgagaccacccaggatgtgctggccctgctgcgcaaggtgaacaaggagttcggcatcaccatcgtggtgattacccacgaaatggatgtggtgcgttcgatcgccgacaaggtcgtggtgatggaaaacggccgcgtggtggagcagggctcggtattcgaggtgttctcggatccgcagaccgccgtggctcgccgctttgtggccaccaccctgcgcaatgagccggacaatgtggagtcggatgatcttcgcggcaaaccggggcggctttttaccgtcaagctcaccgagacctccggtttcttcactgcggccggccacgcccgcgaggctgatgtgagcgtcgatattgtgcacggcggcgtgaccaccctgcagggtaattccttcggcaaggtcaccgtccgtctgaacggcgataatgccgccatcgacgagttctaccgctccctcacgcagaccaccgagattcaggagatttcttaaatggacaccacttatctcgcagctgactgggatcggctcggcgataccttcatcgactccatcttcgagaccctctacatggtgggcatcacgatggtggccggcggcttcttcgggctggtgctgggcattttgctctacaccacgcgcccgagcggcatcctgcacaactcgtttgtctacgccgtgctcaacgtgttggtgaacttcatccgcccgatccccttcatcatcctcatcgccttcatcggcccgctgaccaaggtggccatcggctcgaccatcggtaccggcgccgccaccttcgtgatgtcgatcgccgcgaccttcgccgtcgcccgcatcgtggagcagaatctagtggccatcgatccgggcgtgatcgaggcggcgcgagcgatgggcgcctcaccgtggaagatcatcacctcggtgatcgtcccagaggccttgggccccctcgtgctgggctacacctttatcttcatcgcggtggtggatatgtctgccatggccggctacatcggcggcggcggcctgggcgatttcgccatcgtctacggttatcgttccttcgattggaccgtcaccctcgtggccaccgcagtgatcatcgtgatcgtgcagctcgcgcagttcttcggcaactggctgtccaagaagatcatgcgccgctagttcggctcatcgcagcacgcttatcgacgcagcgtccccgcttcatcgggggcgctgttcgcattatccgccgctaccggctcatgccgacaaggccgcagggttcgcggaagaacaggacaaacatcagcagcactacaagcgcccaaggatgaggatgatcttttctcttgtgaatcacagtcaccgttcttcctacacttgcgcctatttaatcacgtgaaactagagaacccttccgcttcgctagagtaaacgtattcctctttcctgcgtatcagcctcactaacctccacatgggggatacatagccgattcgctggcccataaaaagtctcactgctagtatgagtggtgaactgaacctcagtaaacaccggctagtttccggttgtggaatgctccagccgggccttcgggtccggctcttttttatatctaggaggacacctcatgtccacgaggtatgtcgtaggtatcgacgtcggatcgtattcacttggatgtgccgccatcgaagtagatgaggctggaaatcctctccagctattgaataccgtttcttttatccatgattctggcgttgatccggactcaaataagactgccaacacacgtcttgcagtatctggtgtcgctcgtcgaactcggcgcctctaccgccgacgcaagcatcgcacgataaaactcgaaaagttcctcaaagctcagaattggacgacacgtccgtttgaggagtactccgatccctattttccgtggaaagctcgggtcgcactcgttaatagtttcatcgccgacggagcccaacggggagaatacctgtcggtggcactgcgtcacatcgccaaccatcgtggatggagaaatccctaccatacaaccgctagcctgtactcccccggtgaagcgagcgacgccttcaatgagattcgcgaaaacctcagcgaaaagactggccgccccatccccagcgacgccaccgtgggacagctgatctccttcgcgcaattcggccaccatcgcctccgtggcggcggcaaagacaaggacaagaagcacccagatcaggcaaagcaggcggtcatatctgctcggctacagcagagcgaccatgcgcgggaaatcaatgagatatgtcgtgtccagaaaatcgacgacaccctacggaaaaagatcattgatctcgtcttcgctgctgaatctcccaagggcgcgcaacaaggccgtacaggcaaagatcctctcaaccccacacaaatgcgtgctgctaaggcctccgatagcttccagcgctatcgtgtctccgcgctgatcggcaatctgcgcatcaaagaaagcacaggaaaaacgaggcgtctcaccgccgaagaacgagccttggtattcgatcacttgatcaatcttccggccaaaaaggacccttcatggctcgatgtcgccgccatcctgtccgtcgatcgcgggcggctgcggggcaccgcaacccttaccgacgacggtgaacgcgctggggctaggccgccggtgcatgacaccaatcgagtcatttcgcgctgccgcgttaaacctctcgttacctggtgggctacagccgatgccgctcaccgagccgagatggtcaaggcgctgtctaactccgaggtgatcaactttgactccaaggagggggctgcggttcaggcattctttgctgaattagatgatgaacagcacgagaaactcgattcgcttcacctgcccatcgggcgtgcagcctatagtgaggacaccttaacgcggctgaccgctcgaatgcagtcggaaaatatggacttgtatgaggcacgccgtgcagagtttggtgtctccgaagactgggctccgcccaaaccacgcatcggtgaaccagtaggaaacccagcggtggaccgtgttctcaagggaattgcacggtggatagaagcagccgaggccgaatggggcgcgccgcagtcaatcgtcatcgagcatgtacgtgatggtttctccagtgaaaacgttgctagggagatcactcgtgagaatgaccgtcgccacaaacggaaccttcaactgttcgcggagatgcaggaaaagctcaatatcgatggcgctgtgcgccgctccgatctatggcgctaccagtcgctccagcgtcagaacgagcaatgcgcctactgtggcgcgcccatcacctattccaatagtgagatggaccatatcgtgccacgtgcagggcaaggctcaaccaacgtgagagagaatctggtggccgtgtgccatcgctgcaacctcgcgaagaagaatattcctttcgcagtatgggcagaaacatgtcctatacctggcgtttccctcactgaagccctcgaacgcaccaagttctggcttcctgagcctggccagaagaagtcggattttaacgcgtttcgtagtgctgtctgcgaacggttgaaacgaacccacgatgatgagcccttagattcccgctccatcgagtctgtggcgtggatggctaatgaggtgaggggacgtgtcgcacagcacttccatgaggctgacaccagcgtccgagtttatcgaggcgccctgacggctgaggcgcgtaaagcttctggtattcacaagcgtctgcgtttcatcgatggccctggaaaatcccgtttggatcgccggcatcatgccgtcgatgcagcaattattgctttcaccactccctacgttgcgcaaaccctagctgagcgtgctaacaagcgccaagcagcttttatcgaaaacgcaccagatcagtggaaagaatatacgggagccgatgactcccaccgtgctgcttggaattcttgggtgcccaaggttcgtaaacttgcgcatatgctccaagcagcgctcgacgaggaccgaatcgttgtcacctccaatctacgactgcgactggggaatggacgtgcacacgaagatacgatcggagcactcaagaaaatccgtgtcggtggagaaatctctgccacagacatcgaccgagcttcctcggaggcactgtggtgtgcactcacgcgtgaacccgactttgatcccaaagaaggcctccctgcgaatccgaacaggcgtatccgagttcacggttcgtggttcaacgccgatgacgagatcgaggtgtttccagtcggggcgggttgcatcaaggtccgcggtggttatgcggaactgagccgattccatcatgcgcgcatctacaaaatcacatcgggaaagaaaccttcctacgcgatgctgcgcgtctacaatgtcgaccttcttcgtcatagacacgaagacttattcgctgtcgagatcaagccccaaacaatttctgctcgccaagcagaaccaaagctccgcaaggcgctggcggaggggagcgcagagtacctagggtggctcgttgtcgatgatgagtttgtgattgacacatccagctttaccactggacaaatcgccgggctgcaggaagttttcggaacagtgtcaagatggcggctcgacggtttttacggcgaaggtaggctacgtttgcgcccgttactcatgagtgctgaaggtattggctcggatgcccctaaagaggcgcgagtaatcattgaaggtcgtgggtggaccccaagtgtcaatacagttttcggcaaggggcagccaacagtcattcgtcgagactcgctaggacgcgtacgcctgtctagcgcagcacatcttcccgtctcctggaaggtgcgctagcatgcagtccggctggagggttgtagactgctcgaacctcgaggggaccattcgttatcgtcgaggtcaactggccatccagccggacaccgcatcagaagcagttaccgtcccgttgagtcatatcgcggtcgtcatggtcggaacgaaggtgaatatttccggcgcagtactcgcaaagctcagcgaatacgacattgcgctcctcattaccgattggcgtggggtacctgttgccggagcgagcccatggaatgaacacactcgtatcggcgcacgtcagcaggcacaggcttcgctttccctcccccgccgtaaacaggcgtgggcgcgaatcgtgagtgcaaagatttacggacaagcggcaaccgcgaaggcgctgaatagggagagctcccaccttttaaagaagctcagccgtagtgttcgctcaggcgacttagacaacaaagaagcagtagccgcgcgaatctattggaaagcgctctcggaaggcccagatttcagacgacaaccaggcgctgcttcggacgggttcaactctgcgcttgactacggttacacgcttcttagaggaactggaatacgggcagttgctggtgccgggcttgctgggacgcttggcgtgttccaccatggccgtgctaacgccttcgctctggtcgatgacctcatggagccgttccgtcctttcatcgatcagttcgtgttctctattctggaaccgacttcaccgctcaccgcagatcacaaacatcaactttcatccttccttcacagtcacgcattcaacagcgatggccagagtgtttctacggtctttcaagactttgcgcagcattttggcttatacgtcgaaggaacagtggatcggctacaggtgccacgttgggaagggcagctcagtgccagcgaaggacagtgaaccggtgtggtgcgtcgtaatgtttgatcttccggtcaagaccaaaaaccaacgtagggaagctaatcggttccgtaaccggttgttcgaccttggtttctgccgcgcccagttcagtgtctacgttcagtatttcccactggcggcgcgtctcagcacgatagtaaaacaggtgaaatgcgaacttcccgcaggcggtgaagtgcgtatcttgtccgtgacagaccagcagtgggcaaaggcgatccgtttttcgagccacaaggaacaagcggtcgagaaaatcccctctcaactcacgattttttaaaaacgcatgctgaaaaagacccagttcaggccctgtttctgggcctgactgaagtctatcaggggtatatcgaactgaaccccagctgactcgatcgcgccgacgcggacgagagaagtctatcaggggtatatcgaactgaaccccagcgcccgtagaagaatccactgatcccggcgaagtctatcaggggtatatcgaactgaaccccagctatgcgggcagtgtcagtgatggtgtcggaagtctatcaggggtatatcgaactgaaccccagccagcagaatgccgttgccagccagccgcgaagtctatcaggggtatatcgaactgaaccccagcccatcgtgggtggcgatcgtgaccccgagaagtctatcaggggtatatcgaactgaacccccgcgatagtgggcacagtggctatctcggtgcaagcctttggcggtacatcacgcttaacggcagtaccgctttccacgtgctgcgctgcgatgatcctacaaccacacacttgtgaatttctgtaggatcaccgccccgcgacctaccgcgtcgcctcctccaacaggtacagcacgtgctcatagctccgcccggtgatttgctccatgcccagctcgcaggtgcggttggaggacacataggcgtccacgcgcccgttggcttcggcctcggccagcccgacgcgctcatcgcgggtggcggcgtcgagaagttcggggtggagcatgccgcggtctccggcggtgccacagcagccggcgccgcggggcacgaaggcctcctcggcggcgaaactggcgacgcgcacgagggtgtcgctgagttccatgtgggccagcgagcagttcgggtgcacggccacccgcccgaggcggcgggtgggttcaaggtgctcaatgagccggtcggcccattgggtggagtcgaggatctcgatctgggcgaagttctcagcgagctcgccgtcgagacactcggggatgccggagaggatgccatgggtgcagctggaggcgtccacgatcacggggatggcgccgtggtgggaccattcccatagtttctcggcggtgtggcgcgccatataggttttggcatcgtgaaagcccttggagctaaacggcgtggtgcagcaggtaccggccacatcttgggggatcgccaccttctgcccggcgcgctgggagagcgcgagcagggtttcggggagggagtggccttccccggagcggccgaacatgcggttcacgcaggcggggaagtacacggcatccgcctcggccggatcatcccctgcaggcagtgtggcggccccgccgggtaggccgtgttcggcggagggcacgaggtcattgtccatgaaggagcgcagcattccggtggcgatggacacggagcgggcgccgagtttctcccccaccactttcttgagtgcgtcttgggcgctgaggccgctgcgggcggcggtctccacggccgcccagttcttggccaggatgagtgccacgcggttggcgatctggccgttttccagctcgcggaagagtttcatcatcttgccggtgtcgatgcgcagcgggcaggcgatggcgcagctggagtccgcggcgcacatgtcgatggcgtcgtagccgtattcgtcgatgagcgccccgagcatctgggagccggcgggctgccgggccatctcgcggcgcagcacgatccgctggcgcggggtggtggtgacgtgccgggaggggcagacttcctcgcagaagccgcattcgatacaggcattggcgatcgcctcgatggcgggggtggacttgaagtcctgaaggtgcacctcggcgttgctggtgagctgcacatcgggggcgaggatgccggtgggatcgatcagccgcttcacccgccacatcaagtcgaaggcttggggcccccattcgcgctccaccagcggagccatgttcagcccggtgccgtgctcggctttgagggagccatcgtatttattgagcaccagctccgtcatctcttcaatgaactggtcatagcggcgcacttcctccgaggagccgaaggagggcgtcatgaaaaagtgcaggttaccgaaggcggcatgccccatcaccgagggcggatagttgtattcgcgcagcagctccatgaggtctttggcggcctcgccgatgcgtgccggcgggaagcacacgtcctcggtgatcagcgaggagttttgcgggcgctggtgcccgagcagcggcatcagcccggagcgaatctcccaggcattggcttggtcgatggcgtcctccatgaagtgcagcggggagatcagctccgcatcggccagcacggcccgtgccgcagccactgccgcatcgcgttcttcctccgtggttcctcccacttcgaggagcagcgccgaggcgtcgtcgtcaagcgatgcccactcatcgtgggcccccttaaaggagccgaccgagcccttcaatactggggaaacgagcagctcacaggctagggcgccggcctccatgaggcggtgcacatagtccgcggcaagctccaggctgggcagggttacccaggtgacggcggtatagcgcggcttgggcagggtggcgatatcggcttccgcgatgaagccgagaatcccctcggagccgatcatcagcttggtgaggatgccgctggcggtatcggcgtcgaggaaggcatccaggcgcagaccaatggtgttgcggatggagaacttcgtgcgtagccgcgccactaaggcctcgtcggcgcgtatctcatcccgcagctcgatgagtccttgggcaagctccggctcccgctgccacagcgtctcctccgcatcgggcaggcgggtatcgatgatggtgccgctcggcaacacgatcttcagcccctgcacgctgtgataggaatccttttccaagctacagcgcataccgccggcattattcgccagcacgccaccgatcgtcgccacgcttgccgacgccgggtccgggcccagcactcgcccgtagcgggcaagcacattctgcactcctccgagggcttcgccggggcgtaccgtcacggattcggggtgtaccacgagcccgcggaagttttcccgcacatccagcagaatgtcatcggactgagcctggccattcagcgaggaccctccggagcggaaagtcacggtgcggtgattctgctgcgcataggcaaaaatatccgcaatctcctgctcagtgctggggctggccacgatctgcgggaagcgccgataggggctggcatcggtggcatagcgcaccaaatcaagggcgcgggcatgcacattgcgcgtcccgagcagtgcttcgaggtcctcccgcagctgctgcgggctgccctcggcgagctcttcgggaaaatgatccgggtactcggccccctccggctggggcggtactccgatattggctgactttttctgaaagagtgcgggcatagacaccagcctatgctggcatcccatcacccgtgactttttcctagctttccgccacgactcgccgcacgcgccccacccacttgtgggcctttttcgccggtttcccacaggatgggatcatctcccctgccggtcggcgctcgaggaacacgtgatagctggagccatcgggcaggctcacctcccgcaccgttttctccgggttcttctccccgcccaggtccacggtctccacatagagcgacccgatctcggggctgccatagctgcgcgccacgaggatctcggccacctgcccggcggggtcgaaacagccccggccgcgcagctgcggcaggtagagctccccgcgctgcaccgcctccagcatggcgagggcacgctcggtgtccatataggcataggaatagccccagggcatgagcatgagggtggcggcgaagcggtgccccttcatgtgcgaggtttcccatacccattcctcctcggcgcgctccgccaattccgcggcgaggggccggcccttaatcgcgcagcacttatcgcgcttgccgtgggtgcacaccagcaccagcgggtgcgtcactttctgcccaccattggccagcggcgtatcgaggttgagctccaaaaggtcctgcgggcagctgacctccagccgctccaccacgggctgctgcagcccattgccggtgaagatgatgaacacgcgatagcgctcgcgcggtttcggcctgcctgcggggcgaatgagctggaaggaggcgttatgcatcccgaagaagtagctgagcttgccgctgagctccccgccgaaggagccgccatcgagcacatcgcggctccagccttggtggtgttcgaaaagcacaaacttctgccccgccttggcggtgccctcgatgggctcctccttcagctctgagcaggagatctgctccggctcgcaggataaacggccatcggtgggaatctcaggggctgcactctcagtcatgagaaccagcttagtgggctatatccgcctgtcgctcaccacgcggcgcctgcacgcttatcgacgccaccctccagcccccatccgttgctccccagcacaacgcggccacacgcgttaagcaaattagtaagattaagatatgaatagcatcgcttatactcgtgtactttcccgcccctatgcccgcgccctgacgtgcgtggccctcgctacttcgctcacgatggctggctgctcccccggcggtgatgatagcgccacagaccccagcgcctcggtaactacctccgaagaaacctccactacccgttctacggagaccatcacctcttccactaccctgccggcggaatatgactcggaggatcgggagccggtgaacgaggatccgggtattactcctctcggcgagctcagcaccgccgaaaatacctccagcgaggaatggggcgctggcaccggcaaggtgctcccgaccgcggtgcgcgtgggccgccacaagaacttcgaccgcgttgttattgatcttgacgtggagaagggcagcaccccaggctggcgcgccgtctatgaggcacagccgctgcagcaggctagcgggcgccccctcgaggtcgccggcgatacctatctccaagtggatctcaccggcaccgcctatccgatggagttcggcaaggacttcccgccgctggaatggagcaacacctccggcaagggcatcgtgcaagaggtgctggacgccggcaccttcgaggcccgcacccaattcgtgatcggcctcagcggcggccaacgccccttctctgtcacggtgctggagaacccgacgcgggtagtgatcgatatcgcccactaggcctagacatagctggcctcaatccgccacgagccgcgcacccacaccagcacccagccatagacgcggcgcgaatcagtggccgtgagctgtagccgggcgtgcgcggggtggatgccggcgctgggtgcgggcgcggccgaccaccactgctcgtccacaggccagggcccggcccagccgctcacgcgcagccgccgcgtgccccacaccaccgtctgcggtgtggcactaagcagcagatcctctgcgagggccactggctccccggcggcatcataaagcccgatcttgctggccggatgattccatccggggctgcgccgggctggcagcggcgcagccagccgccccggccagctgcccgtatcggctgcgggaacccgctccccattgctcacatagccgatgcgctctaccaccccgcgcccgccctgatcgaaggggcgcagcaccgtatcgctgccatagcgcgactgcacgcgggtgatgactttctcggcccgctcggcccgctgcgccgtatcgccgagcgcctcccataacccggtatccgcccctggctgttccgtctctagggggatgagctcgagctccacgatcccaccgacagactcttcttcctccccctgggcatgctgctgccggtgggtgatccacccgcccagctgccagcgcactctgtcggcggtagccgcctcatccaagggggcgaaggtgcgccataccctttccagcgtgcactggccggcgccatcatccacggtggcgcgaatcgccagctgcacgcatacccggcccgccgcggcgagatgctcgtgcaggcgcgccgcgagggagcgggcgataaaagccgcctggtccacccgcagcagaggctcctcggggacatacaccacggcctctccccgcgtgttctccgctgcgggcgctaagcgtcgggagctatcggccgcacagattgcatagagccgcatcccggcgcgggagaatcgcgtggccaccgccgcgcgcggcagctgcaacatctcgccgcagcgacgcacccccatctccgccagctggcccaccagctcctcccccactcccagactgggttcggcgccgacagcactcagccccacctgcttgaggaatgcgcgactgccacctgcgggcaccaccgcgccaaggcggctactgcgggcagcgataatcgccgttgccagctcatcggccacccccatgcgcaggtcgacaccctgttctgcagcggccgtcatcgccagatccatcgcgcgatcctctgtgccgtagtagcgggctagactatctgccgccaccagcaccagcccggggcgcagcacctccacggtggccgccacttgggagagcgactccacgatcaccgcgaaggcctccccatccgcggtgtcatctcgcgccgcggtgactgcctcggggcagatcatctgggcggcgcgcagacgcatgcctcgcgccaccccacggcgacgccccgcttggttgaccacccatacccgctgctcgtggtgcacaatcacgggtacatccggcccgctgtctgtgacgcgagagaccacctgcgccggccagtcggggtaccacagtgccagcacccgcactctagatcacctgcaactgcactatctctggctcgcccaccgccgcggcggactctgcggcaggcgccgcaccgcgcagctcataatgcactgtgcgcgcaggcagtccccgctgctgtatctgcaccgcaatatccactccggtaatgcgcccgcggcctgtcatgtccatgccatgaaaacgctgcggggtagcgcccagccgcagctccgcattcgccaccagctgcgggccaccgaccagtatcacggcgcagtctccgcggcgcagcttcgcccgcagcgcccgctccgcggcggcccccacgtggcgcagtgcgggaagataggccaccaccacatccatgccctcggcaagtacggcggcgatctgtatcgtgtcctcagccgcaccacgaacaacgatgatattttctaatagccctccctcttcgggcacctcggcgagcaggagatcatcccagccaacgagcgccactcgctgcccctgggcgctgacataggccactaaggacgccaccaatgccgggcaatcactggcgagggtgatcccacggcgcggcagaccgccgccagctatagcccccgcgagcacctgcggaaggcgcacactacctgccatttctcgctcttcgacgctagccacttcagcagggcgagcagcccctccgccctcaaggcccaccagctgggcacgcagggcagccactttctgttcacggctgagcgcgctcagatcagcgcgctgctcgctgcagaaactcacggaatcaccccctcgtgcgcgtcgccacaatcctcgtccacaccctcgcgtatcgaacactcgttcttaccagtgctagtaaacaccgcgcttgagtccgcgtcaactatgccgcaatcaccccctgctcccctgccgtccgaggcactcgataacctaggagtatgccgtcgataagcgaagcgcgttcccttcccaacccgatacccacgcctgcaccggtgcgcttgggcacctctgtactctttggcctgggcgtggctgtgctgaccacctccctgtcgcgcgggatacaggtggcgatcatggtggcgtgcctcgccttgggcatcatgctgatttatacccacccctatcggcagcgcatccgcgagtatctcgaagcgcgcggctttgagtaccgcgcccgcgccagcatgctcctgccgctctttccggtgtggctggcgctaatgctcgcccccgtgctcgccccagccgccctctgggccaccgccctgctcgccctcgccgtctggggctggatgtggctggtatttccgcatgtggatggcacgcggatgctcgcctatgtggatcgggcggacaccgcctaggttttactcaccccataaagccgaacagccccaccccgtgcgggatgaggctgtcagcaaagacggcgcgaggcgcggaggggctagagcatgcagctcacacaaccctgcacttcggtgccggtgagcgcggtttggcgtagccggatgtagtagaccgtcttgatccccttgcgccaagcgtagatctgggcgcggttgatatcgcgggtggtggcggtgtccttgaagaacagcgtgagcgagagtccctggtccacgtacttggtggccaccgcgtaggtatcgatgatcttctcgaaaccgacctcgtaggcgtcttggtagtagtccaggttgtcattggtcatatacggcgccgggtagtagacgcgaccaatcttgccttccttgcggatctccaccttggaagcgatcgggtggatcgag

SEQ ID NO: 3968 - DNA, 23360 bp, synthetic construct
  misc_feature 1..23360: note = Synthetic
  source 1..23360: mol_type = other DNA
gctgtaatccttgccgtgatctttgacaaaggtggctattcgccgggctacgttgttgccgtcggctgtggctagggggccgcctgggcagaagtcattttggacgtcaacaatgatcaaagctcgcatgacaaccaatgataaaccaaaagcccccagtaggcgtgaaccatacagggggacatatgtgcgccatcagggactcgaaccccgaacccgctgattaagagtcagctgctctgccaattgagctaatggcgccgttctttgcaacgaaggaaactataacaacactgctaaaaaatatgcaaatccactggtagctccccgcataacgtccattatcatgggtgtctgggaacacgataagaggagttacggttttgtcatcaaaaaacgtgtactctctgcttagagacttgcaaaatcatagtgtttggagaaaaatgccgggacttcgccccctcaccgcgctaggagcggtcgggctcctcgccggggccctcatcctaggtggatgcgccgctggtcagaacagcggcgacaaagctgtcgatgcggcagccgaggcgtcgaaaagcgccgaaaacaaaaaacctgaagccagcgtcaaagacgggcaaaaggacgtcaaccccgccaaacccatcaccgtcaagatcggggatggtgaactcagcacagtcaccatgaccaacgaagacggcaaagtcgtcgaagcatcgctggacaaagacaaaaagaagtgggaaaccaccgaaccgctgggctacagccgcacctacaccctgagcattgaggccaagggtgagaagaagcaggaaatgagcttcagcaccatcgacgcgaccaacaccaccaccgcggccctttcgccgcttcccgaatccacggtcggtgtcggtcaaacaatcgggatcaaattcgacaccaacatcgaaaaccgtcaagctgcgcaagacgccatcaccgtcaaaaccgaacccaaagttgagggccagttcttctggctcaacaacagcgaagtccggtggcggcccaaagacttctgggaacccggcaccaaagtcgacgtcaaggtggacatctacggtgttgacctcggcggcggagtctacggtgaagaaaacaacaacaccaacttcaccatcggcgacaaagttgttgctgttgccgacgacaacaccaagaccatgaccatcaagcgtggcgaggaagtgctcaaaaccatgccgatctccatgggatccggcaaataccccaccccgcacgggacctacatcattggcgacaagcaccccaccatcgtcatggactcctcctcctacggactcgccatcgacgcgcccgacggataccgcaccaacgtgcaatttgccacccaaatgtcctactccggcattttcgtccacgcggcaccctggtcggtgggatctcaaggcgttgaaaacgtctcccacgggtgcatcaacgtcagcaccgacaacgcccaatggttccaagacaacctgaagcgtggcgatattgtccaagtccgcaacaccatcggcgaagaactctccggctacgacggactcggcgactggaacatcccctgggaaacctggagcaagggcaacgtcaacgaaacctcagcctggtaggttgcttgagcctggcttgcttggacttgcttggaggaacccgcccaccccgcgtgattgcagggggggcgggtttttcattgcttacgcgggacgctcgccagcacgtccagctactgcactccctcaaacgcggtgaggataccccgtcgcagcgcgaccataaccaggccgccgagaatagcggcggcaccaatgacgaggaagtaggtacgttcggcaccggcgtcgcccgcgtcgtagtacccagcgaaggtcccggacagggcggtcccaaccgccaaggagaggaactgcaggctcatcatacgggtagcaaatcgcgccggggcgagtcggctggccagggaaaggccgacgggggagatcatgagctcggccatggtgaacaggaagaggatggccaccatagcgaagaagggcgtcgagttggggccgccacccgcgaaaggaatgaatatgaaagcggcgagcccggtgagcatgagggagagcgcgtatttcataggggtagagggctgccgttcgccgagtttgagccacatggtggcgaaaatgccggagaagacaatgatgaagatggggctgatggatccgacccaggcggggcttacttcaaagccgccaaaggtacggttgagtcgctggtcggagtagatggcaataacggtgaattgttgctggtagatggaccagaacattacggaggcgaagaacatggggatgaagcccaggaggcggtgtttttcggtccgggttgttttgggggagctgtacatctggacgaagagcaggacggctgcgatgccgccgacgatgctgacaaagttggagagccacccgattttcaagattcccgtggtaaaaagcaccacgaccacggccacaagcgcgagagtgattcccagaacgctgaggatttggctgcgcggagcggggttcaacacggtgctgcccacggcaccgatggtgtctttgcgcatgacggcgtattgaatgaggccgatggccatgccgaacgcagccatgccaaaaccccagtggaatccagcttggccccacatccagccggtgaccagtggaccgaagagcgcgccgatgttgatgcccatgtagaagatggagtagccgccgtcgagacgcgagtcgccttcctcgtagagtccgccgaggacggtggaggcggtggttttcacgccgccggagccgagagccaccagcatcagaccgaccgtcagtccaaggatgccggggagcaggcccaaggagacgtggccgagcatgacgatgatggctgaataaaacagggtgcgttcggcaccgagcacgcggtcggcaacccagccgccgccgatggctgccacgtacacaagcccaccgtaggcaccgacaatggcggtggcgatggactcgtcgatgcctaagccgccgtcggtggtctggtagtacaggtagtagagcaggattgcttggagtccgtagaagctgaaacgctcccacatttccacgccgaataggttggctagcccccaggggtgcccgaaaaaggtacgctcatttgttgccatgtctccacagtagggtaaaagcccccgtaagtgggatacttatcacaaacgcgaccggaaaattatcaacttaacattcgcgccaacacgggccgccacgctgcgagatcgtgcccaccggggaacacggtgaaggtggaccgcccgcctgcggattcgattccgtcggccagtccctgcgcaatcgtgaagatcgactgctcggggcggtcgccgcggttctcctcggaacccactgcgatgtcaacggaaatgttgttcgcaagcagggaggacatgagttcccgcgcgacgtcgatacccgcaaccacggcgggggagagcagcaccacacgctgcgcacccaactccacagccagggcgcaggcggcgagcgcgcccgcagacatgcccacaatcacgtcgggctgctcttcaatgtgcgcgcccacggcgtgggcaaagccaatcgggtcggcgaaatcgcccatacgctgtgccatgccgctgttatgcacgtaaatcggggcgatgttgaggtccaggaaatcattatggatgcgctgcatcacctcaccgtccaggaacaacacctggttcggattttccagcgcgtagtgaattttatgtcccgtcgccagcttctcgcccgccaactgcggggcaggattgcccagatcagcccaatcatattccggtgcgtcaggctgctgcagcaccgaaatattcggctccgcgcgcgtcatcggatccgtcccgatcagccgatacaagctcggcaccgtcggatttggtgtggaaagggcggcgtcgagaagcgcgggggaaagagccgtgacctcagtaacattcggaacaatcgcccacgacacgcccgaggcattgggtagctcagccgtgaacgaccagccgtcccccgaccgttccatcggaatcacgttagaactcaacgcagggcaccacagacccggctgctgctcgccctcccaggtgaacgtaactgaggtgtaattattcaaagtgcccctccttgcgcgggtaaggtggcggacatgctgacgccaccccatactatccgaccatggccacttccacgagcctcctcaccgcttatcgacgccgcccgcgaggccctcgcagccatccccgacacccagcaacgcgaggaacgcgcggagctcatatacaaggaactcacggcaaccaggacgccgcttgtggaaaacacgctggttacgtttgtgtggtacggcgatgctccccacggggtgattctgaacctgaacaaggtcagtgacatgcttgatcccgccgatacgcggctggaatccatcgcggggaccgggctgcacgccctcactctggatatgcccaccgagtggatgggaagctacaactacagcattcctggttctgaactcccggcacccgcgctgcatggcggggcagaccgtgagatgtttgggatgctccgcgctagcgcggttgaggacccacgtgctcgcgaatacgttggtttcttaggtaatgcgcggctggctgtggcgcgtgggcgggacgctgaccgggcggttttgtcgggcgatacggaggggattcgggttgctcaagttatgagcccggtgaatggggcagagctcaccgcctggacctggaaacctgcggatgatgttgcgcctgctgcgcggctggttgttcttgacggggagacctgggtgaatcagtatccactggtcagcgccctgagggacgtgcctgtgcctgtccatgctgtgtttatcgaatccggtggcccccaacaacgacaactcgactacactagcgtcgcggctgctgggcgttccttcatcgagcgggcgctggggttgctgggggatgggagcgatgcaccggtgattgttgtggggcaaagcatgggagggttgtgtgccctgctctccggtatgcggcaccccgacctcgtggcggctgccatcgcgcaatcgccctcgctgtggtggaacggcggcgcatggtttgacgagcgaagccgccaggacggcgcacccgcatatctgcaggtaggggcgtacgaatgggatcttgaacgggatgtccaccacgccgccgcgctgctccgcgcgcaggggaaactcctcggctttgatgtttatccaggtggccatgacgcgctctggtggcaggcgctcctgccgggggttctcgcggaggttgtggggaggatgtgatgtgcttgactatgagctctgcaaagtttgcttatactcaggcacgaaaatggcccattttgtggcttggagataagcaaactttacgtgcttggagttcaccgccgacgcagcatgaacagcattccgagcacaagaatcgccgtggcgaggagcgctccagaggcaatcgggatgaaggggcttgtgggctggttgtttctggatgtttttcgtgccctgatcgcgtcagaaacctccacagcctcgcccgcaacgccgtaggaaagcttgggtcctggttcggcgttgcccacagcgcgcagggctaagcggatagtggtggactgcggtgtgtccgcgctgtagcgcagggctacgttctgttcgccggcgaggaatccccctttgtggtcgaattcggtgtcttcgataatgtttccccagcgtatttcttgggtgatggatgtgactttgcggacttccgtggcgtcgagtttgagccggtacgggatggttgtttcgccgtaattgttggtgccttcttcaatgtcaacggggtagaggttgggcccaatgaccgcccagttgatggttccttgtgcgggcggggcttctatggctatttgtaatcgttgcccttcagcaatgggaattcggagccattgtgttgtgccggaatggagtgttgtttcgtagctgcctgcgtgtactgtcggggcgttgttaagcgtggtggcggtgtgaagagttgcggcggagttgtcgatgtccatgctgagttcgggcggtggcgcggaggtagctattgtgtcggttgccgctgttgggattttccataatgtgaagtcgagtgggagttcgtgtgtgccgccgagtgtgccttttcgggtgatcacaatgtcgtaggcaccgggcgcgcagtttccgaaagtgtcgccaaccacgtaagacgttgcgaatccgctgatgggttgggtgaattcattggcggctgttccgtcgctggattcggagacgcagtggtttccggtggggtcaataatgtcggctgttattcgcgccagtccgggtatcgacgccgcgtcttccggtggcgtgaccatcattcctaacgccagttgatcaccatgttttaattcgactttccaccgtagtgactgctctggcgggagaatagcgtggtgacgagtggggtctggttgtccattttttacaccgccgacctgtaagaaaggtatcgattcagtggcggacgccggtagcgcattgaatagtgaaataccaagggtgcagagaagtgccgcagcgcgtcttctgcgtgttcctttcatactatttagttaaccattaaagaacgtttaattgaatagtaattaaaagaatttcatccgcacgcacaaaaaccaggtttgtattatcaaacctggtttttgtctttggggtggctgacggggctcgaacccgcgacacccaggatcacaacctggtgctctaccagctgaactacagccaccattgctgctgttaaaagcagcgagaactataataactcactcgtgcgttattgcaaaaagcgctggtacgaggctgttgattccttcgcggcgtcgatacattcggcggtggtgggtcctggatcgggtgtgatgaacgagcgtcgataatagtccagctcgcggatggattccacgatgtcggcgagggcgcggtgggcgaggcccttctccggctggttgaagtagacgcggggataccagcggcgggcgagctccttcagggtggacacgtcgatcatgcggtagtgcagggcgctgtctagccgaggcatgtgcttgcgaatgaaggaacggtccgtggcgatggaatttccggccagcggcgcgggatgatcgggatcgcaatgctcagctatgaggtcaagaaccgcctgctcagcctgctcaattgtggtggtcgaggtgcgaatcgcctccgtcagacccgacgagccgtgcatatccgccacgagctcattcatgcccgccagctgctcctccgtggcgtggaccacaatatcgacgccctgaccgaggatgttcaagtccgcgtccgtgaccagcgccgccacctccacaacgacgtgatgatctgggtcaagacccgtcatttcgagatcaatccacaccaaacggtcatgtttcgacatagcactttccgacatcattttttacgacattttcttataaaacgaaccaataagtggggaggcaatacccctcggcgcgacgagcgacgccacattcaacaccttactcagcggacccggaaccacacggcgtttattctttgccaacgcttcgagggactcttttgcgcaggattcataggtggtccagaggaaatccggtactaccttatccacaatagatttctcctcctccgggattaccgcgtcccgcactggaccaggtgcaagaagcgtgcagctgacccccgaacctttcaactcataatgcagggcctccgtgaatacattcacgcccgccttggtgaacacgtaggtcgcattatttggaatagggaggttgccagcagccgaaccaacattgagaatagcaccttttctatttgctagcattcggggcagcacggcgcgggtgagttcaaaaacagccgtggcattgagctcgaactgattggtctcatactcccattcctggtccatgaacgggccgaaactcgcaatgccagcagaattgataatgatgctgatgtcgcggtctttgatgtctgcgataagcttgtggcgctgctgctcatccgacaaatcgcagggaaaaacctcggccgtgacgttgtaccgcgacgttaattccgcagcaaactgctccagcacatctttacgacgcgccaccaagatcacatgatggccctgcttggccagatcacgcgcgatagccatgccaattccctggctagcgccagtaataagtgcgcgagaatcggggctaggggaggggaggggcatagtcgcagtaatcctttaatcgaaaatagttctggggcagctagctaaaaatatgggagatagttcggtttggtgtccatcgtaccggtgtgaggtgatttggccgaaaaatggcggcgcgaggtgcggggtggctttagggcacgggtatggatcgggtatgggtgcaggcgggacgcgagcggtgttgggggtggttctggggtagctccgaagggcgttatttgagaaaagtaggaagaaaatataagaatttccaaatataagcctatgaaaaaggagtctgcgatgcgtacacgcacaaaacttgtaagtctgagcctggcagtggtcctgccgctcgctggaatggtgaatgctggagctgaagaaaaaccagctcagggaaagcaggagaccggggtggttgcgcccgctgctggggcaaacggtgaggctggtaatgccgctgctggaaatgaggccagtggaaatcaggttgaggcgggcaagggcgccgcttctggtgcggatgcagcttctggcgcgggtgctgcagggaagcctggtgaaaaagctggtggaagcagtgcaaaagtcagcggcagcagcgacaaggtcaaggggagtagcgaacgcggcaaggcggggagcagcgccattgctgagaataaagataataaaaccctgaaattcctgggcattatcgccgggatcgtgggcattggcggcctcatctctgcgggactcacctgggcggtgcagcagcggctgatcgctaatccgctgccgggaatcatccccaatccgccagctcccccggccccggctcccgcacctgcgccagccccggcccctgctccagttcaggcagcccctgcgcctgcaccgcagggtggtagcttcaggaactgcgcagcagcccgcgcggccggagtgcgtacccccattcaccgtggtgaacccgcctacgcgccacacctggatcgcgacaacgacggcgtggcctgcgagcggtaagttctgcggctgggtagtggggtaacagcgctggtggtagtagcggtgaccgggctgatctcgccgcctgggcactgtactgcggcatcattcctggtactggattgtcggtccccgggggtttgcccgtacttggggttactggcgctggcttccccacctgtggcaccgtacgccgcgcaggcttaacgacgcccatccattgaggttggcgcggttacttactcgccattgaatgcaacaaagatgggattgcgtgtgagcggaaggtctgacgatatgattgtcccggtcttggacgaggatttttgtgtgatgactgtgtttgtgtagttttcaacaatgttctataggggagtagcgcgttcttggctgtggtggggttgtgaggtgaaagtgtggagtctggcattgctcatttttcaagttctatccactgtttagttgattgaatacatgctctacctctgccttttgtgaaatggtcatatcaaatgcatgggctatctatgtgtggtgaatacccccgaaagtgtaaagattccacaaagactatacaaagcatcgtagaggcacttattattaaatcgagaattgatcctcagtaagcatcagctagtttctgatgacgattgctccaaccgatgcgcgcattgcgtgcgtcggttttttaacctcataggagttgtcatggctgcttcgtcaaccaggtacgttgttggtatcgatgttggtaatttctccgtcggcatggccgcaataaaagttgatgatgacggtatgcctcaggaaatcttgagcgccgtctcccacattcatgactcgggtcttgatcctgacaacattaaatctgccatcactcgtttggcggtatcgggagttgctcgacgtacccgacgactgtttcgtcgtcgccgtcgtcgtcttatacggcttgatgcattcatacaaagtaaagggtggggacttccacaaaatgacgagtctgatgatccctatctcccttggcgtgttcgtgcggagctggcatcacgtccaattccgacagaagaagagctaggcgcaaaattatccatcgcaatccgccacatcgcgcgccatcgggggtggcgcaacccctatagtcgagtcagctcgctcatggcagatgtcccaccaagcgatgccttcaaagcgatacaagaggaattttcgaagatactcggtcgatcacttgctgatgatacgacgcttgggcagatggttgctgcctgcaatctcaccaacactaagttacgtggagaaggtggtgcaatatcagcacgactgcagcaatctgatcttgctcgcgaaattagaaaaatctgctcgatgcaagagatagatgaaaacactgttcgagagattattgaatatgtcttcgtcgcagagtctcctaaaggcgcaaatgctgctcgtgcaggtaaagacccacttcagccaggtgaacctcgtgccttgaaagcaactgacgcgtttcagcagtaccggatcgctgcgctgattggaaaccttcgtatccgtgaaggaagagaaagaagagaactcagtcttgatgaacgaagactagtttttgactatctcgtccacctgaaacccaaggttgagcctgattggtctgctgttgcagatacactcaagattgatcggggagacctgctgggaacagccacaaccacagatgatggtgaacgtgcaggagcacgtccaccagttcatgaaaccaatcgtcgtatcctcacatgctcagtgaaacctcttgttaaatggtggcaggaagcaggtgatgcggaacgtagagccatgctgatggccttagggaatggttcggttgaggactatgacagcgcggaaggtgcaaaagtccaagctttcttcactgatctttcagatgaagatatggaaaagctggataaactacaacttccagtcggtcgtgctgcatacagcgaagatacgctcacaaagctgaccaaagcaatgctgtcaggtggtatagatctctataccgctcgccgtcaggtctttggaatatccgaagactgggcaccaccagcgccagaaataggtgaaccagtaggtaaccctgcagttgaccgcgtgcttaaagtagtagcacgttggctgcgagccgcagaaaatgcttggggagtgcccgaaagcatcaatattgagcatgttcgtgcaggctttatgagtgaaagcaaatctcgtgagctagatcgggacaatgaacggcgagccaagcgaaaccttgagcttttcactcagatgcagcagaagttcggacaagacatcgagccatccagagccgacctgtggcggtatcagtcggtacaacgtcagaatggacaatgttgctattgtggcacgacaattacttatcaaaactgcgagatggatcatattgttccgcgtgcaggacgtggatctacgaacacgcgcgataacttggtggccgtctgccatgactgcaacttgtcaaaagggaacattccctttgctgtgtgggctgcgaaaagcaccaagcctggcgtcagcgttgctgaagctcaagagcggctacggcattgggtgtgtgaccctgggctaaagaccccgcagttcaagcgctttgttaagtcggtaaatgatcgcttgtcacgtaagaccattgatgaagaactcgatgccaggtccatcgaatcggttgcgtggatggctaacgagcttcgtggcagaatcgctcacaagtaccaagatataaaagtgcgggtatttcgagggcaactcacagcagaagcgcgaaatgcatctgggatcagcaaaaagattgcattcattgatggtcctggaaaatctcgtcttgatcgccgccatcatgctgtggatgctgctgtaatcgcgctcatgtctgcaaaagttgcggaaacgcttgcgatacgaagtaaccttaagtttgaccaggaacttcgcaaagatgctccacagtggaaggagttttctggttctaccgacgcgcacaagatcatctggtcgaagtggcgtagccgcatgacagctttagctggcttgctgcaaactgcattggacgaagaccgcattgtcgtgatgtctaaccttcgtctgagacttggcaacggaacggcgcacgaagcaacgattggtaagctcaagaaacttaaggttggcgacccaatctcagctgtagatgttgaccgtgcatcaacggaagcactctggtgcgctctaacacggcatcctgactttgattcaaatgaaggactaccggcagatcccgatcgtactatcagggttcaaggacggcatctgagtgcagacgatgcaattgaggtattccccattggcgctggatccattgcggtacgtgggggatatgctgagcttggaagctcgttccatcacgcgcgtatctataaaatcgtgggcggcaaaaaaccagtattttcaatgatgcgggtctacactgtggatctgcttaagtatgaaaatgaagacttgtttgctgttgagctaaagccacaaacaatgactatacgtcaatgtgaaccgaagcttcggaaagcgcttgctgctggacaagccgagtatcttgggtggttggtagtcgacgacgagctattgctggatacaacggaaataagcacaaatcagcttactagcgtgcagtctgtatttggaaaaatttcacgctggcgggtagatggattttatgatgtttcacggttgcgattacggccaatccagatgagcgccgaaggaattagcgatgagatgcctgctgaactcaagaaaattcttgatactcctggatggcgaccttcagttaataaactatttgatcttggaaaagtaactgtgattcggcgcgatgcgcttggacgagtacgcctatccagtaatgcacacttgccaattacgtgggcggtaggttaagccatgtctaccggctggcaagtacttgacttcaccggctttgatggagcgctggtgtacaagagaggacagttggccatacgatgcgaaaaggaaataataacatccgtaccgctttctcaacttgctgtccttctggttggggcgcgtactactttttctggagctgttctccaaaaattaagtgagtatgatgtggctatcctagtatgtgattggaagcatgttcctgtcgctgctgcttatccatggaaagaacattcacgtatagccgcacgccaaatagcccaggctgagctatcgctcccacgacgaaaaaatgcgtgggcacagattgtcagagccaagatatctggtcaagctgcaactttgaacggtgttgatcgtaaaggagccaagtacttatattctgtggttcaagaggttaagtcaggtgacccaagtaatcaggaggccctcgctgccagattttattggcgacggcttactgcggatccaacgttccgacgattgcctggaatcggcgaaggtgacatcaacggttgtctagattatgcctacgctgtacttcgtggtcatggcatacgtgcagtggtttctgctggactttgtgggacaataggtgtgtttcaccacgggcggtctaacccatttgcgcttgtcgatgacttaatcgaacccttcagacctgcgattgatcactacgttatttcaaaacttgacaacttctgcgtcgatgagccagatgttcgacgtcagcttgttggctttattgaatctgccttctcggacacaggacatacgatacccaccgtgttcatgcagtttgcacaagaatacggcagatatgttgagggggatctacagcggttgattccaccaacatggaaagggttgcccagtgccggcgaaaagaagtgaaccagtgtggtgcatagtgatgtttgacctgccggtcaaaacgaaaaaacagcgaagcgaggcaacacgcttccgtaatatgctacttgataatggctttgcgatggcgcagctaagcgtctatgttcagtacctaccgcttgcggcaggtgtggccaagttggcggcactcatcaagtctgagttgccgtcgggtggcgatgtgcgcatccttgctgtgtcagataatcagtggtcgaagatgatcagattttccaatatgcaggctgaagaacctgagcctgaacccgcccagttgatgattttttgagctatgaaatccggaaaaccgcaggtaaaaagcggcttttccggctgtctcaagtatatcagggaaaacgagaattgatccccagccgcatcgacgacatcgaagccaccctcaacaagtatatcagggaaaacgagaattgatccccagcgggttcaccagcggtgtgtaccagcgtgcaagtatatcagggaaaacgagaattgatccccagctgaggcccaccggggatgtcaaactacacaagtatatcagggaaaacgagaattgatccccagcctacttacttgaaccagttgtcgaactccaagtatatcagggaaaacgagaattgatccccagcttacctggggcactggcttaattgtttgcaagtatatcagggaaaacgagaattgatccccagctgatgtggttgcgtgggacgaccccgatcaagtatatcagggaaaacgagaattgatccccagccggggtactccaccaggatttccggtgtcaagtatatcagggaaaacgagaattgatccccagcaatacgacaccgtaggtacgacgtcaagcaagtatatcagggaaaacgagaattgatccccagcgtacttcctcagctcccttaagcgctaccaagtatatcagggaaaacgagaattgatccccagccctccacgatgcgggctatggcttgcgccaagtatatcagggaaaacgagaattgatccccagcccgcgtatccgggtagaaaacccccgctcaagtatatcagggaaaacgagaattgatccccagcccaatggggcggcctcacccatcaccgccaagtatatcagggaaaacgagaattgatccccagcggttcagaagctggaggaaaagctgtcggcaagtatatcagggaaaacgagaattgatccccagctacgttcgtcggcctgacggttgatctccaagtatatcagggaaaacgagaattgatccccagcgcgcaagtcgagttatgcatgcaatgatcaagtatatcagggaaaacgagaattgatccccagcggttggcataacgtgatatgtacggaatcaagtatatcagggaaaacgagaattgatccccagcaactggtatcttgcaggtcattaacgatcaagtatatcagggaaaacgagaattgatccccagcgatctagcccctgatggtagtgaagtctcaagtatatcagggaaaacgagaattgatccccagcaccaatcttcagcacgccagaaccattacaagtatatcagggaaaacgagaattgatccccagcagaagctagaagacgcccggaaaaccgccaagtatatcagggaaaacgagaattgatccccagcgggtcagatacatgcccttacctcaccgcaagtatatcagggaaaacgagaattgatccccagcttcagtggtatctccaggctagcggagccaagtatatcagggaaaacgagaattgatccccagccctgagtcttgccattcgtttcgcgtggcaagtatatcagggaaaacgagaattgatccccagcttcagaaactcggggtcaaggaaaccagcaagtatatcagggaaaacgagaattgatccctagcctgttaagctggtgttaccgagcatttccaagtatatcagggaaaacgggaactgatccccagcccgcgtccctagtcgcttgataggtctacgagtatatcagaaattgagaattggtccccagctcagcaagctgttgcggctggaggtgtttctatgtagtttgtcaactcagcgggtgtgtatgtcgggggcagtggtgtcagcagatcctggtgctatcatgatgttgtttttcggtatgcatacctggcatattggattctgttcgatgtttgacagggtagtcatagtcgtgttgtgtcgcttggcttaatgtcattttatgttcgtaaaattttcgggaatgcttatgggatctgatcgctgcactggtatccttgtcctctcttggtgttttgctaccccttatggcgagcgccttttttaaggtgtcaaagattcggtactgcagttgtcgatcactatattcgtctatgtcaatccatgtttccatctcatcaataaatgatttcagatcttctgcaatagccgtcgagttttcattgcttgagaagaagcatatgtattaatcttgctgatcatggtattcatggatgaaaagtccagatgaaagaaattccgcaacggcagcataaaaatctgcgtcagacacattcccaactttctgtcggaccccttgtaatagcatcgcttagttttggcctgtgaatatcaatgaaaagtccatggttctagcgactttcgtttcgaaacggctcgatgatagttgctttactttatcctctgagggggcgttgatttcccaacgcacaccaataagcgccaggtgtcttctggtcttcatgcgcctcgtagccagccttgcctagtgtcttgtgaaataccatctaatgacgatgtgattcatcgtatcaaatataggtgatttgcgtttgttaatcatcagcatctgctctataattgacaatttttgatagtggcaaaattaggaggtttaccgtgaattccactagctatagtatgtaagctgctccgtatggtaaaagattgtcagaattactcttgtagttactactttgtactgaattaggcgattaaagaggtgatgttcggctggggggcgaaagtgcattttgattgcgtcgaagtcagtccgacatcaaaaacaaaaaagcgcccccggcaggattcgaacccgcgaccagccgggtagaagccggatgctctaatccactgagctacggaggcatggaaggttttcttccatcagggaactttaccgcatctgtccgcgcccacaccacacgaccccacaccacacgaccccacaccacatagcccacaccagaccgtccacccacccccgcctgtacaccttcgtgtctgccccacctattagtgtttagtgcatgacgtcatcttcttcggccacccccacgtcaaactcagtcagtgccacctccaccccagcaaacactgagcgcgccgcggcgtcgtcaagcagtgcccgcgtgacctggccgttgtttgtgttgttttgtgtcacagcgggtgttgtgggtgcggtggtttcggcgggtttcttgggggagtcgttggcggcgttgggtattcctgatccgggtccgttgactacggcgggtttgccttttttccgggctgcggcgtggatgttggcggcgttgtcggtggggtcgtttttgttcgcgggcttcctgtgctcaccccgggaactccaaacacccaccacgcccagcaccgcccccacaccccacaacaaccacgacagccagaacaaccacaacacccaagacaactcaaacaaccaccccaccctccgcttcgccatactgagcgcggacggcacggtggcgtcgaaaacgggtgcggttgcggcgttgtgttttggtctcatcgccttgttgatggtgccgatgtatttgtctgatgtgtcgggccaaccgctggcggatgcgatgcagccacagaattggtcaacagcaataaaccaggtgtctacgtcgttggcgtggcagtggtcggcggtgtttgcgctggtgacgggcgttgcggcgctgactacgcacaggtggatcatgcagccggtgtggttgtgcggggcggtgttgatgattgtgccgctgggtttggagggccattcggcgagcggcggcgatcatgattacggcacgaattcctacctgtggcatgcggtgttcatggtgttgtgggttgggggattgatggcgctgatcgcgcatggtcggcggcgggggccgggcatggtggtggcggtgcgtcgttattcggcggtggcgttggcgtcggcgctggtgatgacgctgtcgggcctgatcaacgccgcgattcgtatccactggtcggattggttcaccacgagttatggcacgttgattctcactaaaaccgttggcgtggtggtgctcatcatgatgggctggctgcaccgccaggccacgatcccgaagttggagaaacagccgcgcctgttccagcgggtggcgattgtggaagtactggtgatggcggcgatcacgggtgtggcggtgtcgctgggccgcactccgccgcccccgccgcgcgagccggatttgaacaccatggacattcagctgggctacaagctgtttgtggaacccaccatctggaatgtgtggacgatgtggcgtttcgacatcattttcggcaccctcgccatcctcctcgccgtcgcctacatgtggggtgtgcgccgcctgcgcctgcgtggtgaaccctggccgtggtaccgcaccgcctggttcatgtcaggttgcgtgatgttactggtcaccatgtgttccggcatcggtatgaacatgcccgccacgttttccatgcacatggttggccacatgatcctctccatgggcgtcccggtgttctgggtgctgggcggtccgttcaccctgtggctcgccgcgatcaacccaggtcagccgggccaaccgggtccgcgtgagtggcttgaggtggccatcaacaacccggtggtgcggttcctcactcaccctgcagtgaacaccatccagttcctggtggtgttttacatcctgtacctcaccccgctttacgacgtcgcggtgtccgagcatgccggtcacctcaccatgaacatcatgttcctgtggtccggtttcatgtactactgggaggtcatcggcgtggatcccgtgccggtggagcgcaaccccatgggcaagggcgcgtggctgttcgggtcgctgccgttccacatgtggttcggggtggcgttgatgcagatgcaagtcatcctggcctacgatttctactccacactgggactgccgtggcacgtggatttgctgcgggaccagaacgtaggcggcggcatcgcctgggccgcaggccagttcccgctgataattgtggtgggggccgtgttgctggcgtggtaccgggacgatcaccgccagatgcgcacctacgacaaacgcgccgacgaaaccgacgacgaggacatggctgcctacaacgccatgttggcgcagatcaacgctggtgagaaccccttcgaggaatactatgcccaggatatgaggggcagaaatgatagctccacctagcctgctgtgcaacgcctcacctggccgtctgtggataactcggtttatccacaggcaggccctgacggcagatgcgcaacccctggatcaggtggcagagtagggatcacggccccagggaatgacaccgggggatcggggagacgggggttcgaggggaccattcccgccggggccgatactacgttcgtgttcgacggcgcactcggcgccgacaatgaggaggggcatcatggctcaacattcctacactgtgaccggcaatcttgtcgccgatccgcattaccgccagacgggggaaaaccagggggtgtgtaaattccggttgggggccagccgtcagcggcgtggcgaggacaacgtgtggtattccgtcgaccaggtatggctcaatgttgagtgctgggggccgttggcgcagcacgcgcgtcgctccctgaccaagggcatggcggtgattgtggtgggcacgctggtgacgcattcctggcgggatgctgatggggagcttcagtcctacatggtggtcaaggcatcgcatatcggccctgacctgaaccggtacctcaccaacaccgtggttccgcagcacgctgtggtgcaggctgatgccacagcggagatgcctgacgcctcgacggatgtgagccaatgggtggattcctcctcctataagccggaggatgtcgataaagaactcgcggcggtaggggcggcgggggaggttgaggaagcaccgttttagcgggggcgtcgatacgcgcacgtgggggagtggctgatgacgcctcctgaacccacttcatgtaccctttgtggaggttaaaagttgcaacaataaaaggggttgtcgtgggtgagttcatctacacgatgaaaaacgtgcgcaaagcacacggtgacaaggtcattttggacgatgtcaccatggccttctttccgggcgcaaagattggtgttgttggcccgaatggtgccggtaaatcctccatcctgaaaatcatggctggtttggaccagccctccaacggtgaggcattcctcgacccgggtgccaccgtgggcattctgctgcaggagccgccgctgaacgaggaaaaaacagttcgcggcaacgtggaagagggccttggcgagatttttgccaagaagaagcgcttcgatgagatcgccgaagaaatggccaccaactacaccgacgagctcatggaagaaatgggcaagttgcaggaagacctcgacgctgccgatgcctgggagattgactccaagatcgagcaggcgctggaggctctgcgctgcccgcccggcgatgagcccgtcacccacctttccggtggtgagcggcgccgcgtcgcgctggctaagctgctgctttcggagcctgacctgctgcttctagacgagcccaccaaccacctcgacgccgaatccgtcctgtggttggagcagcacctggccaaataccccggtgccgtcctggccgtcacccacgaccgctacttcctcgaccacgtcgcgcaatggatttgcgaagtcgaccgcggcaagctctacccctacgaaggtaactactccacctacctggagaagaaagccgaacgcctcgacatcgcaggcaaaaaagaccagaagctgcaaaaacgactcaaggaagaactcgcctgggtccgctccggcgcgaaggcccgccaggccaaaaacaaggcccgtctgcagcgctacgaagaaatggccgccgaagctgagcagtacaagaaactcgactttgaagaaatccaaatcccgacgccgccgcgcctgggcaaccaggttgtggaagtcagcagcctgaacaagggtttcgacggccgcgtcctcatcaaagacctttccttcaccttgccccgcaacggcattgtcggcgtgatcggccccaacggcgtgggcaaaaccacgctgttcaaaaccatcgttggcctggaaaaccccgacgagggcgatgtgaaagtcggccaaaccgtccagctctcctacgtggaccagaaccgcgaaaacatcgacccggaaaaaaccgtgtgggaagtagtctccgacggtctggactacatcgtggtcggccaaaacgaaatgccctcccgcgcgtacctctccgccttcggcttcaaaggtgccgatcagcaaaaacccgccaaggttctctccggtggtgaacgcaaccgcctcaacctcgcactcaccctcaaacaaggtggcaacctcatcctcctcgacgagcccaccaacgacctcgacgtggaaaccctttcctccctggaaaacgccctgcagaagttccccggctgcgccgttgtgatctcccacgaccgttggttccttgaccgcacctgcacccacatcctcgcgtgggaaggtaacgtggaagaagggcaatggttctggtttgaaggcaacttcgaggaatacgaaaagaacaaggtcgaccgcctcggccccgaggctgcgcgcccgtcccgcgtgacccacaggaaactcactcgctaaagcggaggtctgccggggtggggtttatgtaccggcacgtcacatgtgcttatgctcaggtacgaaaatggggtgtttttcggcttggagataagcacatttgacgtgcttgccatacgtgcttgtcatataggtccactgccaggtccgaaaacaccctgtttccgtacccagcgatagacctttttctatgcaagcgtttgcactaacagtgttcaaggttttcctgctcaccagccgcacagctgccgcgctctaccaaaccgccacccctgcacagtatgtataccgtcaagtctgaaaacgccccattttcaaccggagcgtatacacacttcgcatcaaccccgccctagcaccaccgaccccacacccaacccgccaccaacctcatcatcgattaacctgcgcatatgcccaatacccctagcgttaacatattttctatcgcctgagttcctggcccgatttgtggtagaaaaggggggactgttttcttgcgtaggggccgtgctgttctgtggcgtggttgttgcgcaggttttttggtgaagggaaggctgctcggatatgggcgaacgtggtaatcagcatgacgtgactgagggcgctgtggtgcatgtgtgtcggattccggtgaggtggtcggattttgatcgttttggccatctaactaattccgcgtatgtggaggtggcgcaggaggcgcgtttggattgggcacatcaggagtttgtacagaagggcatggatgtgccatctgtttttgtgcggcatattactgctgattatcgtcttccgattttgcccacggcgactgaggttcaggtggaaaccgaggttgtgcaggtgaaaaccacgtcgtttaccactcgccagactattaagaatgagaagggcgaggctgcgtgtgtggtggagtgcgtgcagattgcggtggatttgaagacggcatcgccgcgcgcgattgaggcgcatgagatgaaggtgct

SEQ ID NO: 3969 - DNA, 23351 bp, synthetic construct
  source 1..23351: mol_type = other DNA
  misc_feature 1..23351: note = Synthetic
cccgaccgaggtcggtcttgtagcggccaccctcattgaacaccgcgtagatcacaccgacgatcaggcccgaaatgagcagcaaggtgccggggttgttgatgtaagcaagcgagtatgcggacttcacaggctcaccggaggcggtcagcaggtggtccttaaggaccggccaatcgaaggagatcatgaaggtctccttcagccacttcgggaaggggttggtgagcgacccgagtttgtcgaggttgcacacgccgaaaatcagggtgacgacaaggtagggaagtagtgccatccacacgcggacgccgggtagctcatcttggattgctgcggggccgactcccatgcgcgcacgcatttcttcgacgccgaggggcttccagaaccgcaggaatccgacggcgacgccgagggagaagatgcaggcgacgatgtctgtgagctggtacgcgaagaagttagaggtggcccactgggcgataccgaaagcgaaaccgatgacgacggcgggtacccatgcgtccttgacgccgcggacaccgtcgaggatgagcagcaggatcagcggcacgaagaatgcgagaaccggcgcttggtggccgacgatcgctgcgatgtggttggtttcttcggcggtgcggccggcgactgcaccggcagtggtgatcgggatggcgacggcgccgaaggcgacgggtgcggtgttggccagcagcaccacggtggcggcacgcaggggcttgatgccgagcgcgaggatcatcgtggcggtgatggcgacgggggcgccgaaacctgcgagtgcctccagtaggccaccgaagcaaaaggcgatgaggatggcctggatgcggatgtcgccattgcccaggcggtcgaaggtgcggcggaggtcttcgaagcggccggagatgacggtgacttcgtagaaccagatcgccatgacgatgacccagacgatgggaagcaggccgaagaggccgccgcgtccggcagaagagacggcgagaagccagggcatcttgaagccaacgatggccacaagaattgacgccgcgagggcgacgagtgcggatgtatgggcgcgtgccttgacgcctatgagcatcacaaagaatgtgagtagtggaatggtcgctacggctgcggataggccgaggcttcctgctacggcactggtgtcagcaacaaagctctccatcggtgctccttgttagaagtaggtgtgcaaaaaacgtttgtgtgcgttaggccacttttatggacgccgttaagattctcgcaatcacaatacctataggatgttactgctatcactcttcctatcgctatgttttacccctcctataaaagctattgttcaacaatcgactttccaacctgtaaaaatgtgtaaggcggtgagttttgtcacctcccgcgggctccccccgttgcctgccaaaccccaacgaggggcaatattgtgtgcgacaaaccagcttcgataggcttgcaggttatgactcccgcagacctttcacagctgatccgggctgtcgcagtggactacttcactgagcagcagctcgatgcctccgtattgcctcaagaagtaaccgttgagcgcccccgaaacccggagcacggcgattacgcaaccaacgtggcactgcaggtagcaaagaaggtcggcaaaaacccgcgcgagatcgcccaaggactggccgacgcactgagcgcacaagacgcgattgccagcgctgacgtcgcgggccccggcttcctcaacatccgcctggccgcagcagcccaaggacaaatcgtcgccaccatcatcaatgcaggccagtccttcggccacaacgacagcctgagcgaagcagtcatcaacctggaattcgtgtccgccaaccccaccggccccattcacctcggcggcactcgttgggcggcagtaggcgatgctctcggtagagtgctagcagccaacggcgcgcgcgtcacgcgcgagtactacttcaatgatcacggcacccagatcgaccgcttcgtgcgctccctcatcgctgcagccgaaggacaaccgacccctgaagacgggtacggcggggcctacattcaggacatcgcgaaggctgtcgttgcggccgagcctagcgtgcttaacctgcccgaagaacaaaaagcagaagccttccgcgcacgaggcgtcgacatgatgttcgcgcagatcaaggagtcactgcacgaattcggaacagactttgacgtcttcttccacgaaaattccctcttcgaatccggcgccgttgaccgtgcgatcgcgatgcttaaagacaacggcaacctctacgaagccgacggtgcgtggtggctacgctccacggaattcggagacgacaaggatcgcgtcgtcattaagtctgatggtaacgccgcgtacatcgccggcgacattgcctacgtggtcgacaaattcgaacgcggccacaacctgtgcatctacatgctgggggccgaccaccacggttacattgcccgcctgaaggcagcagctgcggcattggggtacgaccccaaccaggtcgaagtcatgatcggtcagatggttaacctgttggaaaatggcgaagctaagaagatgtccaagcgcgccggcactgtgatcaccctcgaggacttggtggaggcaattggcgtcgatgcagcccgctatgccctgatccgttcctccgtggattcttctctggacatcgacctcgggttgtgggcgtcccagtccagcgacaatccggtgttctacgtccagtacggtcacgcccgcttgtgctcgattatgcgcaaagcctccgagatcggcattgaggttccccttgacgccgcggggctgtccgccatcgacctgtctttgctcacccacgagcgcgagggcgacttgatccgcaccttgggtgaattccccgcagtggttaaaactgcagctgaactgcgcgaaccccaccgcgttgctcgttacgccgaggagctggccggcaccttccaccgcttctacgacgcctgccagattctgccgaaggcggatcaggacgtcgagggtgttttccgcgcgcgcttggcgcttgcgcaggctagccgccaggtgttgtccaatgctcttggactgttgggtgttagcgccccggagaggatgtagatgctcgaccaacccaaaccctcgaccccgcagccgaccatcccgaaggtggatcgggcagaaatccccgacttcaatgaccttccgggccaggtgtggccaaggaacgcccagcgtcaggaagacggagtggtcaccattgctggtgtgccgcttcctgagatcgcggaagaatacggcacccctgtgttcgttgtcgatgaggacgatttccgttcacgctgccgcgatatggcccaggcttttggcggcggcgagcatgtgcactatgcgtccaaagcctttctgacaaccacgattgcacggtgggttgacgaagaaggcctgtgtttggatgtcgcctccgaaggggaactgcgggtcgcattagctgcgggattcccggcagaaagggtcaccgcccacggcaataacaagtccacaagctttttgaagttgtgtgtcgacgccggcgttggccacgtagtgcttgatgcacctggggagctggatacgctgaacgctgtcgccgccgaggccggtcgtgtccaggaagtcatggtccgagtaaagcccggcgtggaggcgcacacccacgagttcatcgccaccagccatgaggaccaaaagtttggtttctctttggccgctgggtcggcgcatcgggcggcccaggccgtcatgcgtgccgagaacttgtcgttggttggtttgcactgccatgtgggctcccaggtgttcgatgcggaaggcttcagcctcgcagccgagcgcgtgttgggtttgtggagccagctggccaaggagggcgccgagttggagatcctcgatcttggtggcggctacggtattgcctacaccgctgatgagcagcccttggatgtcaaggcgattgccgcggatttgttggcccgcattgacgcacatgcggcggcgcgagggattgaggctccgaagatcatggtggagccgggtcgtgccattgccggcccttcgacggtcaccgtctacgacacgggtgtgatcaaggatgttcacgtcgatgacaacgccactcgccgatacatcgctgttgatggtgggatgagcgataacattcgaccttcactgtatgacgccgcgtacgatgtgcgcgcagtcaatcgtttctgtgacggtgcccctaccgcgagccgtatcgtgggtagtcattgcgagtccggtgacattttgctgcgcgacgcgttgcttccggacgatatcgcgaccggtgatctgcttgccttcgccgctactggcgcctactgctatgcgatgacaagccgctataactacatgcttcggcctgcagtggtcagtgttcgcgctggacagagcactttgatggtgcggcgcgaaagcattgacgacgtgctggccatggagcctggctacaccccaccgacgcaaacaaaaaactaaggctagactttcaagcagccctaccccccccatcagcatcgaaaggcagtcccctaggaatgtccaccatttttgttctggtcaagcacgtgcctgacacgtggtccactaagacgctgaaccccgatttcactctccaccgcgaaggtgtagacgaagtcattgatgagattaacgagtacgcagtggagcaagcgctccgtttgaaggagtccttgggcgagtccaccgttgtggctttgtccatgggtgcgccttcctctgaggaagcgttgcgtaaggcactcgctatgggggcggatcatgctgtgctgctcagcgatcctgcgcttgctggttcggatgccttggggacggtgtgggctttgaactgtgcaattgatgccgcggcccagacgtttggcgcgcccgatgtgatcattgcgggcaatgcatcctcggatggttcgatgggggttgtgccgggtgtgctctcggaataccgccaggtacctgcgctgaccaacgtgcgtgagatcagcgttgacggcggcgtcattaaagctgttcgcgaagaccattcaggtacctaccagctcagcgccgcgatgccgctggttatttccgtgacggagaaaaacgacaagccgcgtttccccaacttcaaaggcatcatggcggcgaagaaggcggagatcgtgcgcctgagcctggccgacaccgcagctgaggccgcgcaagttggtttggcgaatgccgcgaccgtggtgactgcagcggcgaaccgccccgaacgcagtggcggacggatcgtacgtggtgagcaaggcgtggaagagcttgtcgccttcctcaaggatcgcatctagcgcgaagggacaatgacaatgactaacgtttacgtacttgcagaatctgccgctcattccgcgatcactgcggagatgattactgtagcgcgcaatctcggcgacgtcaccgccgtgcttgttgacgccccggagctcgccgaagagatcacgcagctgggcgcccagcgcgtggtgcacgtcaactcccagggcagggtcctgctgccggcagtcgatgccctgcagaccctggcggccgcccaacccggtcccatcatcgtgcccggccacgccaccggcaacgagatcgccggtcgcttggcggcgcgcctggcaagcggcgtcctgtgtgatgttgttggagttaatcccgaccgcacggcacagcagtccattttcggtgacactgtttctgtgagcgcggctgtcggtggcgaatgcccggtgtacacgctgcgcccgggtgctgtccccgctgagcctgtgccggctgccgacgccacaatcgaaaccctggaacttgccggcccgggtgcactggacgccaccgtcgagtccttcaccccggcagtgcacggagaccggcccgagctcaccgaggccaaggttgttgtcgccggtggccgtggggtcggcgaggacggttttgcaacactcgtggaaacccttgcagacgttttcggtgccgcgatcggtgctacccgcgacgtcgtcgatcaaggctgggctgacggcagcatgcaggtggggcaaacgggtgttaccgtgtcccccgatttgtacattgcgctgggtatttccggtgcgattcagcacaagtccggcatgcaaacctccaaggccatcgtcgctatcaacaacgatgaggacgcgcacatcttcgacatcgccgaccttgggctggtcgccaatgttgaagacgtcgtgcccgtactgatcgaacgtttgaagtagccccacggcagttatgcaggtttttctcgatcacgccgcgacgtcgcccacccgcgaggtcgcgatcgaggcctaccttgagcacgcgcatcttcttaacccaggcggccaatacgctttaggcaggcaggcgaaggcagccctcgagcaagcccgcgaagacatcggggagctgctgggagcagaacccattgaggtcatcttctgcgcgagcggcacagaggcagacaacctcgcaatccacggactgtgggggaatgcgacacatggtgtggtgttcaccagcccactggagcaccctggcgttcgggaacccatcaagcatctggccggcgcgcgtgtggtcgacatgccactagaacgaaacaacactgcacgggtcgacagcgaacttttccgtcgacaactggtggaattcgccgtggcgcactctgcaggggacacagctgatattcggtttgccacctgcatgatggctaataatgagaccggcgccatccaacctatcgccgacattgcccggctgtgcgcgcagcccccggcagtacccggtgcagggccacaattaacacctttcccactgcatgttgacgcggtgcaggccgtcgggcacatacctgttgattttcatgcactcggtgcgacaacgcttgccgcgagcgcccacaagttcggtggaacgaggggcgtggggctgctgttggccagacgttccccagctctgcacccgctgctgacaggtgggggacaggagcgcggcatccggcccggcacccacgacgttgccggcgccgtcgccacagctgccgccttaaaagaggcctgttccgagatcgacgctgaacaccaacgcctagctggcctgcgcgatcagatgcgcgaacgcatcaccgcaaccatagacgacgtcatcatccacacccccgaagacgacgtcctgcccgggcacctacacatgtccttccccggggcagaaggcgatagtttgttgatgcttcttgacgtcgcgggcattgcggcgtccacagggtcagcgtgcgccagcggagtcaaccgggccagcgaagtgctgctggccatgggggtggacgaacccaccgcgcgcggagccctccgcatcaccctcggacgtacaagcacccaggacgacgtggacaagctactggcagtgcttccggacgtggtgtcccgcgcccgcctggcaggcatggcctagcaggtagtagggtactgctagtattttcccggattcacccaccacccaatcacccaccatcccaatgaggagaccatgcgagttgtagctgcgatgagcggcggtgttgactcggcggtggctgcggcacgagcagtcgaggccgggcacgatgttgttggcgtccacctagccctgtcgaaggacccacaatcggtgcgcgaatcttcccgcggatgctgctcgctagaagacagtgccgatgcccgacgcatctgcgataaattgggcatcccgttctacgtgtgggatttctcggaccgcttcaaagcagacgtcattgatgatttcgttgaatcctacgcagtcggcgaaacccccaacccctgcctgcggtgcaacgaaaaaatcaagtttcgcgcactgctggaacgctgcgttgccctcggctttgatgccgtggcgaccgggcactacgcgcggctcgtgcagccggaggatggcggcgacggctacctgcgacgtggggacgaccccaacaaggaccagtcctatgtgctgggggtgctgaccaaagaagaactcagtcgctgcatgttccccgtaggtgataccgaaaagccacaaatccgcgcggaggccgccgcccatggtttctcggtagcatccaaaccggattcctacgacatctgcttcatccccgacggcaacacccaggccttcttgggcaaacacattggtctgcggccaggcatgattgtggaccaacaaggcgccccgctgagggagcactcgggcgtacacgaattcacgatcggacagcgcaaaggcctggatatcaagcagccagccgccgatggcaagccccgatacgtcaccgacatcgacgcgaccacgggcacagtcacggttggctcacgcgccgacctgtcggtcactcacatcgaggccgaccgcgtcaaggtactgcacccgatgatggagcagtcggaacctttcaattgcgaagtccaggtgcgtgcccacggcgggatcgttgcctgcaccgcccaggttgatggtgaccgcatccgaatcgacctcgccgaaccactgtccggcgttgcacgggggcaagcagcagtcctctaccttcccgacgacggcggcgatattgtgctgggctccggaaccatctgcgggacgtcgcgtgactgacggtctggatcgcggagagcatgcaggtggcgtaggcggcggagaatgcgtagatcacgtagagcgcgtcacgagtgcggcgccctcccacttccctggaacggatatgtccgttgcatgtgacatcgtgggcagtgagtcagcggcagcctgcacgatccccttgctgccggaacgaggtgcgcacgccgagcttgtagggcgcacagcagtcctactgcccgaagtctactgcgaggtaggcgcccgcagctgggtcctcacagatcgaccccagttgaccacgcgccgggccgtagacacctggcggtgggaccttgacgcttgcgaacaacagtggggccaacgtgacgtcattgtttctgtgatgggcccgtggtccttggcgacggccctcgaactgcccaatgggcacagggcggtgacggatcccggtgctcggcgagatcttaaccaggcgctcgaagcgggggtggcggaggccgtcgctgggctgtcggcgcgtttcggtggcgccgtgcagctcgtgctggaggagccctgggtgccggcgttgcttcagggatcggtgcctggcacgagtgatttcgacgagcttgcggccgtgcctcagtatgagatcagtaaggcgttggatgcactggcggtggggccagcctggttggattgtgcttcgttggcgacgttgttgcagtgggagggtcccgtggcgttcgatgcgctgggattgaaggggacggcggggtttgatgcggcggcggagttgctgtcggtggacaagggggtgcggctgaccttgtcggtggatgagttgatgggggcgggagatgatgcggcgcgtggggtggcggtgcgggtcgccaggtttgtggacatgttgggggtggggagggaggtgctgcagcggattgcggtgtgtgccaaggatggcagggatgcgttgggtttggccggggcgattgcggtggcgagagaggcgaccgacatgctgcatcgggatgcgggggatctttaggtttacgggccaggaggattgcgcgtgctgggagggtgagggaggggattgtgtgtgggaggcgttctgcatgccaacttgagaggttcgataccgccggaatatagtggcgcaaatcactttaagtatccttgcggttgcctatctgttgttgataaactcaacgcagagttgatcctcagtaagcgccggctagtttccggtggcgaatgctccgccggggcctgttaacgcaggtcccggccttttactatctcaaaggtgtagcaatgacaactgcagacgtgcgcgtttccgctgataaaaagcattatttagtcggtatcgatgttggtagttattccgtcggcttatctgccgtggaagtcgacgaagatcgtaaccctgtaggtttgctcagcgcggtttcctatattcatgacgctggagttgaccctaccgcccgcaaagaagctgcaactcgccgtgctgtatccggggtagcgcgcaggactcgtcggttgtatcgccgtaagcgcaagcgcttggtgaatcttgatcgtttcatcgagaagtgcggctggcctgtggttgataacgaggctttcgacgatccactgctgccgtggcgcgcacgcatggcgcttgccgagggctttatcgaggatgacaagcagcgggcactttacctgtcgattgccatgcggcatatcgcgcggcatcgtggctggcgtaacccgtacaccaaggtacagagccttcatagcccacaagaacacagtgacgcgtttaaagcgattcgggaagacgtagagaaagagctcggaaggccacttccggagaacgcaacagtggctcaggtgatcggtcagctaatggtcgctggtcgacgtttgcgcggcgaaggcggagtgatttcggcccgcctccagcaagtagaccacgcgctggagatcaacacaatttgcgccaaacagcgcattccagatgatctacgcaagcagctgatggacatggttttcgcagctgagagtccaaagggtgctgccagcggcagggtggggaaggacccgctctcgggtcggtgcagggctggaaaagctagcgatgcattccagcgataccgtatcgcggcactgactgcgaacctgcgtattcgtcaaggtggggacaaacgtaggcttactcaggttgagatggccctggtcaatgacctactggtcaatgccaagggggcaaagcagcccacttgggtcgacgttgccgaggttctgggcatcgaccgaggccagctactggggaccgccacgatgttggatgacggcgagcgtgcgggtgcaacgcctccggtgcatgccaccaatctcatgatggccagtgtgcggattgcgccgctgaagaattggtggttggaggccgatcagcccgcgcgtgatgcgatgattaaagccttgtcgcttgctgaagctgacgattttgactcacaggagggcgctcaggtccaagcgctgttcagttcactgacggacgaggaacacgagaagctcgatggacttcacttgcctgcaggtcgcgcggcttattctgaagacactttgcgtaagttaaccgagcatattctcgcgcacggttcagacctatatgaagcacgtcgcgcggtattcggagtgagtgaagactgggcgcctccggcccccgatattgcagagcccactggaaaccccgctgtcgatagggttttgaagatagtcaaccgatggttgtctgcagctgaagcggagtggggagcaccgctgagcgtcaacatcgaacacggacgagatgcgtttgtcagtgagctgaagagccgagagatagatcgggatattcaaaggcgcacacgacgcaactatgacctgttaaagacgatgcaagaggagcttggcattgattccaaacccagccgggcagacctctggcgttaccagtcagtacaacgtcagaacggacagtgcgcgtactgcggtagccccattacctactcgaactgcgagatggaccatatcgttcctcgcgcgggtcaggggtctaccaacaagcgtgaaaacctggtggcgacctgtgctcggtgtaaccgttcaaagctgaatattccttttgcggtatgggctgagcggtccactatcccaggggtaagcgttaaagaagctattgatcgtaccaagatgtggctaccagattcaggcatgcgtgcggctgatttccgcagttttgtgaaacaagtgcaggatcgcttccgcaggaccaccctagatgagccgatcgacaacaggtctgcggaatcagtcagctggatggctaatgaattgcgtgcacgcatcgcacaacatttttcgagcgaagacgaccaggcggatacaaaggtccgagtgttccgtggggagattactgcgcgagcgcgcgcggcgtcgggaatccaacgagacctcaacatgattggcggcaaaggaaaacaacgcctcgatcgccggcaccatgctgttgatgccagcgtgattgcacttatgcaggccactgttgcccaggtgttggtcgagcgcaacgacctgaagcatgagcaggctctgcgtcggcaggcacctcagtggaaagaatacgagggtgctgatgaagggacgcgattccagttccggcagtggaagcgccgcatgcactctctgttacgcattctgaaccaggccctcgatgaagaccgtattgtggtgatgtctaacctgaggcttcgtctgggcaatagccaggtccacgaagcacagatcggcaagctggcggctaagaaggtcggggatgcgttttctgtggtcgagatcgatcgtgcatccagcgaagccctatggtgtgcgctcactcgcgatcccgattatgaccccaaggaaggattgccggaaaaccccgagcgcacccttcgcgtgcatggcacacacctgtctgccaatgatgaagtgcacattttcccagtaggtgcagcagccatcgcaattcgaggaggttacgccgagcttggtgcatcattccaccacgctaggatctatcgaatcaacggtaaaaagccttcttatgggatggtgcgtgtatattccgttgatttacagaagttccgccaacaggacctgttcagcgtagagctcaagcctcaaaccgtctctatgcgatatgcagatccgaaggtacgtaaggcgattgcggaaggcaacgcggaataccttggctggttggtgcccgatgatgagttgctcttggatgctagctccttcactggccaagttgctgatacgcaggcagctttgggtccgatcaagcgatggaggctcgatggtcttttcagctcttcgaagcttcgactgcgcccgttgcaacttgctgcggaaggtctggcctcagacagtgaagactatctaaaaaagaccttagacatgccagggtggcgtcctgccgttaacaagttgctttcagttgggcgagtgactgttgtgcgaaggaacgcgttggggcgtcccaggctggaaagtgtggcaaaccttcccgtaacgaagagcttctgatgcccccgcggttaaaccctgggtggcagatgctcgactgcacaggcctggaaggcagcatccactaccggcgcggacaactggtgatccataagggcgaagaatgcgtttccgaggtgccgctttctaggatcgccgtcgtgctcgttggctccaaagtatctatttctggtgcggtgctgatgaagctccgtgaatatgatgtgtgcctacaggtgtgcgattggaagggggtcgttgctgccgtactatatccaatgtcctcgcacacgcgtgtcgcagcacgccaccgtgctcaagcaggcatgtcgctacctaggaagaaagctgcgtggtcggcgctggttcgcgcaaaaatcctcggtcaagccaacgtactgtctgcgttggggacctcctctaagccccttcgggaattagccaagaaagtacgtagtggagatagcgacaactgcgaggccctggcagcaaggatgtattggggagcccttatgcctgcagattcaactaggatgcctggggcgcagtcggactcggtcaatgcttgtttagattatggctacacggttctccgttctcatgcgattcgagcggtcgctagcgcaggcttgtgcggtcccctcggcgtgtttcatcgaagccgtggcaacccatggtgcctcgcggatgatttgatggagccttttcggccgtgcattgattttgtggtgcttaagtcagccaaggacgggacgctcgatttcgatgcgatgaaacctgttctggtcgatgccgctaggggttcgtttaaccaagacaacccagcagcgcctgcagctctggttgagttagcccagcaatttgggaggtacgcagagaaggaaatcgaccgcctcctggtcgatagctggagtcctgtggaagtgctatcagatgaggtcgctggtgagtgagccaatgtggagcatggtgctgttcgatctcccggtaaaaacaaagcggcaaatgagcgaagcaaatcgcttcagaaacgagttacttgatctcggttatcagagattgcagctgtcggtgtacgtgcagtacctgccttcaggtgcaagggcggttggcctagtaaaagcaattaagcgagctattcctccggaaggtgaggttcgaatttttgcgataacagataaacagtggtcgacagcattcagatttatcgctgcagcagagtctgaggtcgaagataagccctctcagctccagattttctgataccaaggttgaggaaaccccctggtagagataggattttcttcctatctgaagtctaccagggggtttgagagttgatccccagcactcacggcccttagtgacagcgtcaccgaagtctaccagggggtttgagagttgatccccagctagggtcgctttcctgaatggtggccccgaagtctaccagggggtttgagagttgatccccagcattgatcctaacggcgcggatgtggatggaagtctaccagggggtttgagagttgatccccagcttgaggctaagaccctttaccgtcatgtgaagtctaccagggggtttgagagttgatccccagctccgtggacacgcaggtatcgcagagccgaagtctaccagggggtttgagagttgatccccagcctgaaccgcatccatagaaagggaaaaagaagtctaccagggggtttgagagttgatccccagcactggttaaatatgacggattgggcggcgaagtctaccagggggtttgagagttgatccccagcttgaggctaagaccctttaccgtcatgtgaagtctaccagggggtttgagagttgatccccagcctgaaccgcatccatagaaagggaaaaagaagtctaccagggggtttgagagttgatccccagcactggttaaatatgacggattgggcggcgaagtctaccagggggtttgagagttgatccccagccttgttggaggttcatgccggaccccaagaagtctaccagggggtttgagagttgatccccagcccggatatggagtattcgactgcctcacgaagtctaccagggggtttgagagttgatccccagcctgcgcagaaaacccgcatgatcgttgtgaagtctaccagggggtttgagagttgatccccagcctgcgcagaaaacccgcatgatcgttgtgaagtctaccagggggtttgagagttgatccccagctaaacatctaacgtcatttttgcagaaggaagtctaccagggggtttgagagttgatccccagcatagtgggagttgatttgtcggggcgtggaagtctaccagggggtttgagagttgatccccagcccactagccgctctcccggggtcatctcgaagtctaccagggggtttgagagttgatccccagctttgaagaacgttgaactgcgcgtcactgaagtctaccagggggtttgagagttgatccccagccagcatccacgcttaatcacctcacgatgaagtctaccagggggtttgagagttgatccccagcatcaacctctatttactggagagatcgagaagtctaccagggggtttgagagttgatccccagcacctcggcgttctcgcaggctcgcgcaagaagtctaccagggggtttgagagttgatccccagcaagcatcggcctttggctcaagctctttgaagtctaccagggggtttgagagttgatccccagcctcgtctactaggttggctgcggcgagcgaagtctaccagggggtttgagagttgatccccagcttatggcttttttcatcgcctcagtggcgaagtctaccagggggtttgagagttgatccccagctacgcagtcgacgaccaaggacgcttcagaagtctaccagggggtttgagagttgatccccagcgttaccctacccctggggcacctttggtgaagtctaccagggggtttgagagttgatccccagctcgaggattgccttaatctcgcgggcgggaagtctaccaggggtttgagagttgatccccagcagtaatgcaagctgaaacgggctattttgaagtctaccagggggtttgagagttgatccccagtggacgttggttgttggcggcgaggttgctggcggcttgacgtacatcgttgatgacggtggtgagtgtgttggcgaggttgcgccaggtgtgttcggctgagctgaaggcccccgtgttggtggtggctagtgcgttggcgagccaggtgagggatgtttcggcgtgtcgcttggtgtggtggagatgtgtgtctgagcgccgttaatgtactcagacgtaaaagatacctgaatcggttccatggggtagcagaagtgataaaaaattttctcctacggactgccccacaatgactagccgatgaacgccggcagcctatgcgctcaagcgggcgtgctgttcaatctcgccgaccaccaacgagcgcacccgacgatcatgcggcatattttcatgcaacaccacaacatgcgggaagaaatcctgcacataggaattctccgcaccctcaaggaaacacgacgtagaaggcaccaccgttgtatccgttttcgtggccaggcaggtgtacatcaccccaggtagcaagtcaccgtcggcgttcaactgctccaaaacctcggaaccagcgatttgttgcatcccagcggggccaaagtagttgtcgatcatcgacttcatcagttccgcgcggcgctcattggtcacccgcgaggacagcatcccgcccagcgaggtgccgtgattgggcgtcgacaaacaaatgatgtggcgagtgggaatgtcaaaaaatttagcgcaccagcgggcaatcagcccgccttgcgaatgcccaaccaggatgaccttttccgcgccggtcgcagccagcacttggcggatgtaggcagctacttgctctgcagaatccggcacactagacgtcgcgcgctgcccataggccggcgcaaaaaccacccacccgagttttcgtagttgggtgctcagctccagccagtcaccgttggacacgctcgtgccatgcagcagaacgaccggccacgggcgctgcggtgtgggacgtgcgcgccagtcgtcttcaaaccagccgcgcgtcggtaaataagtagaaactggcacgggttacttccgttcttgattgccgtggggtgcgaaacgattctgcggtgcagcaggatgttgctgcgggcgttgggctgggtacggctgctgcatgggctgctgttgttgcattattggctattgcatcatctgctgaggtttgttgcttccacggcggccgatcagaacaataacgccgacgaccagcagcgtcggcactatccaagctgcaacgatgatcaacagttcaacaattccaacgctttccatgtgcccaacctaccaggcagcaaaccgggaaaacgctgggcgtaggcatcccggccagcaagcggaagttccaaagtagcagcaagccccacgacgtcattacccatatttgttttcctccgctagccgcgcatcggccacgacatattgaaatccgacacgtcccgcccctggccctcaaagtacttcttcaaaccggcctgctgcttgtaaaaccacacggcctgcttttccatcaactcatccacgtccatcgtggtgagctccgggtgcttcttcgccaacttccaagcaatgcgggccgcagccaaggcatcagcagtcgcctcgtgtgcgttatccagcggcacaccatggtgctcgcacatcgcgcccagcgtgcgcttgcctttgcggtaaggatcaaaagccttgtccacaacataggggtcgaacacagggccgtcgaccgtgaaattgccgctgagctgccgtaatacactcaaatcaaacgctgcattaaacacgatcaaggtgtggcccttgtcccaaccctcgcgtatggcctggatggtcgatgccaagacatcctcgtgcggctggccgttctcacgcgcatactcggtggtgatcccgtgcaccttggtggcttcctccggaatgtccacgcccggatccgccagcagctcgaccttgtctacgtctttgcccgcaatggtgatcattgctgacgtcacgatccgcgcggtcgcaggattcggtgaggttgtctccaggtcaaaggacagcatcgaagcaggattaaacgtagcggcgagaggcatggttacagtatgccagcgccataacttatcggggtgccaagtagactggggcgctatgagccaggccccccacaacgacagtcagctccgccgacaatgggacgaacttgcggaaaaagtccgctaccaccgcgagcagtactacaacggtgaaccatcaatccccgacgcggatttcgacgcattgttccgcgaactggagcaactcgagcgtgaccaccccgagcttgctgttcccgacagccctaccaagcaggtcggtgcacctgtaccggagcaatccacctttgacaacgttgagcacctcgagcgcatgctcagcctggacaacgtatttgacgaggccgaactaggggagtggctagcccgtacacccgcggagaagtacctgtgcgagctgaaaatcgatgggctctccctcgacgtcatttaccgcaacggtgtgcttgaacgcgcagccacccgcggcgacgggcgcgtgggtgaagatgtcacagttaacgccaaaactatcactgacctgcctcacgagctgcacggctcggatgactttcctatcccggaggtcctcgaggtgcgcggtgaggtctttatcagcgtcgccgattttgccgacgtgaatgcagcgcgtatcgaagaaacggccaccgagaaaaacccacagggtcgcccctttgccaacccgcgtaacgcagccgccggaagcttgcggcaaaaggacgtcgagcaagtccgccgtcgaaaactgcgaatgatctgccacggcctcggccactgcgagggcttcacccccacttcgcagcatgaggcctaccaggcgctcgaagcatggggactacccgtcagcccctacaccgaacttgttgacgccgcggacgtgccgggccgcgtgaagtactgggctgagcatcgccatgatgccttgcatgaaatggatggcctggtgatcaaggtcgatagtattgccgagcagcgggacctaggggcaacctcccgcgcgccgcgttgggctatcgcctataaatatccgccggaggaagtaaccaccaaactcgttgatatccagtgcggtgtgggcagaaccggccgcatcacgccttttgccatcatggaaccggtgtatgtggccggctccaccgtagagatggcgactttgcacaaccagtatgaggttcagcgcaaaggcgtactcatcggagacacggtcgtgctgcgcaaagcgggcgaggttattcccgaagttctgggcccagttgttgagcttcgtgacggcagtgaaacgcccttcgttttccccaccacttgtccttcttgtggcactaccttggccccgcaaaaagaagatgacaaagactggcgttgccccaatagccgttcctgcccagcacaactgtccgcacgcttgacctacctggcgagccgcagcggattcgacatcgaagccctgggggagaagggtgcgcgagacctgattgagtccggagtcctttcggatgaagcggggttgttcgatcttgatgagcaagccttgcagcgcaccctggcctatacaaaaggcagtgcgcgcgataaggacaaggttcgggcgcgacgggccgaagaccccacctttgtgtacgaaggcgagatcaacgctaacgggcgtaagctgctcaaaaacctcgaggaagctaaaaatacagaactgtggcgggtgctcgtcagcctgtcgatcaggcacgtcggtcccacagcagcccgagctttggctgacaagtaccacagccttcctgcgcttattgacgccccggtggatgatctcgcgcagattgacggtgtgggggagatcatcgcagcgtcattcaagcaatggtttgaagttgattggcatcgtgcgatcgtcgaccgttgggctgcaagtggtgtgaccatggaggaagaggtcggcgagcagctgccccagaccctggaggggctgactgttgtggtgacggggtccctcgagggctttactcgtgatggtgccaagcaggcgattgttgagcgcggtggtaaagctgccgggtcggtgtcgaagaagacggacttcgtggtggtgggcgaaaatgcgggttcgaaggaggctaaagctcgcgacctgggcctgccgattctggacgaggccgggtttgtgcgcctgcttgacaatggtgtggaggagtagttcagctcacagttgtgtttttattaagttttcaataaggtggcggctagacaataaccccaccaccttttggaggtcaccatgcacaacgttcacgaaagccacgaccacgtccacggtgaaggctgcggccacgtcgccgtcccccacggtgaccacgtcgactacgttcacgatggccacctgcaccacaatcacgacggccactgggacgaatgcggccacagcacctgcgacgcagagcaccccatccacgaaggtcacgaccacgtccacggcgagggctgcggccacgtagccgtcccccacggcgaccacgtcgactacgttcacgatggccacctgcaccacagccacgatggccactgggacgaatgcgtctgcgactgcgcctaagcctaagtaaaaagcgcgttacctccacaaacagtggggtgacgcgctttttgcagctcaccgaatagctacaaagccaaaggctaaccgatgatagccccggcaatacgccccaaattgcccaggtgctcgacctcgctagccaagaaatccggaccaccagggcggccgagtatcagtagtagcgaatcacccaccggggtcgcagccaacgccgcatcgagcaacgcccacggctccggaatccactgttcggactcggggtccaaaatgcgcgccccgttgatctcgggcatcacaggattgttgccatcgtcttccggcgctgctgcagaggcagccacacgacgcgaggaccccgacacgtccagcagaatggcccaaccggcagtcatcgtctggggcagtgcgctgacaaaccgctccgccgcacgttccttgttgtgccgatttgacgcgacgtcagcaagcaaagcgatctggccacggcggtcgacagcgccggaaaatgggcggatcgaatcaacctccacgccgtccagcccctgcgccgcggtaatgagggtgtcaggtagggaagaagcggggatctccaccacgagatcatccatcgcggtgccttcggggaatgtctgcacaacgtcgacggagcgaatgttgcagtccaccgtgcccagcgcatcagcaagtcggcccaggctacctggggtatcggggagtagaacccggagaaggtaagacattggaaaccaatctgaaaatgtcggtggtgtgaatcagtgttccctaactctaccaacacaagtacctatcacgtcgataggcacccgctagagcgcatccccgggtggggtgcagtagactgctagagatcgatcccttgaatccccgtaaaggaatgaagacgtgccagaaatttcgcgcgacaaggttgagcacctcgccaagctcgcccgacttgccctgaccgaagaagaacttgaacagttcgcaggacagatcgacggcatcatcgctaacgtgtccgcggtgggcaaagtcgccgccgatggtgtggaacctatgagccacccgcactccattcagaccaccatgcgggaagacgtcgtggtgcccaccctcaccgccgagcaggcgttggagatggcaccggctgttgaagagcagcgctttatggtcccgcagatccttggcgaagaagaataggaacggcacgaacaatcatgactgaatctacctaccttgcttcccagtcgcccagcgagctgactcgcatgaccgcggcggagctagccgacaagatccacagccgcgaagtgtcttctgtcgaggtcacccaggctcacctcgatcgcatcgacgcagttgattccgacctgcatgccttcctgcacgtaggtgccgaggctgctttggaggccgcttcgcgtgttgacgccgcgttggatgcgggtgaagctcccgcgtcgccgttggcgggtgtgccgctggcactcaaggatgtctttaccaccacggatgcccccactacgtgcgcctccaagattttggagggctacgttgcgccctacgatgcaaccgtcacccggaagatccgggaggccggcatcccaatcttgggcaaaaccaatatggacgagttcgccatgggctcttctaccgagaactctgcttacggccccacccacaacccgtgggatgttgagcgtaccgctggtggctccggcggtggatcttcagcggctttggctgctggcgaagccccccttgctatcggtaccgacaccggtggttccatccgccagcccgcagcgctgaccaacaccgttggtgtgaagcccacgtacggcactgtgtctcgctacggtcttgttgcgtgcgcctcctcgcttgatcaaggtggcccgactgctcgtacagtgcttgacacggcgctgttacatgaggtcatcgccgggcatgatcccttcgatgcgaccagtgtgaacaagccggtggccccggttgtcgcggctgctcgtgaaggtgccaacggtgatctgaagggtgtgcgcgtcggcgtcgtgaagcagtttgatcgcgagggctaccagcccggcgtgctcgagcagttccacaaggctgtcgaccagctcacctcccagggggcagaagtggtggaggtcgattgtcctcactttgatgatg

SEQ ID NO: 3970 - DNA, 23327 bp, synthetic construct
  source 1..23327: mol_type = other DNA
  misc_feature 1..23327: note = Synthetic
cttgtttggttgatcgccatcgcctgccccaaatgttcggggctgaccagggttttcaacgccgccttctccgcgggcgaaaacaccgccgtcgccgaccccaccaggcaggcggccacggccaacaccagcggaatgggagcgtggagaataaaatggttggctaccaccacgcaaatccccgcgcccccaaggatcgtggacgaaagcatgagcggtaatggtcgatgcttgtccgcccagattccggcggggatccccatgaccacgatggccagcgtcacgcacccgctcaccagggccgcataaaacggcgactgggtgagggccagcgtgtaggcgaaaaacgcgaaactggacacgctatttcccagcgtgctgacggtttgccccgtcatgagcaggcgataatttttatcagagaacagtatccggttgtcgctcattcgcctcccgccactaccccactgctctacggctattccacctcagccagggcggcgtcaatgtcggcaatgaggtcgtcaagatcctcaatgccaatggaaatccgcaccaaatcccggggcacctccagggtcgaacccgtcacggactggtgcgtcatggtggccggatgctccaccagcgactccaccccacccaatgactccgccaaacagataagccgcgtggccaaacaaaacgcctgggctgcagcctcgtcgtggaaccgcaccgaaatcatcgccccaaagcggcgcatctgcctcaacgccacctcgtgacccgggtgggtttccagcccagggtacaaaaccgcctttaccttgggtgactgctgcaaatgccgggcgatggcctcggcgttatcgcagtgccgatccatgcgcacggccagcgtcttgatgccccgggcggtcaaatacgcgtcaaacaccgaggggatcgcgccggccccgccctggagaaacgccagctcctcgtcaagctttgcggaattcgtgaccactaccccaccgaccacgtcggaatgcccacccaaatatttcgtggtggagtgcagcacgtggtcggcccccagcgccagcgggttttgcagatacggcgacgcaaacgtattgtccacaaccaactgggggccatcgagcagctcggcgaccgccgcaatgtcggtgatcgccaatgccggattggagggggtttccaaccacacgagtttcgtgtcgggcgtgatcgcggcggcaatggcgtcggtcgaagtagtgtcgacaacggtgtaggtaatgccccactccgcgaacaccgaatcaatgagccgaaaggttccaccgtaagcatcgtggccgaaaatcaaatggtcacccgggcgcagcagcacgcgcaggagcacgtcggtggcggccatgccggaggaaaacgcccgaccataagtggcaccctccagcgcggcaacggttttctccagggcggcaatggtgggattgccgcagcgggtgtattcgtagccgccccgaagctcgttcaaaccgttttgggcaaacgtggtggaggcgtagatgggggtattaatggccccatagagggaatccgggtcgtaacccgcgtggatgctggcagtggcaaacccctggggcttcggtgcactcatcggcgacgctccttgaacaatgtcgtttacggaaaagttcacgattggtagacaatcctttccgagatactagaccaagcggtccattcgcgtcgattcccgacagaactgggtgaataaaaccacccccgacccgccctatagggccagaagattaatcccagtgctgtgataggctgacccgaagggggcgtcgacccgcacccatcgactattccgcgacacccgcaaatgccgcggaatggcggccggggcatccatgccgggaatcagccccaaggcggtgagcgtaaacaccaagcgcatggggatctcggtgtcatcattgacggtaatcaccgcctgatccatgagcgactgcggcgggcccaacgggcccgaaaactgccgggccagggcacgcccctggtcgctcagccgctgcaccacatcggcggggatttcatcaagaagctcaaagccggtagtcggtggcagcgcacccatcccccaccccgcatccatggccacggccgtcatggtggtgtcggtggcgtcggccaaaaggtcgctgaccagcaccgccgccccattcctagaacaggagccggcgacgcgccgggacgcgatgacggcgaagggggtggtgacgaacacgtcgaccgccgcgtcggagaccgtcgaaaagcgggccatggcccgatcctgcaacgcaaccgcgcgctgcaacaatgatatgagtccgcggccaccgcgttctatggtgagggtttcggtagccattattcgtcctcggcgcgggtgagcactttgatttccttcgcggtgatcgcgcgggggcgtgcggtcatgatgtcgatggcgacctgcaccacctcgaccacgcaacagatctgcccctcaccatccttgatttcctgccgggtggtaaacgacgtgttaccgatctcaacaacctgggtttccaccgtgacataggggttgtgcggcaacaccggccgcaaataatcggcctcgattttgcgaacaaacacactgggcatgtccatgccgcggcccacgaattcttccagcgcgaatgccatgcgggcttcctgcgccagttccacataggcggcattggtgatgtgcccgaacctatcgaaatccccccaccgaactggcacttgagcgatgtggatactactgtttgactgggtttctgccatgggtattacatgctttcttcatcgttaagtaatcaagtgtacgcttcaatcaacataacgagtctagctgagttcttgttacggcaaaacaaaacccccgggtgcatccgggggcaatgctatttgtcacgcatgcattatgtcggtttttgcctgcgcttatcgacgcactatcgagtgagttttcggtgcgtcacccgggagggtcgggccgcctcggcgcccagccgctcaaccttattcttctcgtagtcgccgaaattgccttcgaaccagaaccattggccctcggccacgttcccctcccatgccagaatgtgggtgcaggtgcggtcgaggaaccaccggtcgtgggagatcaccacggcgcagcccgggaagttctgcagcgcgttttccagggaggacagggtttccacgtccaggtcgttggtgggctcgtccagcagaatcaggttgccgccctgcttgagggtgagcgccaggttcaggcggttccgctcaccacccgaaaggactttcgagggtttttgttggtcggcgcccttgaacccgaaggcggacaggtaggcgcgggacggcatttcgttctgccccaccacaatgtggtccaggccgtcggacacgacttcccatacggttttttccgggtcgatgttttcccggccctggtccacgtaggacagccgcacggtttggcccacatttacttcgccggtgtcgggttcttccaggccaacaatggtcttgaacagggtggttttgcccacaccgttggggccgatcaccccgacaatgccgttgcggggcagggtgaacgacaggtctttgatcaggatacggccgtcgaaccctttgttgaggttgtggacttccaccacctgtgcgcccaggcgcggcggggtggggatttggatttcttcgaagtccagcttgcggtatttctccgcctcggcggccatttcttcgtagcgggccaggcgggccttggacttggcttggcgggccttcgccccggaccgcacccactccagctcctgcttcaggcgtttttgtagcttgcggtctttctggccggcgacctctaggcgttcggctttcttctccaggtaggtggaatagttgccctcgtaggggtacagtttgccgcggtcgacttcgcaaatccagccagccacgtggtcgaggaagtaccggtcgtgggtgacagccaggacggcacccgggtatttggccaggtgttgctccaaccattggacggattcggcatccaggtggttggtgggctcgtcgagcagcagtagatccggttcggccaggaggagtttcgccagggccacgcggcggcgctccccgccggacaggtgggtgacgggctcgtccgacggcgggcatcgcagggcctccatggcctgctcgattttggagtcgatttcccaggcgtcagccgcgtcgagtttttcttgcagcttgcccatttcctccatgagctcgtcggtgtagttggtggccatttcctcggcgatcgcattgtagcgcttgagggtttcaaaaatgtcgcccaggccctcttccacgttttcccgcacggttttttcctcgttcaacgggggttcctgaagcaggatgccgacggttgcacccgggtcgaggaaggcttcaccgttggagggttggtccaggccagccatgattttgaggatggatgatttgcccgcgccgttggggccgaccacgccgatcttggcccctgggtaaaatgccatggtgacattgtcgaggatgactttgtcgccgatggctttgcgcacatttttcatcgtgtagataaattcgcccacgtttggtttccccttaaagtgagtaagttaatagttggcttctaagggtacatgaccgtgctgcttgggtgcgagacgccgctagccaccagtgcttccgacgccggttccgcgggtgggtcgtctggcatgggttccgaatagggtgcttccggggcgggtggcgtcggcgacgcggcctccagtgccggaggtttgccgtcgtgaagcgacatggcggaaacctcaacggcgtagtgggtaatgtttttcggctcgcaattgaacctgctcaggtccgcgcccccggtatgctttgcgacgggcagtgggttgcggcaataccgcaccacataggcgcataactcaaaacccacatagagcgcccgcaacaccaccttggtgcgcagcttgccttcctggtcgcgccattcttgtgtggtcaaataccccacgcaaatcaccgggtttcctttcgacaatgattcgtgcacgttgaccgcgaggtcgccccaggtttccacatcaatatagagctggtcgcgttcctcgtaatgcgcgctgttgtcggcgaatcggcgcacccgccgggaggtgcccagccgaaacctggcgaattttcggccggtgtcgaactcgcggtagaacggttcggcggtgaggtggccgatgagagtgacggtttgttgttgcatgggcgggctccttgaaccgggtcatcacgtggggttttgctgctgttacctcccactgtgcccgccggctacccggttgtcgagggttttccgtaactcgtccagtctgtggataactatcctgcggctgccgagttatccacattattattgtgcagtcgactgcaacttctcagcctactgtgggcttttcgacgccctacccaccccattcgggccgaaacccacaatcaggacccgttcttattcatccgcgccagcatttggttgtacgcttccaaatcctcgtcttcggtgtcgtcggcacgctggtcgtaggccttggcctcgttccggtcctccttcaaccattgcaggaacagggcgccgaacaccaccaccagcgggaatgagccggaagcccaggcgatgccgccgcccacgtcctggtcgtgcagcaggtcgatgtcccacggcaaccctagggtgcggtagaagtcttccgccagaatctgcgacaattgcatgaggtacacgccgaaatacaggtgcaccggcatggagaacaccagccaggcgaggcggcgcaacaccgtattttcccgcggcttcgggtcggagccaatcatgtcccagtagtaaatgtatcccgacagcaggaacacccagttcataatgaggtggccggcgtgctctttcaccatgaggtcgtaccagggagtgatatagagcaggtaaaagaaggtgaggaattggatggtattcactgccgggtggaacaggaatttgagcgtggtggattggataaaggcctgcacccattcgtgcaaaccgggctcctccgggttgggggtggtgacggtgaggatcatttgcaggggggcacccaacaccaggaacacggggatcaccatggacagcatcatgtgggccaccatgtgcatggagaacatggccggcatgtacaagccaatcccggaactcatggccagcgccagggtgacgctgccgagcagccaccaaaaggtgcgctgccacggccaggcctcccccaactgtttcaggcggtacagcccatacaggtagccaacggtgaggaagatccccagggtggtgaacatgatgtcgaatcgccaaatggtccacacggaccacacggtcggttcaaacgtgaggtcataccccatggtgagggccatgggcgacaggtccaccacccgcggcggcggtggcggagtgcggcccaaggagaccgcaacaccaatggtggccgccatgacgagcacctccacgacggcgatgcggataaaggggctgctgtttcccgatgtcaggcgcggaatggtggcggtgcggtgccaccacccgaaaattgccaatgcgaacgtgagtaccgtcttggccacaatcacccggccgtaatcggaagtgaacaagtcttcgaatcgcacccggatggcggcgttgatgaccccggagatggccatagcgaccatggcaaccgcggcgatcgtggagtagcggcgcaccgccaattgcaggctcgggcccaaccgccgaccgtgggcgatgagcgccatgaggccgcccacccacagcatcatgaacagcacgtgccacagcagcgagttcgtcccataatcgtggtcgccgccggccgccgagtgcccggacagtccttggggggcgacgatcaggatggcgcccaccagccacacgggctgccacatccaggtgcgcggcgcaatgagcgcggccccacccaccacgagagcaatcatggccgaaatgagccacgccttggcatccgccacctggttgagcgccacaaaccagttcgccggcttgatggcctcggtgatcgactggcccgacacgtcggaaagcaccaacggcaccataatgatcccaatgagtgcaaagacgagcgccgccactgcacccgtgcgcgacgcaatgagaccatcgacggtcaggtacgcccgccgaatgtccccttgacggggggagagtagaaaacttgcgaataggaaggatccgaccgataacgcggcaagcaaccacgcccccgcccgcagaagtggcagacctgctgtggttatggggccggggtcgggaatgcccaggacagcgagcgattccgtcaagaaaccccaggaaattatcgcccccgcaacgccggcgacgagaaaaaagaggaggtataacggccaggttatccgcgctccccgactgctcttcgtttcgaccatgcgtttaagcctaacccccggtggggtaaatccagtcattgccccatcaacaaaatttcaacggcgggttaaaattgcgctaatctgtttctcgttacgcctccatagctcagtggatagagctaccggtttctacccggttggtcgcgggttcgaatcctgctggaggcacgtttgaaaccccactgccaggcattttaccgagtcagtggggttttacgtttgtgagacatggcgggtaatatgcaggtgccaaattcgcaggaattcgaatttttgttcgtgatggatttgatggttccagggcccgcagaagcgaactgtttttcgatgcccaaccgggccagcccaccacttgccgaagccaccgccgggccgccggtcccccaccgccacagcggctatttttgtttctgaagctccgtcaacatcttctcaatccgatccaaccgctccggcagggtcgccaccgtccgggcaatttcgggaatcagccgaatcttgtcggcgacgaagtcgacaaaggttttgccttccgtggccttccacccggtgaaccgtggccccttggtgtcccactcggggccgacaagttggtctaaaatccagcgaatcatggtccgttcttctccttgctccggggtttccgaggtgggtgttggggtggggttattgggttggcgggtattacggagttcctgggcatagccgagcaccacgtcgtaggggaatccggggccggggtcggtgtggttgacttcgcgccaggcctcggagatttcggcatgcccgtgcacgccgcgggcaccggcacgcagccggtcggcgtcgataaattccaggggaatgtcgtagagctgcgaccagctagcgatctgttcggcggtccgccgcagttttgcgtcgtcgtcaagccaatcctcacggctcattcgcgcgtaaccggtgaggctgatgtggagacaacgggcattaccagtggggccggcggcatacggcataaaatcatctgtattgcacaaaattaaaatgccgtcggcgccggcaagcacgttatagcttgacccattggcggggtttgtctgccactgggccacagcaatcccgtcccgttccggcggacattccacggtatggacgcaaatcgactggatactgtcgatcgaccggtaacccacgcccggcatgtccgcggtgaagtcggcgtcgtagcgcaccacgatcggcccggacgactcgggctgcgactgcggctgtggcgcgacctccgacacgggtttttgaccccagtagtggtgccagacgtcgttgacatcacattcgataccgccgacggtgacctgaccagcccgctgaaacaggactgcttcatcagacaattcgccccatgaccaggcgattgtctgccacgccaggtgtttcccgccgccgaggctcgcaatcacgccatcctcgaccgcccagctaatcacgcgggaatggccgtagatcccgactctttcgcgccccagaatttcgcaacaggcccgaaaatattcgaccgccgtcacgttccactgttcgagcgtgatggcaaagtccacggcaaaaaacacgggatggttaccgcacccgagttcatcaagtttttgtttggcggcctgggcatcggcaagcccaccgtcgcggccgcgcataacgtcagaatcggcctcttttccgtattgccagacgaaagccacgtcgagaccatgggcgtgaaagtcgtcgatttcggcacgttggatgggttttccgcgcatccaatccgcgcgcggcggactgatatatctcactgcgccgtcgtatccggcgtcacggacggcggcagcctggggaaccccggcgctgtaatctagtacggttgccatcgcatttcctccaattatgcaaaaccccagcatatttgctattttggggtggtagttgcgccccatgatactgattgacacacccaaattgggggcactgggcaagcatctcccgagacaccttggtgttgagtagcacccaatcgcggtaataatgatgaattgtcacaccaaattgtggttagcaagataaccatgtagcagctttacgacgctctaaagtgcggaaaaataagatgaataatttataaataaccaaatatgtagcaaaaatggtacgaataaattgctcaacaaatctgagacaattttcccaaccaaatagtggaaatgtcaacattaactgggattttacctaaagaagaacttctatccctgtgaacctttgtcactcccgccactttgtatagttatttgcacagtaatttaccccctcaattaccccctatttgcgattttctaaataagccttgcgaatcaaggtttttccttttatcattgcttgcagagttgaacctcagtaagtgtcggctagtttccggcgcagaatgctccagccgacggacttacctccgtcggctttcttttttacgaaaggattcgccttgaactcggcaaacgtgaactaccgggtgggaatcgacgttgggtcttattcccttggtatggcggccatcgccattgatgatgatgggaaacccacggaaatcctcagcgctatctccctcatccacgactcgggtgtcgacccggatagtgcaaaatccgccgctactcgactagcgacctcgggtgtggcccggcgaacccggcggctttatcggcggaagcgtaagcgtcttgccaagctcgacaagtttattagctcccaggggtggcagctcaaggagtttgaggagtacaaggacccgttttacccgtggcgggtgcgggccgagttggccaccaccaccatcaccgatcagcaagaactaggcgaaaagctgtccattgctctgcgtcatatcgcccgccaccgggggtggcgcaacccttacagcaaggtcactgccctgtataccgtgacggaaccatccgatgcctttttggcaatgcaggaggagtgcgcgaaaaagctggggcgaagcattccaaaaaccatcacggtaggccaactggtagccagcatgaatctgggcaagacaaggctgcgtggcgagaatagcctgttagcggccaggccacgacaaagtgacaatgccaacgagattcacaccattgccaaggttcaaggcctttccaacgatctggtgaagcaaatcattgaccacgtgtttgctgccgagtcccccaagggctccacggcagaacgggtgggtaaggatccccttcaacccacgaagaagcgtgcattgaaggcatcggatgccttccagcggtatcgtatcgcagcgcttatcgggaacctgcggatccgcggcggtaaggggaatcggcgtctcactgccgaggaaaccaggctggttttcgattacctgcggagcctgcctgctaagcaggagcccacgtggcagttggttgcggaacagctcaggatcgaccgcggcaacctggtgggtaccgcgatcatgactgatgatggtgagcgcgccggagctaaaccaccggttcacgatactaaccggatcatggaaagcacgaagatcaagccgcttgccgcatggtggaaatctgccgacactgatgcccgagcagccatggtgaaggcgttgtcgaatgccgaggtggatgattttgattcccaagccggcgcccaagtgcaggagttctttttcggcatttctgacgaggatcaggagaagcttgacggactccatctccccatcggtcgtgctgcctatagcgaagacactcttgtccgcctcaccaagcgcatgattgacaaaggtatggatttgtatgaggcacggcaggcggagtttaagattccgaatgattgggcaccgccagcaccggaaatcggcgagcgggtgggaaatccagcggttgatcgggtgctgaaggcaacggcccggtggttgaatgcagcggaacgccagtggggtgccccaaagtctgtcaatattgagcacgtacgggctgctttcatgagcgaatcaagtgcgcgggaacttgaccgggacaatcaacagcgtgcaaagcggaatgtaaaagtagtggccgagatgcaggaaaaattaggcatcgagggtcgaccaagccgtgcagatgtctggcggtttcaatcaatccaacggcagaatggtaaatgcgcatactgcggagcacagattagctttaagaattccgaaatggaccacatcgtcccacaagcgggtgaaggttccaccaataccagggataatctcgtcgcagtgtgccgtgagtgcaacagttcaaagtctaatatcgcatttgcggtgtgggcagaaaatacctctcgacccggtatttctgttcaaaatgcagtcgagcaaactcggcactgggttacggattctggcctgcgtaaacctgaatttgataagttccgcaagcaagtatgcgatcggctacggcgtaaagccaccgacgagccgattgatgcccgctccctggaatccgtggcgtggatggcgaatgagctccgctcccggattgcgcaaaagttcaaggatggtgacacaaaagtccgggtgtataagggtgctttgacggctgaggcacgaagggcctcgggtatttccggcaaattggaattcgtcgatggtaagggcaagtcgcggttggatcgccggcatcacgcgatagacgccgcggtggttgcgttcacgtcgaattatgttgcggaaacgctagcactacggtcgaatatgaaattcgaccaggagctgcgtcgcaaagcaccccaatggcgggaatttacgggctcggatcatgtgcatcaggttgagtggaccaagtggaagtaccgcatgcaggccttagcagaattattgaataatgcactcgcacaagatcgtattgttgttatgcataacctgcgtctgcggcttggtaatggtgctgcccatgaagacacgattggcaagttaacccggctcaaggtgggtgacgcaatctctactacagatattgatcgggcatctagcgaagccctatggtgcgcgttgacccgtgacccagattatgaccccaagactggtttgccggaaaacccaaatcgaacgattcggattcatggaacgcatcttacggcttccgatgagattacagtgttcccagtgaccgctgcatccattcccatccgggacggattcgccaagttgggaggtaattatcatcatgtgcggttattccgcgttcccagtggcaaaaaatacaagtattgtctcatgcaggtgtacacggttgatcttctcaaattccgcaaagaagacctattcaccgtagagctcaagccacaaactattagtgttcgaacatgcgaagcactactacgcaaagcgctagcgaatggcactgcggaatatttgggctggctgatcagcgatgatgaactactcattgatacctcatcatttgatactcccggaattgtaaagttgcgagaagaatatggtcctgtcaatcgatggcgacttgctggcttaacttcagttacccgattgaatctccgacctctttacctcagcaaagagggattaaaacctaacgtcaatcccgaaattaaaaagattattgataatcgtagttggattatcactgtaaacaaactattcagtagcggccacgtcaaaattatccgccgagatgcgcttgggcgtcctcgactccatagcgcagctcatctaccaatatgttgggaagtgaaatgaagaaatgagtgacagtggttggcaagtcctcgacttcagtgacttcaaggggtcattgacgtataaacgaggtaatgtccatgtacgcaagcatgaagatggttccgaagtagatgtgcctctcgcccatgccgctgtggtgattgttggtgttgccgctacagtcagcggtgcactactgagtaagctttctgaatatgatgtcgccttacttgtctgtgattggcgtaaggtgccggtagcaggggcaatgccatggagggagcatactcggattggggcgaggcagcaggcacaagcagcaacaagtttgcctcggcgaaaaaatgcgtgggcacggattgttcgggctaaaatccttggtcaggccaatacgcttttgagtttttcgcaagcaacaaaggcgaaatcacttcggaatattgctaaagctgtgcgatcaggtgaccctgataacaaggaggctttggcagctcggttgtattggtcgtcttttgcccggatggctgattttgcccgcgatcctggttctgccactcaagggtggaattcggcactggactatgcatatacaattttgcgtggtcatggtattcgggctatcgcttctgcgggtctcagcggcacattaggggtgttccaccgtggtcgtggcaatccgttcgcattggtggatgatctcatcgagcctttccgaccggcaatcgacgacttcgtgtttcaccatgttgcatcagatgctgagctcactcctgatatacgccaccaattggttgtatgctgtgatcgtactttctcatcagatggacattcaatccctacggttttcacctcgtttgcccaaaactttggaatgtatgtagagggtgacacgaatgaactaactacccctgtttgggagggtccattcgatgccgaagaagaatagcgaacccatgtggtgcgttgtaatgttcgatctgccggttggaacaaagaagcaacgttcggaggccaatcggtttcggaatcacctgtttgacttgggtttttgtcgtgctcagttcagcgtatatgtgcagtatttaccactaggtgttcgactgcacatcctggcgaagagtattaaaaccgagctacctcatggtggtgacgtgcggattttggctgtgacggatacacaatggtcaaaaactattcgatattccaacgctgatgaaacaaaagccgaggaaacaccgagccagcttatgattttttaaaagtaaaatcccctgatattacctgttcaaaccctatttttggggctataacaagtatatcaagggatttgagagttgaaccccagccgtggggtaggtgacaacgaactccacacaagtatatcaagggatttgagagttgaaccccagcgcggccatatgttcgggtcgccatgtgacaagtatatcaagggatttgagagttgaaccccagcgcgggtgcgtgcgtgcgtgcgggtgcgtcaagtatatcaagggatttgagagttgaaccccagcagattaaacgcttcgctgctgcccgtaacaagtatatcaagggatttgagagttgaaccccagcggaacgttcggcgaggcgttcggcggcgcaagtatatcaagggatttgagagttgaaccccagcacggaaatccccacgccgtggaggccgccaagtatatcaagggatttgagagttgaaccccagcatggtaaaaaccctatacaacgacgtaacaagtatatcaagggatttgagagttgaaccccagcatggtaaaagccctgtataccaggccacaagtatatcaagggatttgagagttgaaccccagctagtagcacggcttgaatttaccaccgacaagtatatcaagggatttgagagttgaaccccagcgatccagccgttcgtgagaccgtttttccaagtatatcaagggatttgagagttgaaccccagccttgactcgatcggtgatgcggagctgccaagtatatcaagggatttgagagttgaaccccagcgcgcgggactgcctaggggtcggccggccaagtatatcaagggatttgagagttgaaccccagctgctatctatgcgggcaaccaatcaactcaagtatatcaagggatttgagagttgaaccccagctaaactcgtacgccccacgattatcccacaagtatatcaagggatttgagagtcgaacctcagcctccaatcggtatcaggtggagggattgcaagtatatcaagggatttgagagttgaaccccagcactatgtagtagatggtcagaaagacaacaagtatatcaagggatttgagagttgaaccccagcttctgctgcgttttccgcggcttggaggcaagtatatcaagggatttgagagtcgaaccccagccgaagactggcttgccgacgaccaaaagcaagtatatcaagggattagagagttgaaccccagcttacgagttgaaccccagcaaccccagtgatcctagcaatcatccaaagccaggacccagtatatcagggtttaaaaaacaaaaaccctgcaaataatcaaacctcaaccggaacatccaatctcaacttggacaagcaaacatatcaataagaaaacacctttgtgctctcccctatactaaaatcccatatatccaatcattcgcagaaatctggagcatgccacatgtcaatcattgttcgccgactcgcccaccacgcaggcaccgtcactgggtagcggaatagctgatccctgcagcaaacctcaacccacaacgcaaggttagttaacctgcagctgaacccatgacgcgcccctaagtgggcatatcacgccgcgccgcaaccattcgcacccagcgccggcgattttcccatgcttttcccaaacctcatggagttcactgtgaaccaacccaccccgatactttcggcacgccagctcacacggcgcttccgaaacaccaccaccgtcaacaatgtatccttcgacattcaccccggccagattgtggcattggttggcccgaacggcgccggcaaaaccacgaccgtgaaaatgtgttcgaccctcctggcacccacatccggcacaatcacggtatgcggcattgacgccacccgaaggcgtcgacaagcaaggcaacacatcggcatcgtcctgggcggcgaaatgggcttctaccagcatgcttctgtcaaagataacttgctgttcttcgccgacgtcgcgggcgttccgtcacgcagccgccgatcccgggtcgaggatgccctcgcgcaggtccgcctcaccgatcgcatgttcgacccggttggggagctgtcgcgcggcatgaagcaacgcctccacatcgcgcgcggcctgctgtctcgcccccaagtgctgcttttcgacgagcccaccaacggcctggacccggagatttccgtcgaaattcgggccctcatccgggagttagccaccgacggcgcaggcgtgctgctcacatcgcacctgctcacagaggtggcggagctgtccgacacgatccatgtgctcattgatgggcgcatcgttgtcaccggcggggtcgccgacatcgccgaacgtgccggaatcaccgcggtgacctcgttcactaccccgctgggcgcggagccgcggctgcgggagttcctcaccactctcactcaccataattcgattgcgcacgttacatgcgtgcggatggtcgcccatcacgctggcctcatcagttggtgtggcgcccccacggatgtttccgcgctggctgacgccgtgggcctgacggtaactgacgtcatgaccaggaagcccaacctagaggaaagctacctggcgctggtggggcaatcatgatttcggttatgcgaatggtgtggtttcacctgcggcaatttgcccgggtcggatatttcgtggggttgctggtgtcgtcaaccacctcaatatttttgctgcaactgttggcgatgcgcgccgtcaccgggccgattctcagcccggatccgcagctgtgggtgcgggcagcactggtgggcatgtggtcggtgtgcacggtgtcggcggggatgattggttttcagcggatgcagggcaccctagtgcatgtgttgttttcaccccggtcacccattgtcacgctcgggccgatagtggctgccggctcctgctttgggattctggcgtttccgctggcggcgggcctggccgtcgtgtttcaccagccagtcggcacgatcaatggggttggcctgccgctctactggctggcctgtctgtcggtcagcgtggtggtggcggccacgttcgtgttcacgcgcaacgccatcgcgtacgagcccttgctgctggttcccatgattgtgctgtcgggggtgttcggctccccactcccccagcttgccgcggtggggtgggtgattcccaccagccacgcgatcgcggtgctgaccacaccagacatcgacccgggccgcatcgtcaccaccctagtggtgtcgacagcgtggttggcgggtggcggatggctcgcccggatagcgcttcggcgcgcaacggtggccggcaccctggaggtggcgtaatgtccgattgcaagcaatggtatgtggcgttacgaatcgcccgccaatccatgccggcgctggcgaatccacgtaccgcggtggtcacgctggtggcagcacccctgctggaggtcgtattactgctggttatcgcgctccggctgcaggttccagaaaccatcattgtgacggatgccagcctggtcgtaaccacaatcaccaccatgaccggtggtattaccgccgcggtggttcaggatcgaacccaggggattctcgctcacatcatggccactgctcccctgcacctgcgctattgggtgtcaaaattcgtgcccctggctgggattgtgacggcaacaaacctgatcgtggccaccacggtattcgtcgccgatccacaccatgacctgcgactctatgcgttgacgctcgccagtatcagcactgccacagtcaccagcatcggagttggcatggtgtgtgcagccggcacgatcgtgttgcacgacccgtttcgactggccaatatcgtcaccgcggtggtgccgctatcggcgggcgtgctgctgccccacgccgcgtacccggcgggaatccgcgaggtgtgcaaggttctgcccggaacctggctggtggccgccctccgggagaacgctcctgccctcatgctcgtagaatgcggcgtctccgcgctgtggctggtgctgggcctggcgctcctcatagttgccggccagctacgctaccggagcggccgcacggacctgctttaggcgtcgacaagcggaaagctagcggtcatcgacgtttttgtgcaggtcaatgtggcggccaaacgtccaatcggggtcggtcagcatgcgcgccaccaccaagccggcgccgatagcaagaatgcttaagcttgccgacgccgcggtgcccacgccactatcaatgtcgccgctgttgaggtagtacacggtgcggtaaatcgcagtgccggggatcatcaccaccgacgccggcaccgtaatcgtgatgcggggaatgctgatgcgcttggtcaaaagcgcaccaagcaagcccaccaccagagccccgataaacgccgcaaactggggctgcaaccctgcctcggcgcacacgagacgcaccatgttagcgaccgtgccgatcgtggtggcggtaatcgccatgcggcgggaagaattgaacaaaatagcgaatccggcgataccaacaattgtcgccccggtggcctccaggtaccacaagagattcggcgtcgcaggatccggcggcaggggctgcaaccccgtaatcagcgacaccgcggtcgccgccatggttgcggtacagatcaccgtcgtggcgtagcacaatcgggacagaccggagaacaggtcgaaacggctcagatccaacagcgacgagaacagcggaaacccgggaataagaaacaggacagacgccacatatccggtggtgaacgtgggtgaatcaataatccccaccatggcgagccccttcgccataaacaaatacatgaggctggcgaccacggcggccatggcggttgtacccaattgattcaggtggcagcgggcacacgaatgccgaacgatctgccccaccgcggcggccagggccaccaccaccgcctccaggaacggatagtggttgagcaccgcaaacccgctacaggccaggcctgcggccagggcctgcacccacacaggccaccgctttccgactctttgttcgatctggtcaagctcctggtgcaactcctccgcggtgtagctgctccccatgtgatggcttaagttttccagtgcctcaatgcgggaggcatccacggctggattatcccggttgaccacaatggtgcggaaaagctcccccttatggaaggaacaggttatattattgaccgagatcacggcttcaacccggtcaaagcccagggcgcgtgcggcccgtttcatcgctcggataacgcgatagccgccggtgcctgcggccataatcatggcgccgagccgaagcacggcatccgcatcctcccccattcggtgttcggcttcgactaattgcaaaaggtgatgggtgtctgattcttcagccatgattcttattctggcactcattacccggcttgacgagacccaatagcgtgcaattggccactttttatcgagtgcgctaccacctggttgccgcatggctacccggctaatcgggcgagtgtcgcatcgtaagcccgaatccatcgcaccgccctatcgtattctcccgcctcgataagcgttagcaagtccgcgttgtcccgaaccagggtttgaatatgccgcaggaattcgggggtagcaaggccccgggcgaaccattccgggtcccgtcccgcctgatagcgtgcgggatcggcggcggccggcgttcttccgctcccccagggatccgccgcgagcggccctctgataacccagtcgcgtaaccagcgaagccgctcggcggggcataacatcgcggcaatggttacccggggttgcagcacgtcgaacatgtcgaccaactggtgccgagtgtatttcggggaccactggcccacaaacaccccatcattcattgtgaccaatcgttgcgcggtgcgtttcaagaagcacagctcggtggcggcgctccccactgtctgcctcatcgcccgccggcgcgccgacccctgcccagcagcgccctgtgcttgttcacacccctccccaagtccccgctcagcagcccgccgcccaagtcccaactcacgctcgaacccccgaatataaccacgcacataccaacctggttgcaagcaatacacgtcggtgacccgcagccgaccatggtcctgggcatcccagcctgcgccaacggtatcccccacatcgagggcatagtgccgcagcggggcggaaacgaagaaacaattcggtgctagtggcactgcgggaaaggtttcctccggcaaccggaaaacctcacccaaggcaccgccacccccatgagggtgagcgtccctaccaaggccaccagaccgacgtgacacactcatcccacccgtatcactgacaccacgcggctggggtacccggccctggcgccgcggctcatccagatactgcatcccgcccaagcgtcctgtctcgtccgggcgccaggccccagatggttggcacgccgcggcaccgaccgcccggtgttccccactgatcgtgatgcacaccgggggcgtcatgattgctcgccgcccaacaattgcccagcctccccgcacagcgcttcgaggagtcccacgtctcgcaggctgcgacgcaacaaggccgcatcctgggagttcagcacccaggcagcggtttcagaccaggtggcggctgccgccaggtcggggtatgcgtgccggtgggcgtcgataagtgtgaggaagagccgcaccggatcctgctgccgcaatactacgtggacgccatgggtgtcgtcggcgtcgtcgctggtggcggggagcagtcggttcgcccattcggtgaattccacatcggtgtcgcgcagcagcgtatcccggcgcgcccgacaggtcatgtgcacatagtggtggacgggtgcggggcaggcggtgaagaagtcccggaaagtgccggtgtcgaatgcggatggccagtagctggtgaagaagaggcggccgacgtggcaggagtaggcgcggcgttggaggaatgtgcgcagtttggcgcgttgttcagggtcggtgggggcgtcgccatagacgaggtttcctggttgaagccggataatggtggtgacgatgagatggtgggtgctggccacccccgcaccgcaaagcgttagcgtgtcggcccaggcggcaccgccaccagcattaccagcaatgacaacatccccgggtacaaggggaaacgcggtgtgatcggtgttggtgatggcgtaccggtcgtgtcggcgcgggacccgcctggcagtgagagtttcggaacagttaaccacggggtagaggattggtgggctggccgcgggcggaaacgtaagagtgagagtcggggtgggcatggggcctccttgaataaggcagtgtggttccaacagtgcgcatagtgttggactgcccgggccccgattttggccaggcgggctagctcatttttttgtagaaccagcccatgaccggcgagaggacgcgagtgggggcgaccgatgagacgacattcatggctttggagaggggcccgggtacgacgcggcggcggtttttggccatggcttcgagggtttctttcgcacaggactcgtaggtggtccataacacgtcggggacgaccttatccacaatggatttctcgttctcgggaatgatggcgtcgcggacggggccgggggcaaggagggtgcagctgacgccggtgtttttgagttcgtagtgaagggcttcggtgaacgcattgacgccggccttggtgagcacataggtggcattgttggggatggggatgttgccggcggcggagccaacgttgcagatggcaccggtttttcggcggatcatgccggggaggacggcgtgggtgagttcgaacaccgcggtggcgttgagggcgaattgggtggtttcgtagttccagtcttggttgatgaagggcccgaagctggcaataccggcggagttaatgatgatattgatgtttcggtcgcggatgtcgtcgataagcttgtggagctgatcagggtcggcgagatcgcaggggtagacctcggcgatgatggagtgtttgcgctctagctcgtcggcaagctgggcgagaatgtcggcgcggcgggcgacaaggatgaggttgtgaccgagtttggcgaggtcgcgggcaattgccatgccgatgccttggctggcgccggtgacgagtgcgcgggcgtctatggagggggccggtagtgtcatggttttcttgctcctctgtttgggtcgttttagcttactttacgacgacgtacactagtacctatggccgatatggataagcatgatcgaattgtgtggattgacctggaaatgacgggtttggatattcacgagcacaccattgtggaggtggccgcgttgataacggatgcggatttgaatgtgttgggtgagggggtggatgtggtcgtgcatgccagcgaggaagaattggggcggatgaatgagtttgtgacgaacatgcacgagtcgtcggggctattggcggagattcgggagtcgaaggtgactctcaaggaggccgaggatgcagtgttggagttgattgcgaagcattgtgactcggagcatccggcgccgttagcggggaattcgattgggacggatcgggggtttattcgggagtatatgcccaggt

SEQ ID NO: 3971 - DNA, 23327 bp, synthetic construct
  source 1..23327: mol_type = other DNA
  misc_feature 1..23327: note = Synthetic
tgattgatcgccatcgcctgccccaaatgttcggggctgaccagggttttcaacgccgccttctccgcgggcgaaaacaccgccgtcgccgaccccaccaggcaggcggccacggccaacaccagcggaatgggagcgtggaggatgaaatggttggccaccaccacgcaaatccccgcgcccccaaggatcgtggacgaaagcatgagcggtaatggtcgatgcttgtccgcccagattccggcggggatccccatgaccacggtggccagcgtcacgcacccgctcaccagggccgcataaaacggcgactgggtgagggccagcgtgtaggcgaaaaacgcgaaactggacacgctatttcccagcgtgctgacggtttgccccgtcatgagcaggcgataatttttatcggaaaaaagtatccggttgtcgctcattcgccttcggcccgccgctaccccgctgttctacggctattccaccgcggccagggcggcatcaatgtcggcaatgaggtcgtcaagatcctcaatgccaatggaaatccgcaccaaatcccggggcacctccagggtcgaacccgtcacggactggtgcgtcatggtggccggatgctccaccagcgactccaccccacccagcgactccgccaaacagataagccgcgtggccaaacaaaacgcccgggctgcagcctcatcgtggaaccgcaccgaaatcatcgccccaaagcggcgcatctgcctcaacgccacctcgtgacccgggtgggtttccagcccagggtacaaaaccgccttcaccttgggcgactgctgcaaatgccgggcgatggcctcggcgttatcgcagtgccgatccatgcgcacggccagcgtcttgatgccccgggcggtcaaatatgcgtcgaacaccgaggggatcgcgccggccccgccctggagaaacgccagctcctcgtcaagctttgcggaattcgtgaccactaccccaccgaccacgtcggaatgcccgcccaaatatttcgtggtggagtgcagcacgtggtcggcccccagtgccaacggattttgcagatacggcgacgcaaacgtattgtccacaaccaactgggggccatcgagcagctcggcaaccgccgcaatgtcggtgatcgccaacgccggattggagggggtctccaaccacacgagtttcgtgtcggacgtgatagcggcggcaatggcgtcggtcgaagtagtgtcgacaacggtgtaggtaatgccccactccgcgaacaccgaatcaatgagccgaaaggttccaccgtaagcatcgtggccgaaaatcaaatggtcacccgggcgcagcaacacgcgcagcagcacatcggtggcggccatgccggaggaaaacgcccgaccataagtggcaccctccagcgcggcaacggttttctccagggcggcaatggtggggttgccgcagcgggtgtattcgtagccgccccgaagctcgttcaaaccgttttgggcaaacgtggtggaggcgtagatgggggtattaatggccccatagagggaatcggggtcataacccgcgtggatgctggcggtggcaaacccctggggcttcggtgcactcatcggcgacgctccttgaacaatgtagcttacggaaaagttcacgattggtagacaatcctttccgagatactagaccaagcggtccactcgcgtcgattcccgacagaaccgggtgaataaaaccacccccaacccaccctatagggttaaaagattaatcccggtgctgtgataggctgacccgaagggggcgtcgacccgcacccatcgactattccgcgacacccgcaaatgccgcggaatggcggccggggcatccatgccgggaatcagccccaaggcggtgagcgtaaacaccaaccgcatggggatctcggtgtcatcgttgacggtaatcaccgcctgatccatgagcgactgcggcgggcccaacgggccggaaaactgccgggccagggcacgcccctggtcgctcagccgctgcaccacatcggcggggatttcgtcgagaagctcaaacccggtagtcggcggcagcgcacccatcccccaccccgcatccatggccacggccgtcatggtggtgtcggtggcgtcggccaaaaggtcgctgaccagcaccgaagccccattcctggagcaggagccggcgatgcgccgggacgcgataacggcgaagggggtggtgacgaacacgtcgaccgccgcgtcggagaccgtcgaaaagcgggccatggcccgatcctgcaacgcaaccgcgcgctgcaacaatgatatgagtccgcggccaccgcgttctatggtgagggtttcggtagccattattcgtcctcggcgcgggtgagcactttgatttccttcgcggtgatcgcgcgggggcgtgcggtcatgatgtcgatggcgacctgtaccacctcgactacacaacaaatctgcccctcaccatccttgatttcctgccgggtggtaaacgacgtgttgccgatctcaacaacctgggtttccaccgtgacataggggttgtgcggcaacaccggccgcaaataatcggcctcgattttgcggacaaacacactgggcatgtccatgccgcggcccacgaattcttccagcgcgaatgccatgcgggcttcctgcgccagttccacataggcggcattggtgatgtgcccgaacctatcgaaatccccccaccgaactggcacttgagcgatgtggatactactgtttgactgggtttctgccatgggtgttacatgctttcttcatcgttaagtaatcaagtgtacgcttcaatcaacataacgagtctagctgagttcttgttacggcaaaacaaaacccccgggtgcatccgggggcaatgttatttgtcacacacgcattatgtcggtttttgcctgcgcttatcgacgcactatcgagtgagttttcggtgcgtcacccgggagggtcgggccgcctcggcgcccagccgctcaaccttattcttctcgtagtcaccgaaattgccttcgaaccagaaccattggccttcggccacgttcccctcccacgccagaatgtgggtgcaggtgcggtcgaggaaccaccggtcgtgggagatcaccacggcgcagcccgggaagttctgcagagcgttttccagggaggacagggtttccacgtccaggtcgttggtgggctcgtccagcaggatcaggttgccgccctgcttgagggtgagcgccaggttcaggcggttccgctcaccacccgaaagaactttcgagggtttttgttggtcggcgcccttgaacccgaaagcggacaggtaggcgcgggacggcatttcgttctggcccaccacaatgtggtccaggccgtcggacacgacttcccacacagttttttccgggtcgatgttttcccggccctggtccacgtaggacagccgcacggtttggcccacattcacttcgccggtgtcgggttcttccaggccaacaatggtcttgaacagggtggttttgcccacaccgttggggccgatcaccccgacaatgccgttgcggggcagggtgaacgacaggtccttaatcaggatacggccgtcgaaccccttgttgaggtcgtggacttccaccacctgggcacccaggcgcggcggggtggggatttggatttcttcgaagtccagcttgcggtatttctccgcctcagcggccatttcctcgtagcgggccaggcgggccttggacttggcctggcgggccttcgccccagaccgcacccactccagctcctgcttcaggcgtttttgcagcttgcggtctttctggccggcaacctccaggcgttcggctttcttctccaggtaggtggagtagttgccctcgtaggggtacagtttgccgcggtcgacttcgcaaatccagccggccacgtggtcaaggaagtaccggtcgtgggtgacggccaggacggcacccgggtatttagccaggtgttgctccaaccattggacggattcggcatccaggtggttagtgggctcgtcgagcaacagtagatccggttcggccaggaggagtttcgccagggccacgcggcggcgctccccgccggacaggtgggtgacgggctcatccgacggcgggcatcgcagggcctccatggcctgctcgattttggagtcgatttcccaggcgtcggccgcgtcgagtttttcttgcagcttgcccatttcctccatgagctcgtcggtgtagttggtggccatttcctcggcgatcgcgttatagcgtttgagggtttcaaaaatgtcgcccaggccctcttccacattttcccgcacggttttttcctcgttcaacgggggttcctgaagcaggatgccgacggtcgcgccggggtcgaggaaggcttcgccgttggagggttggtccaagcctgccatgattttgaggatggatgatttgcccgcgccgttggggccgaccacaccgatcttggcccctgggtaaaacgccatggtgacattgtcgaggatgactttgtcgccgatggctttgcgcacatttttcatcgtgtagatgaattcgcccacgtttggtttccccttaaagtgagtaagttaatagttggcttctaagggtacatgaccgtgctgcttgggtgcgagacgccgctagccaccagtgcttccgacgccggttctcttgctggttccacgggtgggtcgtccggcatgggttccgaatagggcgcttccggggtgggcggcatcggcgacgcggcctccagtgccggaggtttgccgtcgtgaagcgacatggcggaaacctcaacggcgtagcgggtaatatttttcggctcgcaattgaacctgctcaggtccgcgcccccggtatgctttgcgacgggcagtgggttgcggcaataccgcaccacataggcgcataactcaaaacccacatagagcgcccgcaacaccaccttggtgcgcagcttgccttccgggtcgcgccattcttgcgtggtcaaataccccacgcaaatcaccgggtttcctttcgacaatgattcgtgcacgttgaccgcgaggtcgccccaggtttccacatcaatatagagctggtcgcgttcctcgtaatgcgcgctgttgtcggcgaatcggcgcacccgccgggaggtgcccagccgaaacctggcgaatttccggccggtgtcgaactcgcggtagaacggttcggcggtgaggtggccgatgagggtgacggtttgttgttgcatgggcggactccttgaatcgggtcatcacgtggggttttgctgctgttacctcccactgtgcccgccggctgcccggttgtcgaggattttccgtaactcgtctcgcctgtggataactatcctgcggctgccgagttatccacattattattgtgcagtcgactgcaacttctcagcctactgtgggcttttcgacgccctacccaccccattcgggccgaaacccacaatcaggacccgttcttattcatccgcgccagcatttggttgtacgcttccaaatcctcgtcttcggtgtcgtcggcacgctggtcataggccttggcctcgttccggtcttccctcaaccattgcaggaacagggcgccgaacaccaccaccagcgggaacgagccggaagcccaggcaatgccgccgcccacgtcctggtcgtgcagcaggtcgatgtcccacggcaggcctagggtgcgatagaagtcctccgccagaatctgcgacagttgcatgagatacacgccgaaatacaggtgcaccggcatggagaacaccagccaggcgaggcggcgcaacaccgtgttttcccgcggcttcggatcggagccgatcatgtcccagtagtaaatgtatcccgacagcaaaaacacccagttcataatgaggtggccggcgtgctctttcaccatgaggtcgtaccagggagtgatgtaaagcaggtagaagaaggtgaggaattggatggtattcactgctgggtggaacaggaatttgagcgtggtggattggatgaaggcctgcacccactcatgcaaaccgggctcctccgggttaggggtggtgatggtgaggatcatttgcagaggggcacccaacaccaggaacacgggaatcaccatggacagcatcatgtgggccaccatgtgcatagaaaacatggccggcatgtacaggccaatcccggagctcatggccagcgccagggtgacgctgccaagcagccaccaaaaggtgcgctgccacggccaggctttccccaattgtttcagacgatacagcccatacaggtaaccaatggtgaggaagactcccagggtggtgaacatgatatcgaaccgccaaatggtccacacggaccacacggtcggctcaaacgtgaggtcataccccatggtgagggccatgggcgacaggtccaccacccgcggcggtggtggcggggtgcgacccagggagaccgcaacaccaatggtggccgccatgacgagcacctccacgacggcaatgcggataaaggggctactgtttcccgatgtcaggcgcggaatggtagcggtgcggtgccaccacccgaaaattgccaatgcgaacgtgagtaccgtcttggccacaatcacccgaccgtaatcggaagtgaacaagtcttcgaatcgcacccggatggcggcgttgatgaccccggagatggccatggctaccatggcaaccgcagcgatcgtggagtagcggcgcaccgccaattgcaggctcgggcctaaccgccggccatgggcgatgagcgccatcaggccgcccacccacagcatcatgaacagcacatgccacagcagcgagttcgtcccatagtcgtggtcgccgccggccgctgagtgcccagacagtccttggggggcgacgatcaagatggcacccaccagccacacgggctgccacatccaagtgcgcggcgcgatgagcgcggccccgcccaccacgagggcgataatggccgaaatgagccacgcttgggcgtccgccacctggttgagcgccacaagccagttggccggctggatggcctcggtaatcggctggcctgacacgtcggaaagcaccagcggcaccatgatgatcccaatgaacgcaaagacgagcgccgccaccgcgcccgtacgcgacgcaatgagaccgtcaacggtcaggtacgcccgccgaatgtccccttgacggggggagaatagaaaacttgcgaataggaaagatccgaccgataacgcggcaagcaaccacgcccccgcccgcagaagtggcaaacctgctgtggttatggggccggggtcgggaatgcccaggacagcgagcgattccgtcaagaaaccccaggaaattatcgcccccgcaacaccggcgacgagaaaaaagaggaggtataacggccaggttatccgcgctccccgactgctcttcgtttcgaccatgcgtttaagcctaacccccggtggggtaaatccggtcattgccccatcaacaaaatttcaacggcgggtcaaaattgcgctaatctgtttctcgttacgcctccatagctcagtggatagagctaccggtttctacccggttggtcgcgggttcgaatcctgctgggggcacgtttgaaaccccactgccaggcattttgccaaatcggtggggttttacgtgtgtgagacatcgtgggtaatatgcaggcgccaaattcgcaggaattcgaatttttgttcgtgacggttttggtggttccgaggcccgcagaagcgaactgtttttcgacaaccaaccgggcccgccactcgtcgggtccaggttgccagtcccccaccgccgcggcggctattttcgtttctgaagttccgtcaacatcttctcgatccgatccaaccgctccggcagggtggccaccgtgcgggcaatttcggggatcagccgaatcttgtcggcaacgaagtcgacaaaggttttgccttccgtggccttccacccggtgaaccgtggccccttggtgtcccactcggggccgacaagttgatctaaaatccagcgaatcatggtccgttcttctccttgctccggggttcccggggtgggtgttggggtggggttataaggttggcgagtgttgcggagttcctgggcgtagccgagcaccacgtcgtaggggaatccggggccggggtcggtgtggttgacttcgcgccaggcctcggagatttcggcatgcccgtgcacgccgcgggcaccggcacgcagccggtcggcgtcgataaattccaggggaatatcgtacagttgcgaccagctggcaatctgttcggcggtccgccgcagctttgcgtcgtcgtcaagccaatcctcacggctcattcgcgcgtaaccggtgaggctgatgtggagacaacgggcattaccggtggggccggcggcatacggcataaaatcatctgtattgcacaaaattaaaatgccgtcggcgccggcgagcacgttatagcttgacccgttggcggggtttgtctgccactgggccacagcaatcccgtcccgttccggcggacattccacggtatggacgcaaatcgactggatactgtcgatcgaccggtaacccacgcccggcatgtccgcggtgaagtcggcatcgtagcgcaccacgatcggcccggacgactcgggctgcgactgcggctgtggcgcaacttcggacacgggtttttggccccagtagtggtgccagacgtcattaacatcgcattcgataccgccgacggtgacctgaccagcccgctgaaacaggactgcttcatcagacaattcgccccatgaccaggcgattgtctgccacgccaggtgttttccgccgcccaagttggcgatcacgccgtcctcgaccgcccagctaatgacgcgggaatggccatagatcccgactctttcgcgccccaggatttcgcaacaggcccgaaaatattcgaccgccgttacgttccactgttcgagcgtgatggcaaagtccacggcgaaaaacaccgggtggttaccgcagccgagctcgtcaagtttttgtttggcggcgcgagcatcggcaagcccaccgtcgcggccgcgcataacgtcggaatcggcctcttttccgtattgccagacgaaagccacgtcgaggccatgaacatgaaaatcatcaatttcggcacgttggatgggttttccgcgcatccaatccgcacgcggcggactaatatatctcaccgcgccgtcgtatccggcgtcacggacggcggcagcctggggaaccccggcgctgtaatctagtacggttgccatcgcatttcctccaattatgcaaaaccccagcatatttgctattttggggtggtagttgggccccataatactgattggtacacccgaattgtgggctctggacaagcatctcccgcgacaccttggtgttgagtagcacccaatcgcggtaataatgccgaattgtcacaccaaattgtggttagcaagataaccatgtagcagctttacgacgctctaaagtgcggaaaaataagatgaataatttataaataaccaaatatatagcaaaaatagtacgaataaattgctcaacaaatctgggacaattttcccaaccaaatagtggaaatgtcaacattaactggggttttgcccgaagaatatttcccaccaccgtgaagccttgtcactctcgccattttgtatagttatttgcacagtaatttaccccctcgattaccccctatttgccattttctaaataagccttgcgaatcaagatttttccttttatcattgcttgcagagttgaacctcagtaagtgtcggctagtttccggcgcagaatgctccagccgacggacttacctccgtcggctttcttttttacgaaaggattcgccttgacctcggcaaccgtaaactaccgggtgggaatcgacgttgggtcttattccattggcatggcggccatcgccattgatgatgatggaaaacccacggaaatcctcagcgctatctccctcatccacgactcaggcgtcgacccggatagcaccaaatccgcaaccactcgactagcgacctcgggcatagcccggcgaacccggcggctttatcggcggaagcgcaagcgtcttgccaagctcgacaagtttattagctcccagggttggccactcaaggagtttgaggagtacgaggacccgttttacccgtggcgggtgcgggccgagttggccaccactgccatcgcagaccagcaagaactgggcgaaaagctgtccattgccctgcgccatatcgcccgccaccgggggtggcgcaacccctacagcaaggtcactgccctgtatgccgtggcagaaccatcagatgccttggtgagcattcaggaacagtgcgcagcggaattggggcgccctatcccgccaaccaccacagtgggccaactggtggccagcatgaatctgggcaagacaaggcttcgtggtgaagatagtctattagcggccagaccgcgacaaagtgacaatgccaacgagattcacgccattgccaaggttcaaggcctttccaacgagctagtaaaacagatcattgaccacgtatttgcagccgagtccccgaagggttcagccgcagagcgggtgggcaaggatcccctgcaacccacgaagaagcgtgcgctgaaggcatcggatgccttccagcggtatcgtatcgcagcgctcatcgggaacctgcggatccgcggcggtaaggagaatcggcgcctcaccaccgaggaaaccaggctggtttttgattacctgcggagcctgcctgctaagcaggagcccacgtggcagctggttgcggaacagctcaagattgaccgcggcaacctggtgggtaccgcgatcatgactgatgatggtgagcgcgccggggcaaggccaccggttcatgagaccaaccggttgatggaaagcacgaagatcaagccgcttgccacatggtggaaatctgccgacgccgatgcccgagcagccatggtgaaggcgttgtcgaatgccgaggtggatgattttgattcccaagccggcgcccaggtacaggagttctttttcggcatttccgacgaggaacaggagaaacttgacggactccatctccccattggtcgggccgcctatagcgaggacactcttgatcgcctcaccaagcgcatgattggcgagggcatggatttatatgaagcacgacaggcggagtttaagattccgaatgattgggcaccgccagcaccggaaatcggcgaacgggtgggaaatccagcggttgaccgggtgctgaaggcaacggcccggtggttaaacgcggcggaacgccagtggggtgccccaaagtctgtcaacattgagcatgtacgggctgctttcatgagcgaatcaagtgcgcgggaacttgaccgggataatcaacagcgtgcaaagcggaatgtaaaagtagtggccgagatgcaggaaaaattaggcatcgagggccgaccaagccgtgcagatgtctggcggtttcaatcagtcgaacgacaaaattgtcaatgcgcatactgcggaacacagattagctatatgaattccgaaatggaccacatcgtcccacaagcgggtgaaggttccaccaataccagggataatctcgtcgcagtgtgccgtgagtgcaacagttcaaagtctaatatcgcatttgcggtgtgggcagaaaatacctctcgaccaggcgtttccgtcaaagaagcggtcgaacgaactcgccactgggttacggattctggcctgcgtaaacctgaatttgataagttccgtaagcaagtgtgcgatcggctacggcgtaaggctaccgacgagccgattgatgcccgctccctggaatccgtggcgtggatggcgaatgagctccgctcccggattgcgcaaaagttcaaggatggtgacacaaaggtccgggtgtataagggtgctttgacggctgaggcacgaagggcctcgggtatttccggcaaattggaattcgtcgatggtaagggtaagtcgcggttggatcgccggcatcacgcggtagatgccgcagttgttgcgttcatgtcacattatgttgccgagacattagcactacggtcgaatatgaaattcgaccaggagctgcgtcgcaaagcaccacaatggcgggaatttactggctcggatcatgtgcatcaggttgagtggaccaagtggaagtaccgcatgcaagccctggcagagttgttaaattgcgcgctgacgcaagatcgtattgttgtcatgcataacctgcgtctgcggcttggcaatggtgcggcacatgaagacacgattggtaagttgacccggctcaaggtgggtgacgcaatctctacgacagatattgatcgggcatctagcgaagccctatggtgcgcgttgacccgtgaccctgatttcgatcccaagactggtttgccggaaaacccgaatcgaatgattcggattcatggaacgcatcttgctgcttcagatgagatcacggtgttcccagtggtcgctgcatccattcccatccgggatgggtttgccaagctggggagcaactatcatcatgtgcgattgttccgagttcccagcggaaaaaaatacaaatattgcctcatgcaggtatacacggttgacctgctaaaattccgcaaagaagacctatttacagtggaactcaagccacaaactatcagtgttcgaacatgcgaagcgccactacgcaaagcactagcaaatggtactgcggaatatctgggatggctggtcagcgatgatgaactattcgttaacatttcatcatttgacacccctggaattgtgaaactacaagaagcatatggcctagttaatcgatggcgacttgccggttttaactcaaacacacaaatggtacttcgtcctctttacctcagcaaagaaggattgaaacctgacgtcgatcctgaaatcaaaaagattattgataaccgtggttggtttgtaaccgtaaataagttgtttagtactggccacgtcacagttgtccgtcgagatgcgcttggtcagcctcgactttatagcgcagctcatctaccaatatgttgggaagtgaaatgaagaaatgagtgacagtggttggcaggtcctcgatttcagtgattttaaaggatcgctaacgtataagcggggaaatgtccatgtcaataaatatgaggatggttccgaagtagatgtgcctctccaagtatatcagggagtgtaagagttgaaccccagcatgattttttccttgagtttttggcacctgcgtatggtaatacagaggccgcattgactcgtgtgaactggtcggatcaatggtataaccatgagcaggtgttattgcgtattcatgagttatggcagcgctatgagttactgcggcgcacagagcctagtacgtatgtagagacgtttttgcgaacgtatgctgattatcatatggatcgtttgatgcgacctgggggcatcttagatgaaacaagtgatacgtttgcggatgctcttccgctgccgaatttagaatcagaaactgattcatcagataaggatgcttggtaggaggtaggaagaatattgagccctaagaatcacacgacgatagatgcccggcatgcactgcggctaacgcaggttattaagaagtttgttactcataacacgacggttattcagcctcggcagtttccaccgcgggttgttccgccggggccgaggttattatctcggtattcgttaggacggttggcagtagaaactgctcgtgcagcattagatgctagtcgtagccagcaacagtttatccaggatgaatacctacgacggggaatggtggaatctgcttatgttatggctcatctgcatgacatcgaccagtttacccccagtatcactccatctgatttgggacataacacggtctttaatcatgtgatgaacactaacccggataatctgcaaccaggacattttcatcaattagaggcatctttaaataatgagtaccctgaccaaggtcgttatctcactaaaaatacaatgctctcgccgtatgaaaaagccgaagatttgatggctgtgggggctcctgatgacatgattaatgcttatattaattctgtcggacttagtccagaatcgccatctcttgctcatcaacagcaatatgacaacatggtccagcaaccccaaccccagttggatgtgcatacgtccttgcaggttcaacaccctgatttacaagctgaggttgctgagattcaactctaaaattcccagctagccgaagggagaaatgattgtggagacagaaattagcgtacatcttgatgcccaattgcaaacagcagtagcagagcatgcccagaaaatgggcattaacgtcaatgaattagccaagcaggctatagaggaatttatcgcagcacaaaacatttcggagtttaactcacatttgggtatgcctgatcgaattgatatttcgacccgtaaactcttagaaatggtgacaaacgtgcagctagcattggtacggttgcacccagagcttgcggacgtttttcataccgaggaccttcttaccgagcaaatgctgatcttccgtgaaggatttgctgctgagtatcctgttgcgcttgcccctacccgaccagattttgcgccgcaggatgcaatgactgtcaccaatacattaatgatgtttcggcatttctaccgcagcatagccgctgtagagaaatctggaaacaccgtacctgataaagtgaaagacctgttaacgtttcgtggccatcaccttgctgcggagccacagatgatgtcttatgctatgtggttgattatgaagtatgggtgggatgagttattacctgctgatgatggcacattcgaaccattattacatcgtatggctccagcctataatacgttattggaacaatgccggcagatactggggttcgaaactctgccttctgatgctgggagtcggcttttcactcttgaagaactgatagcgctggctggggttcaactctaaaccctgaggttattgaagatagcccatcctctgaagtgttggaccgtaaaaacggatttacggtccaacacttcagggagatataaaatcaatgcatataaagataatattcatagtattaagtaaaataatgtaaaaatgtaaacccggtttaccgttaaataccttgtgtaatagctaggaatatgccatacttgaagaggtaaagttagttttattcctcttgataagtaatgaggtagatcattatgtacacccgtgaaaatgcgccgctaacaccagaacagcgaaaacacctagataacgtcttggccaattcccgtattgagggatatgagattaccgaccagatgattgatgatgccattaggataatcctaggggaaaaaacctcagatgaaatccgggatgagatcctccagcgctatggggtaaccccagaaaccacacctgacacatgagtgagtatgacgactggaagcaagaaaacgcaagtatatcagggagtgtaagagttgaaccccagcttcggattggcgtactgatagtgtatatcaaatatatcagggattatcaaagcgaaccccagcaaccccagtgatcctagcaatcatccaaagccaggacccagtatatcagggtttaaaaaacaaaaaaccctgcaaataatcaaacctcaaccggaacatccaatctcaacttggacaagcaaacatatcaataagaaaacacctttgtgctctcccctatactaaaatcccatacatccaatcattcacagaaaactggagcatgccacatgtcaatcattgttcgccaactcgcccaccgcgtaggcaccgtcactgggtagcggaatagctgatccctgcagcaaaccgcagctcacaacgcaaggttagttggcctgcagccgaacccatgacgcacccctgagtgggcatatcacgccgcgccccattgatttccatcatttctggcgccggcgattttcccatgctttcccaaacctcatggagttcactgtgaaccaacccaccccggtgctttcggcacgccaactcatgcggcgcttccgaaacaccaccaccgtcaacaacgtatccttcgacattcaccccggccagattgtggcattggtcggcccgaacggcgccggcaaaaccacgaccgtgaaaatgtgttcgaccctcctggcgcccacatctggcacaatcacggtatgcggcattgacgccacccgaaggcgtcgacaagcgaggcaacacatcggcatcatcctgggtggcgaaaccggcttctaccagcacgcttctgtcaaagataacctgctgttcttcgccgacgtcgcgggtgttccaccacgcagccgccgatcccgagtcgaggaaaccctcgcgcaggtccgcctcaccgaccgcatgttcgacccggttggggagctgtcgcgcggcatgaagcaacgactccacatcgcgcgtggcctgctgtctcgcccccaagtgctgcttttcgacgagcccaccaacggcctggacccggagatttccgtcgaaattcgggccctcatccgggaattagccaccgacggcgcagacgtgctgctcacatcgcacctgctcacagaggtggcggagctatccgacacgatccatgtgctcattgatgggcgcatcgtcgtcaccggcggggtcgccgacatcgccgaacgtgccggaatcaccgcggtgacctcgttcaccaccccgctgggcgcggagccgcggctgcgggagttcctcgccactctcacccaccatgattcgattgcgcacgttacatgcgtgcgaatggccgcccaccacgctggcctcatcagttggtgcggcgcccccacggatgtttccgcgctggctgacgccgtgggcctgacggtaactgacgtcatgaccaggaagcccaaccttgaggaaagctacctggcgctggtggggcaatcatgatttccgttatgcgaatggtgtggtttcacctgcggcagtttgcccgggtcggatatttcgtggggttgctggtgtcgtcaaccacctcaatgtttttgctgcagctgctggcgatgcgcgctgccaccaggccgattctaagcccggatccgcagctgtgggtgcgggcagcactggcgggcatgtggtcggtgtgcacggtgtcggcggggatgattggttttcagcggatgcagggcaccctagtgcatgtgctgttttcgccccggtcacccattgccacactcgggccgatagtggcggcaggatcttgctttgggattctggcgtttccgctggcagcgggcctggccgtcgtgtttcaccagccggtcggcacaatcaatgggtttggcttgccgctctactggctggcttgcctgtcggtcagcgtggtggtggcggccacgttcgtgttcacgcgcaacgccatcgcgtacgagcccttgctgctggttcccatgattgtgctgtcgggggttttcggctccccactcccccagcttgccacggtgggatgggtgattcccaccagccacgcgatcacggtgctgaccacaccagacattgacccgggccgcatcatcgccaccctagcggtgtcgacagcatggttggcaggtggcggatggctcgcccggatagcacttcggcgcgcaacggtggccggcaccctggaggtagcgtgatgtccgattgcaagcaatggtatgtggcgttacggatcgtccgccaatccatgccggcactggcgaatccacgtaccgcggtggtcacgctggtgacagcacccttgctggaggtcgtattactgctggttatcgcgctccggctgcgggtcccagaaaccatcattgtgacggatgccggcctggtcgtaaccacaatcaccactatgaccggtggtattaccgccgcggtggttcgggatcgagcccaggggattctcgctcacatcatggccaccgctcccctgcacctgcgctattgggtgtcgaaattcgtgcccctggctgggattgtgacggcaacaaacctgatcgtggccaccatggtgctcgtcgcggatccacaccatgacctgcaactctatgcgttgacgctcgccggtatcagcactgccgcagtcaccagcgtgggggttggtatggtgtgtgcggccggcacgatcgtgttgcacgacccgtttcggctggccaatatcgtcaccgcggtggtgccgctatcagcaggcgtactgctgccccacaccgcgtacccggcgggaatccgcgaggtgtgcgaggttctgcccggaacctggctggtggccgccctccgggagaacgcacctgccctcatgctcgtagaatgcggcgtctccgcgctgtggctggtgctgggcctggcgctcctcatggtcgccggccagctacgctaccggagcggccgcacggacctgctttaggcgtcgacaagcagaaagctagcggtcgtcgacgtttttgtgcagatcaatgtggcggccaaacgtccagtcggggtcggtcagcatgcgcgccatcaccaggccagcgccgatagcgataatgcttaagcttgccgacgccgcggtgcccacaccactgtcaatgtcgccgctgttgaggtagtacacggtgcggtaaatcgcagtgccggggatcatcaccaccgacgccggcaccgtaatcgtgatgcggggaatgctgatgcgcttggtcaaaagcgcaccaagcaggcccaccaccagagccccgataaacgccgcaaactggggctgtaacccggcctcggcgcacacgagacgcaccatgttagcgaccgtgccgatcgtggtagcggtaatcgccatgcggcgggaagaattgaacaaaatagcgaacccggcgataccaacaatcgtcgccccggtggcctccaggtaccacaagagattcggcgttgccggatccggcggcaggggctgcaaccccgtaatcagcgacaccgcggtcgccgccatggttgcggtgcagatcaccgtcgtggcgtagcacaatcgggacaggccggagaacaggtcgaaccggctcagatccaacagcgacgagaacagcggaaacccgggaataaggaacaggacggacgccacatatccggtggtgaacgtgggtgaatcaataatccccaccatggcgagccccttcgccataaacaaatacatgaggctggcgaccacggcagccatggcggttgtacccaattgattcaggtggcggcgggcgcacgaatgccgaacaatctgccccaccgcggcggccagggccaccaccaccgcctccaggaacggatagtggttgagcaccgcaaacccgctacaggccaggcctgcggccagggcctgcacccacacaggccaccgctttccgactctttgttcgatctggtcaagctcccggtgtagctcctccgcggtatagctgctccccatgtgatggctcaagttttccagcgcctcaatgcgggaggcatccacagctggattatcccggttgaccacaatggtgcggaaaagctcccccttatggaaggaacaggttatattattgaccgagatcacggcttcaacccgatcaaagcccagggcgcgtgcggcccgtttcatcgctcggataacgcgatagccgccggtgcctgcggccataatcatggcaccgagccgaagcacggcgtccgcatcctcccccatttggtgctcggcttcgactaattgcaaaaggtgatgagtgtctgattcttcagccatgattcccattctggcactcattctctgccttgacgagacccaatagcgtgcaattggccactttttatcgggtgcgctaccacctagttgccgcatggctacccggctaatcgggcgagtgtcgcatcgtaagcccggatccatcgcaccgccctatcgtattctcccgcctcgataagcgttagcaagtccgcattgtcccgaaccagggtttgaatatgccgcaggaattcgagagtagcaaggccccgggcaaaccattccggatcccgtcccgcctgataacgtgcaggatcggcggcgaccggcgcccttccgctcccccaggaatccgccgcgagcggccttccggcaacccagtcccgtaaccagcgaagccgcccggcggggcataacatcgcggcaatggttacccggggttgcagcacatcgaacatgtcgatcaactggtgccggccgtatttcggggaccactggcccacaaacaccccatcattcattgtgaccaatcgttgcgcagtacgtttcaagaagcacagctcggtggcggcgcttcccactgtctgcctcatcgcccgacggcgcgccgacccctgcccagcagctccctgtgcctgttcacacccctgcccaagttcccactcagtagcccattccccacgctcctgctcacgctcgaacccccgaatataaccccgcacataccaacctggttgcaagcaatacacgtcggtaacccgcagccgaccctggtcctgggcatcccagccggcgccaacggtgtcccccacatcgagggcatagtgccgcagcggggcggaaacgaagaagcaattcggtgctagtggcactgcgggaaagttttcctccggcaatcggagggactcatccaaggcaccgccacccccatgagggtgaacgtctctaccaaggccaccagaccgacgtgacacactcatctcacccgtatcactggcaccacgtgactggcgcgcccgaccttggcatcctgtctcgtccgggcgccgcaccccagatggctggcgcaccgcgataccgaccacccgatgctccccgctgatcgtgatgcgcaccgggggtgtcatgattgctcgccgcccaacaattgcccagcctccccgcacagcgcttcgagaagccctacgtctcgcaggctgcgacgcaacaaggccgcatccggggagttcagcacccaggcagcggtctcggaccaggtggcgggcgccgccaggtcggggtatgcatgccggtgggcgtcgacaagcgtgagaaagagccgcaccggatcatgctgccgcaatactacgtggacgccatgggtgccatcggcgtcatcgcaggtggcggggagcagtcggttcgcccattcggcgaattccacatcagtgtcgcgcagcagcgcatcccggcgcgcccgacaggtcatgtgcacgtagtggtggatgggtacggggcaggcgatgaagaagtcccggaaagtgccggtgtcgaatgcgggtggccagtagctggtgaagaagaggcggccgacatgacaggagtaggcgcggcgttggaggaatgcacacagtttggcgcgttgttcgggatcggtgggagcgtcgccatagacgaggtttcctggttggagccggataatggtggtgacgatgaggcgatgggtgctggccacccccgcaccgcaaagcgttagcgtgtcggcccgggcggcaccgccaccagcattaccagcaatgacaacatcgccaggcacgaggggaaacgtggtgtggtcggtattggtgatggtgtaccgatcatgtcggcgcgggacccgcctggcagtgagagtttcggaacagttaactacggggtagaggattggtgggctggccgcgggcggaagcgtgagggtgatggtcggggtaggcatggggcctccttgaataaggcagtgtggttccaacagcgcgcatagtgttggactgcccaggccccgattttggccaggcgggctagctcatttttttgtagaaccagcccatgaccggcgagaggacgcgggtgggggcgacagatgagacaacattcatggctttggagaggggtcctgggacgacgcggcggcggtttttggccatggcttcgagggtttctttcgcacaggactcgtaggtggtccataacacgtcggggacgaccttatccacgatggatttctcgttctcgggaatgatggcgtcgcggacggggccgggggcgagaagggtgcagctgacgccggtgtttttgagttcgtagtggagggcttcggtgaacgcattgacgccggccttggtgagcacataggtggcgttattggggatggggatgttgccggcggcggagccaacattgcagatggcgccggtttttcggcggatcatgccggggaggacggcgtgggtgagttcgaacactgcggtggcgttgagggcgaattgggtggtttcgtagttccagtcttggttgatgaaggggccgaagctggcaataccggcggagttaatgatgatattgatgtttcggtcgcggatgtcgtcgataagcttgtggagctggtcggtgtcggcgaggtcgcaggggtagacctcggcgatgatggagtgtttgcgctctagctcgtcggcaagctgggcgagaatgtcggcgcggcgggcgacaaggatgaggttgtgaccgagtttggcgaggtcgcgggcaattgccatgccgatgccttggctggcgccggtgacgagtgcgcgggcgtctatggagggggccggtagtgtcatggttttcttgctcctctgtttgggtcgttttagcttactttacgacgacgtacactagtacctatggccgatatggataagcatgatcgaattgtgtggattgacctggaaatgacgggtttggatattcacgagcacaccattgtggaggtggccgcgttgataacggatgcggatttgaatgtgttgggtgagggggtggatgtggtcgtgcatgccagcgagaaagaattggggcgaatgaatgagtttgtgacgaacatgcatgaatcgtcagggctattggcagagattcgggagtcgaaggtgactctcaaggaggccgaggatgcagtgttggagttgattgcgaagcattgtgacttagagcatccggcaccgttggcggggaattcgattgggacggatcggggtttta

SEQ ID NO: 3972 - DNA, 23321 bp, synthetic construct
  source 1..23321: mol_type = other DNA
  misc_feature 1..23321: note = Synthetic
ccaagcagccagtcgcaaaggaacaaacaccacagcagtgcaagctattgcttcaatagcaggctgtaggcctcaaccggatgagcgcaaatacaagcctcaaccggatgagcgcaaatacttgcaagacagctgctcgtggccaccgtcgcaggagacagcggccacccatcatccttgatcacaacaccatgtcgcggctgttgacgacctgattaacgcggtgggaacagagccgggggatgagtaagaaactccggaagacgagccataaccgtcggacctgccgccgcaacaatagcgataaacaccgcaatcactgttaacaccgcatcagagtcgagatcggaagaatccccgcggaataagtgcaccgcctccaggggggcgaaaataccagtgtcgccagggccggaggtgccagcaatccgactagtgtccggcacatacaaatccggcacaacctgattaaacgaaccagcctcagcggtgataccagcggcgtcgaacgctgttgcgcattcagcagcagcacgcgcataggcggcgttgactgtgcggaaatcagttgcctgtaacgatcgcgcacgccccacaagatcagctgcgccagccccaatgagctgctgcagccggggggacgcatgagcagttaacgtttcaagcccattgatgtaggcgcctaaacgggcatcaactcgttgcccatcaatcgccgcctggaatccggtcggattcgcagcgattgcaagggccgcggcaggatcgatcgctacccgtggatcaaatgccctattgttggcgatggcttgcgggaacgctagccgccattcgccgaacttgtagccctgctcatgcattgccgaatcaatctcgacgtagagcttgcccaaggcttcttgtgcactacgatcaaccccgccgcttgcggcaagctgctcattgagttgatctgcgcgcagaaacttgtcagcaatcgctgggttatcagtgcggatacgctgcctcaggtcggtgaagaactcaccagtcgccccggataaggcacccaaatcggtgtaggcctgttcaccttccacctggcaggtgttgccgatgaccgtggcggttgcggcatgtgccggggaaactgtggtacaggggatcgccgcggcgacggcgactgcaagaacacgagagacgaaacgggatgtcatagcacctaatccaatcattgaattggaaaaatgcaatctgccacgaccactattgagcaatctgccagattgccagctgccactatcggcggcagtgaagctgcccaccaggttgtatggcaacccctgccgcacctgtcgtagctgcacaccgcatgagatgcagcgcatcggtgctgtagcggccaagcggtaacacacagtcaacaagagtgaatggaaaccccacaccaggggaggggagctgcaaaaactttgcagacatctgcacaattgtttccagaaggactacactgccaaaccatgcgtgctgaactgtcagactatacccatctcaccgccggtaaagtccgggaaatctacgagatagacgacgatacgttactgatggtggcgtctgaccggatctcggcctacgatcacgtgctcgacactgagattcccgacaaaggacgcattctcactgcgatgagctgctactactttgatcagctcgactttccaaaccatctcgcaggcgcggcggatgatccccgtatcccggaggaagtattagggcgtgccctgctcacccatcggctgtcgatgattccgtttgagtgtgtagcccgcggctatctcaccggcagtgctctggccgaatatcgcgaaacaggcaaagtgtgtggcattacgcttcccgcaggattaaccgaatcttcccggctaccggaacccatcttcactccggctacgaaagccgatatcggtgaccatgatgaaaacgtcacctttgagcaggttgtcgaagtactcggccaggatcgggcggaagaactccgggatgcaaccttgtcgctgtacacagctgccgcagagatggcgcttgcccacgggctgattttggctgacaccaaattcgaattcggcctggataaagccggccatatgctacttgccgatgaggtactcacccctgactcgtcccgctactggccactgcgggactataaggaaggccaaattcagccatccttcgacaagcaatatgtgcgtgactggttgacctccccaaagtccgggtgggataaacgctccaacactcaaccccctgagctgcccggctcggtggtggaagctacccggcaacgctatatcgaagcctacgagcaggtttcggggcgcaagtttagcgactggatcggctgctgcgtgtagcttcccggcctgttgtcgggcgagcatgccgcatgctggtggtgccgacgcagaggtgtgaaattgctaccaaagtagcgcattgtttcttgccggtgcgtagggtttttcactatgagtgaacttgccgacaacatcttcgacaccactgtcaccaccatcgacggggacgtattcacagtcgggaattatgaaggccatgtgctgctgctggttattgtcgacccggacagtgaccggctagcgcagcttgccgaacttcaggaagtattcgacgagttttatatgcgtggctttttctgtgttgcagtagtcaccgaagatttcgcgaccagcccgcattcagcggaagatatcgccaacacgttacgtgacgactatggggtgaccttcccaatcgttggaccaattccagtcaccggagagcagcaagctgagcttatctctgtgctgttagcagcggtaaatgacgccgacgaggatgcggtaatcatggggcgcggacctattgctggtggttttgaaaaattccttattgacccggaaggggcggtgattggccgtttcccagcccggatggaaccatcggcacacaccattgtggatctcatcgactcgcaggtgccagtgcagtaacccgggtaggaaaaacaatcccggtaagacacacggtagcgccagcgagaaataacccagtgagcaaccacctctgggcacctcagcgcacagcttgcgcaatagtgcacatggaacgcttcactgttgcggtcagtgcagctagtgaaatcggcgtacagacgatcaccggggaaggggagcgagcaggagtgccgcgacggccacggttgtcttgctgggacgcgacttaccaagaggggtaatgaggtgctggtgatggccaaactggcaggttattgcagccccatgtgtccgatgcggaaatggggtcgcggcatcacgagttctcccacaatcaggggtgaaattggggcagttgggtggaagttctcacacgcagacgggggcaagtgtggacattggtgcggtaagctgggggcgcatgtgatcgatactgtgtgaatactgtgcaattcactgtgctacatgccagcatcactcccctcgaaaaacctctatacgctgcgaatatctttcctgctagaagcagcgtttcttcagggagtgaaaggatcaacgggttgtgtgctcgtggccttactgcgctggaacagagtggtattttgtggtggtattcgccggtgacgatcccgcggtcagcaaaatattgctggcacaacttgtaactattcacgtcgcatagggagagccgccaagtggcccgtgtcgtagtcaatgtgatgcccaaagaagaaatcctcgacccgcaaggccaggcagtgcaacgtgcacttggccggatcggtatcaccggggtcaacgatgttcgccaaggtaaacggtttgtgattgaagccgatgactcgctcaccgccgagcaggtgcagcatatggctgaaaccttgctggcgaacacggttgtggaagattttgagattgttgacgttgcagtggaaggtggcaaagcgtgagcgccacaattggggttgtaacctttcctggcacgttagatgacggtgatgcccgacgtgcagtgaagctaggcggggctactgcgaaagcattatggcatgccgatcaggatctcagcggggttgatgctgtgattattccgggcgggttttcctacggggattaccttcgctcgggggcaattagtgcactggcgccgatgatgactgctgttgtggaagcagccggtaagggtatgccagtgttggggatctgtaacgggttccagattttgaccgaagcaggcttgttgccgggtgtgcttacccggaatcaaggcctgcattttcattgtgtggatacctatctcaccgtggaacaagctgacactgcttggacttcccagttcactgccggggagaacatacttgttcctgcgaaacatggtgaggggcgcttccaagcttccccggaaacagtggcgatgctggaagatgaaggccgggtagtgttccgctacaccgataacttcaacggttccatcaatgcaattgccggggtgtgtagtgaaaatcgccgcattgtggggttgatgccccacccagagcatgcgattgaacagctcaccggcccttccactgacgggttgaagctgattgcttcggtgacgcaatcactgctggaaacagcgtaacagcagcgctttccccatgctgtgctggtgaccctggaacacaaccctatgttggcagctggtgccgcagatggcgtgccctaaggttgggtgcaacccagctcgcccgccggtgtgagtgtccaatgcttacagcaggcgtgttccctggtgtgcaggttgctcttcctgtcctcgcggtgacctacattgtggggcgggaaattactgcacacgccagtatgcgctgtggggtgttcacaattgttgcgcttaactcctttttctgttgttttcgtcgttcattcacactttttctcgtttttcgtttctcgtttcttctttttcttctcgttttcgtttcctcctacttcgcggatcaaggacgtcgacacctatggccgagcacacttcccattttcaagacactgtcgctgatgcgaccgcaaaccctgaccagtcccagccgtacgcatcgctgggcttgaaagacgatgaatacgcccggatcaaagagatccttggccgccgccccaccgatgcggaactcgccatgtattcggtgatgtggtcggagcactgctcctataagtcctcgaaggtgcatctgcgctactttggggaaaccacgaccgaagagatgaactccaagattttggccggtatcggcgaaaacgctggcgttgtcgatgttggtgacgggtgggcggttaccttccgcgtcgaatcccacaatcacccttcctatgtggagccacaccagggtgcggccaccggtgtgggcggtattgtgcgggacattatggcgatgggggcgcgccctattgcggtgatggatcagctgcggtttggtccagccgacgcgcccgatacgcagcgggtgcttcccggtgtcgttgatggtgttggcggctacggcaactgtttggggctgccgaatatcggtggggaaacagttttcgacgactgctatgcgggcaatccgctggtcaatgcgctgtgtgtgggcaagctgaagaaggaagacctgaaactggcgttcgcctcagggctgggcaataaggtgatgctctttggcgcccgtaccggtcttgacggcatcggcggggtgagtgtgcttgcctcagacagtttcgaagcaggggcggaacgcaaacttcctgctgtgcaggttggcgatccgtttgcggagaaagtccttatcgaatgctgccttgagctgtaccaagctggggtagttgttggtattcaagacttaggtggtgcagggctttcctgtgcaaccagtgaactggctgccgccggtgacggtggtatgcaggttaatcttgaccgggtgccgctgcgggccaagaacatgactgccgcagagattctctcctctgaatcccaggagcggatgtgtgcagtggtgcgcccagcagatgtcgaaaagttccaggctatttgtgcccactgggatgtgacctgtgcagagatcggggaggtcaccgacggtgaccatctcatcatcacccatcatggcgaagtggttgttgatgcaccggcgcacacgatcgcccatcaaggaccggtatatgaccgtccctatactcgccccgactggcagtcggagatccagcagcagcgggaacttcctctcccgcaagacagtgacgctatccgtgagctgatcttgaccatgaccgcttcgccggcgctgtgttcgcgggaatttatcaccaaccaatacgaccgttatgtgcttggcaacacagtgttggcgaaagacgctgatgctggggtgctgcgtattgacgaagacaccaaccggggtgtggcagtatctgcggactgctcgggtcgctatacgaaacttgatccgcgtactggtgcgcagcttgcattggcggaagcgttccgtaacgttgcggtcaccggggcaacccctgtggcggtaacgaactgtctcaactttggttctccggaagatccggcggtgatgtggcagtttagggaagcagtccgcggtctggcggatggctgcgcggagcttgctattccagtttccggcgggaatgtgtccttctataaccaaaccggcgaccaagctattcaccccaccccggtggttggtgtgcttggggtgatcagcgatgtgcgccgccgcatcggccacacccttggtactgtcgaccagccggaagaactcttcctgttgggcaccacctgccaagaatttggcggttcgatcctgcagcaggtgatgcaagatggggaactttccggtttgccgccacaagtcgactttgctgcggaacaggcgttgcaggcattgctcagtgcacaaaccgaagctgagacaccagtgatcaccgccgcccatgatttgtctgaaggtggcctggggcaagccctcgtcgagatggctatcaccgcccggggtggccatgtgggtgtcactgttgatctgcgcggggttcatcccgatgcggtgaccgccctctactcggagtccgctggccgggcagtggtggccaccactgccgcacatgctggcaaactccaagaactcgccgatgcacacggagtgccatgtgttcgcttgggcacgacgggtgctgccgggaacctggcgcaacttgtcatcaccgacggccacgatctgcacattgagattcctgtgcaggaattggcggatgcctggtacggcaccctgcctgacctgttcggtcatgccgtgggggcaaactctgtcgtggagtaattgattaccgctgggctgcctcggacaccacctgggtgttggaggcagcctttcttatttccacttctacaagcctgcaaatacttgatacctacgaaaaacggtggtgctgcgatatcacccggtggggggcaatgcaccgatacctgccactagtcgaagcttcaccaccatgtctcgctgaaccgctactccccgttgcacaccgtcgaatcgtccagccggccttggttcgtagctgtggggaacctgccccaccggcgtatggatccgcggcactgtttcctcaagaactgcacgacaacatggtcagattgcagggtgctgctagattagtgccatgcttaaggccattcggcgcgtcgactccattgtcgatcaattctggttcattcccgcagtcatgtcgatcatcgccgcactgcttgcgtatctgctgatctggctggagcaatctttcggtgtgccgagctggctgagtttcatctaccagggcggggaatccggtgcccggtcgctcctgagctcaatgacatcaatgtcgatcggggttgctggcaccacgttctctatcacgattgccgccctgtcctcggtgatctcctcaatggggccgcgcctgctgcactcctttgtgcgcgaccggggcatccaaaccaccttaggtgtcttcgttgccacctttgtgttctccctttcatcactgcgagccatctccgccggggagaacggggcggtgtttgtcccacactacaacgtcaccgtctccatgggattcgctgccctgtgcgtgggatttctggtctactacatcgctcacatggccatgtcgatctcgatgagcagaaacgtgtatctgctcaccgccgacaccaaacaagccttcgacaaagcaacagaagaagccgccgatgaacacactatgccaacagtcgacaagaccctgtttagcggtgctgaagcactaaccctggatcaatccggctatgtgcaggcaatcgactatgcgggactcgcggaatacgccgccaagcatgacctggtcatcaaactggacatcaaaccaggcgatttcattgtgcgggggcaacgcatcgggaaaacaacagccctcatcgaccctgatgtcctgcacaacatggtgttcgtcggcgacactgctgatccggaacatgacgtcacctatgcggtacggcaaaccgtggaggtcgcagtccgcgcgttaagccctggcacgaatgacccctacacagcaaccgatgtgatccgtcggctctcccagatcctcgccgagttgaaagaccgtcaactccccagcggtattgtgaccattgacggtgaagtgcgtctcgtgcacgacgtggtcaccttcgatgaacttgtcgacacgatgttttctgatattcgccggcatgctgccggcactgtcgtggtctacaccaccctgctggagcagttcgttgccttacaacacgtcatcactgatccgctgcgggtcggactgttgcatgcccacggtgaggcggtgtatgccgacgcgaaacggctcgtcgacaacgacaaggatatgcaagtcatcgaatcggcctaccgaaagtttaagaccgtcaatgcggtcaccggacaggcagtgtagcgttcatgtttgcgtaatcttttacagtgtgacgccaacggatagtttgttggtggggaagtggaggtagcgagctactttccggtcaccaaggagagctgaaagaaggaacctctcagtgcgcggcgaaagtaaatagaattttcgttggcgccttgcgatatcctgtcgcggctgttacgatagttctcgtcgaacctcaataagtaatggactcgttagccattacggaattctccagccggcgccttcgggtgtcggctctttttattttctagggagcaaggcggtctggtgggttaagggacaaaatgtgtgtctgggggtggttgcagcttcccttttattcgccctttttcactttggcagagcgtttccctcacagtcgatatgattgccgcccaatagagaacgtccccgtgtcgcgatttgctgggttgcttgacactggggtgcggatcgaaacattcgcggataccagcgggtctgtgagggccggtgtgtaggtgaagccgttgttcttggtgggctagtttcaagcactgcaatggggaaggttggtatccataggcgacaagcaatccggacttttacccttgggcgtcaacagagtcaagggtttggattcacttggcgagcatatattttggtgttggtgctggttggggtagggatttcggcctttcagacacactttttgaccctaatctctcccttgtcgatagtcgtcattggtctggcgatcgatgaactgggagtttcctcatttcatattttcgtcaaagagcctctcctgaatcgcctaatttagggagctgcgagcccaattcgtgtaccaactactgcatctttgtgatctgttcgaacgattcattgaagttggtaagcgtgtgcacaatcattgctactgtgagaacagatgacaaaacttttccattgctgcggtaacggggtaggtgccgcacctcctgaggagaaatgaaatgcaagttcaaaaacgctataccgtggggcttgacgttggatcctattcgttaggtatggctgccattgagctcaatgaaaacggtaacccagtgagtattctcagtgcagtgtcgcacatccatgacgctgggttggatccagaccaggttaaaaatgcgacaacacgccttgcgcagtccggtcttatgcgacgtacccgcaggctatatagggagcggcgccggcgttcccgcaaactacatgagtttttagtagaacaacaatggaaaactttgccgttcgagtcatatgctgacccgtaccatccgtggcgggttcgaacgatgcttgtggactcgtatgtggaagacgatgtagaacggggggagttactttcgattgcgctgcgccatattttcaatcatcgcggatggcgcaacccatacacccgggtgcagagtctttacaatgtggcagagccaagtgaaaactttgaacagattcgcaacgatctggaaggacggtacggtgtcccaatcgatcgtgatatcaccgtagctcagttagtttcggttgccgagtttggtaaagaccggttacggggagcggtgaagtccaagaaaaatggcaacgccaagggtgcacccgaaaacgaagtgaaggaagccgtcctttcccatcgtttacaacagagcgacaacgcgcgtgagatatgccggatttgtcaggtgcaacgcatcgatgacgacctttacaagaaaattattgatttagtctttgatgcaaagtccccaaagggtgcacaacaggagagaactggaaaagatccgtttttccccaaagaatatcgagccctgaaagcgagtgatgcatttcagcgataccgaatcgcctcaatcataggtaacttacgtattcgtgaggatgattccaacgttccactcgatcatgatcaacgccagcaactctttaactttctggtaaatcatactgggaacaaccttccgacttggcaggatgtagcagaagaacttggtatcgatcgcgggttgcttcgtgggacagcggcggtcacagaggatggagaacgagccaatagccgtccccctatccatgaaacgaatcgagcgctgaccaattgcaaagtcaaacctttggcctcttggtggaaatctgaagattggcctgcgagagaggcattggttaaggcgctctccaatgcaaccaaggccgattttgcgtctccagcaggactcaaggtggagcaattcctcaggagcgtagacgatgagctgcttactgagatcgacaagctgaaattgccaattggtcgtgcagcctatggtgagactacactcatcaggcttacaaatacgatgttggaaaatgatctggatttgcgaggtgcactagaagcggagtttaacattccaaaaaattggtctccaccaaagccaccaatcaacgagccagtcggcaatccggcagtcgaccgagtgttaagggaagcgcatcgctggattgaagctgcagtgtcccagtggggtgaaccagaatcggtggtggttgaagatacgcgtgcaggattcaccagtgaggctactcggcgcgaaattgagcgtggtattgagaaacgtacaaaacgaaatctcgctctggcagaccaaatgcggctggaacttggcatcgatggcccaattcgccgctccgatctatggcgataccagtcaatacaacgccaaaatgcgcaatgtgcttactgtggtaatccgatcaccttttcagccagtgagatggatcatattgtgccacgggccggggctggatctactaatgttcgcgaaaatctggtggctacatgtgcgcgttgtaatcgggcaaaatcaaacagaccattcgctaattgggctcgcacctgcggtatcccaggagtgagtgtagatgaagctgtggaacgaaccaggcattgggtgcgagactcagcaatgaaaacgggggaattcaaacagtttgtcaaggatgtgacggatcggtttaggcgaactgaatacgatgcgccactggatgcgcgatccatcgagtcggtgggatggatgtccatcgaattgcgaagtcgaatcatgcagcgattccccaatgcgcgtgtagatctttacacaggtaagaccacgtctcaggcacgtggtgcttccggtatcactaagcatttggagtttatcgggggtaccggtaagtcccggctcgaccgacgccatcatgcgatcgatgcagcagttatcgcaatgatgcggccctatgtagctgaaaccctggcgattagaaataacattaaattcggagagtttcttgaacatggaggctccgataatcggcggtggaaggaattcatcggggaggatcaggctcaccgtcagtcgtggcaacgctggatgcaagccatgcacgcgttgcttccactacttcaagaagctctggatcaggatcgaatcccagtcacgaggaatttacggctgcgcctgggaaatggcgctgtgcacaaagccgagattcattcgctggaaactgtttcattgtcgacagcgcttaccgtggaacaaattgatcgtgccgcaactgaggctctgtggtgcgctctgacgaggcaccccgatttcgatcccaaggatggtctgtcagaagacccgcaacgccaaataacggtgaacggtaaactgattaagtccgatgatcagattgaattgtttccagtccaagctgcgtcaatccgagttcgtggtggatatgcacagcttgagaagatacaccatgtgcgcttttaccgagtgcctgggaaagtaaaacccaagtacttcatgctgcgagtttttgtccacgacttagtcaatttcggtggtcgggatctttttagtgttgaacttgccccccagacacaatcggttcggcactccaggaaaattcttcgggaagcgcttgtggatggaaccgcggagtatttggggtgggtagtcacgggagatgaactacacctaaacccaactgttcttccaaaatcggtgacgcccctattggaagaattcggccacctccatcgttggacgattgatggttttcctgatgagaggcgtattcgtctgcgctcgcgattgctgagcggtgaaggtgcagagaatctgccagaggagtgcagaaaagttctgacgggaaggggagttcttacctcagtcaatgcgttgcttgcacaaggtgagcttatggttgtgcggcgggatgccttaggccgtgtccgcctaggcagcagagctaacctccccgtatcttggcgcttggatcggcaatgaatcttggatggcgtgtgttggactgctcacagcttgatggcagactccgctatgaacgaggagttatgaaagtcctggatcgtgagggttctgagctcataactgcaccactttcgcagatagctattgttctaattggtgtacaaagctctatatccggagcgctcattgccaagttcggtgagtatgacattgctttgctggtctgcgattggcgccaagagccagtcgcaggggcaatgccttggcatgaccattcgcggatcggcgcacgacaggttgcccaggcaagattatctgcgccaagagcaaagcaggcatggaaagcaatagtcaaggcgaaaattgctggacagtcatgttgtctaagttctgtacgaggcatctcgccgatatcagagcgtttaggcgagctcgttggtcaagtgaaatcgggcgacagatccaacgcggaaggtcaggccgctcgaatctactggccggcaatcacggaagaccctactttccgtcgtacaccccagtgctccgatcgcggttggaacatgtatttaaactacggttacaccttgcttcgagggcatggcattagagccgtcacagctgctggactgtgtggcacgcttggtatttttcatcatcatcgggagaatgcttttgctcttgttgatgacctaattgagccatttagaccgttgatcgactatcacatattttcctcatttgacgagttgtgtgaactagatagagattccaaaaagattatcattaactgttttgataagccgttcaacggaaatggaaaaagtctggtgacaatgcttgaagaatttgctcaccattatggtgcctatgttgaagataaaatcgaacgtttagttgttccccgatgggaaggtaggagatgatgcctgcgaaaggagcagatcccgtgtggtcgatggtgatgtttgatgtgcctaccaagactgatgttgacagacgaaatgcaaacaggttccgacatttccttgtggatgaaggatttggcagagttcagttgagtgtctatgcacagtactatccgaacggggccagggcggtgactgtattgaagaaaatcaaacagaatttgcctccaggcggagacgttaggattcttcatatcactgacaaacagtggtcgaccgcgagcagattttcacggactaaggctgcatcgatcgaggaaaagcccgaagtgggcgtagttttttagccaacgatataataaaaccccctggtagagcccgctttttgtgatttagggagtataccaggggatttttgtgtcgaaccccaacatgaaagcatactcatacgacagccctagggagtataccaggggatttttgtgtcgaaccccaacctgcacttgtcgtttgtggcgcgtgccgggagtataccaggggatttttgtgtcgaaccccaacctaccgggctcaccccgcaggcctcggaggagtataccaggggatttttgtgtcgaaccccaacgtgccgctgcagccactgtgacagacaaggagtataccaggggatttttgtgtcgaaccccaacgtgcagtctgaggtggcgccgctgaaggggagtataccaggggatttttgtgtcgaaccccaacgccatccgccatgtagtagcacaaggcgggagtataccaggggatttttgtgtcgaaccccaacgtgctgaaagacaatgcggcggcggtgcggagtataccaggggatttttgtgtcgaaccccaacgcagagcgcggcgaggtgtgttggctgtggagtataccaggggatttttgtgtcgaaccccaactttgaggtgtcggtggtgccgatcggtgggagtataccaggggatttttgtgtcgaaccccaacccactagggctcgccgcacttggatcatggagtataccaggggatttttgtgtcgaaccccaacgggcagatgatcgagacagcgctgggtgggagtataccaggggatttttgtgtcgaacccaaaggttggtttggtctgcagaggccggtatccctcaccgcgttcgccttcgttgcgttcaaggtcgtagtacgaccgtgaacgctggtgatggttgaggctggcgaaagctgacatccacaaggagttctttggtttcttggtgactcctcggttcggggttaaggagcggattgatgcctctgatcgtcgttgttggggactgagacctgcgtatgctgccagctgtgcggggccgtggaacgctgagaggtcgccgacacacgtaatgaagatcgccgcgatgtgttctcctgttccaggcatagatttgtcgatttcgtactctggcacggttttcgctgactcgatcatgcgttgttgcacctgctgccgtttttggccgttgccagcatgattgtggtgtgagtttgcatgctgtaccaatgatcttgcttcgctggcgttgcaacagtttatcggctcttcgcagtttagagtgcacaaccggtcgcaaggcatagcagctgcctcaatcccagactcaacatttagtagcatccacccctgcagccacatgccgctgtactggcatcgacacactagtgtttgggtttgctagcgaacagctttgttgtcgacattgaggtagcgacatctatctggcggaatggtggaatgagaggagctgtatgaagtacctggctatcggatctgtcgatggcttgcatcactagggcggtgctcggtggtgtttttgccgctgcttgcttccatcacgccggtgggtcctgggcaacgagtttccagaatctctggcggatctggtgaaggtgcacgttcaggattgcggcaagttcgttctctgtgagtgggagggttgctttacaaggtcgatgagggggagtcacggttttgcggatttgggctgtgcaatgcttcgggatggggcgctgttgtgttccacaactgacggtgcgtcagattgtcgacgatcgcagccgatgcgaagttcgcatgaggcatcgacgaaattgagcacgagcaatcctgctacgttccatagttttaataggtgtgggcgcgccactgcctacccctttaatggtgcgtgctccatcgctttattgccatagtcgacaggtattgttaaagggcaggtttgcaagcactgttttgccgtgctttgtaggcgtgccgtcgatattccctcatgcccgccgaggttcgtgatcacaagtttgcgtgacctctattgcggttctcctcatgttggctcgatgagcggatccagtgtgcaatgaatcattgcatttacgatgagttcgtacacccaaatgcgtcggtgcgcggggaattcgagtttgaactggcagcagtctgctctctttaggtgtgttagctggcagtgttgttgccgtcggcattatcgacgaggggttccggggcatatgcggcgcgcagctttcgcaacgtgtccgcatgctcgtggagccgcttgtcttctgctgtttgtggaatgaattgccgtgctgggagcggatagccgtcaatatcgataccgacaaaggtgacggcagcatggattgctgtgcgaagattttcacgtccaccggttggtttgccgctgcgcacatgcacactgacctgcattgagcgggtgtcggtgcgcataattcgggaatcgacttcgactaaatcgccaatgtgaatcggggcgtagaagcggatcccgccggcgtagacggcaactgtgcgctccccggagaattccatggtgcaggcggtggcggattcaataatccattccatagcggtcccgccgtgcacattgccaccccagttcacgtcattcggggacgctaagaaacgggtgatgaggcggggtgcatcagaggggccgtcataggtttgcttcgccatttcttcttcaatggcattacgtaaatcgatgcggcgggtagcaacctcgttgaggcgctgctcggcgggggtttccggggtgaaggttggtactgcgacagccttgtttgtttcttcgtcttttgccacgaaaatcaccaaacagtcgcaggcgcgggtaaacaccccttcgcggggatccgcggaaagcacctcgttgacaatatgcattgaggagcgcccggtgagtgcaatccgggagcgaacttcgacaatgtgtcccacagggatagggcgggtgaagtgaatatgtcccacataggcggtgacacaatatcgtcccgaccaggcggtggcgcaggcataggctgccttgtcgatccactcgagtacccggccgccgtcgacgccaaacgcaccggcggtaatcacatcggtgggtgcggccataaaccgcaaaacaacttcgtggggacgttgtgtggacaagacagaaaacctttcacaccttgggttagcagcagcttgccacaggcaaaaccgcggatggcatgcggatgggcaacactgttgcgcaccattcccgcatggtctgtgagcgttgacacagtgtaccggacggggatcggcatccctgatagacggttccggttggcagatatcgatggttaagcgatggggacgcgtggacggtggggatcgctggccggtgatctcaggtggcgagtgctggtgtttggctcgtagtcgtgatcaccagtggttcaacgaggcgagtgatattgatcggttggtgaacatgagtggctagttgccggttggcatgattggttggtcgccggtggacatggtggcacagtggccggtggcgacgctttggcgggctgctggaactgggggaaggtgttgttgcgggtggaaatgctgtggcgcacatcccgcaaaatggtgtgggtgatcaaggtgtggatggtcaataggatggctgttttttcggtttggtgtgcgttgcgcagtggtgaaaccgggatactggtggacactgtggcaaagttacaacgtatgactggaaaacgcatcgacccgcagcagctccgggaagcagtgatggcgatcctgccgtggattgctgatcctgccacccaaccggaaccgacccggccgcaactcgcggcggcgtgccgcatgttggcgcgcacggccgcccaagacgccccggggaaaaccgtcgagttgcgggtgccgccatttgtggctgtgcaacttatagacggacctgcccatacccggggaacaccgccgaatgtggtgcagctcgatccgctcacgttttgtcgactggcctgcggctggatcacgatggctgacattgttgctaccagcagcccgctgattgaaatttccgggacaagagcacagctggtcgacgaagtcatgccggtggtcgatgggcaaaagctgatgtcggctgccgtgtaatgcaactgcggatagaggatggctgtggtgaacttggggtggggctttcgcttgtcggcggggggactttccgggtgagctgttcccggtttggtgtcgaactttgcacgctaacggctacagtaggaaattgtggcttcgcaacaaccaagacaggcaagtgcatgttcaacccgtcaaggggggtatagcggggggttagcctccccgttggatgatcaaggcgagaccgcaccccgtgaagaatgtggggtgtttggggtgtgggcgccgggggaagacgttgccaaactcacctactatgggctctacgctttgcagcatcgcggccaagaagcagcaggtattgctgttggtgatggggatcagattgtggtgtttaaagatttgggactcgtgagccaaatctttgacgaacagtcgctgggggctttgaaaggtgacttagcgatcgggcatacccgctattccaccgccggtggggcgtgctggaataacgcccaaccaatgtttcggatggcgaaaaacggcaccgatgtggcgctaggtcacaacggcaacctggtgaactatctgcagctgctcgatattgcccacgacaaggaactagtcgacaaagagcaggcaccatcggactctgatgtgttgtgtgcactgctcgccgacggcattgatgataagacttcgctggagcagtcagcacttgccctgcttccgcaggtggaaggggcattctgccttacatttactgacggcaacactttgtatgcggcgcgtgaccgcaatggggttcgcccactttcccttggccgactggaacgtggctgggtggtagccagtgaaactgctgccctcgatattgttggtgcctcctttgtgcgggagatcgcccccggggaattggtggcaattgatgcaaccggggtgcattccacccggtttgctgacaccacccacaaaggctgcgtctttgaatatgtgtatttggctcgacctgactcggtgatccggggtcgggcggttaacgccacccgcgttgaaatcgggcaacggctagcgaaacaatatccagcagatgctgaccttgttattccggtaccagattcgggtaccccggcggcggtcggctacgcccaaggttccgggattcccttcgggcaaggactggtgaaaaacgcctatgtggggcggacatttatccagccttcacagaccatccggcagttaggtattcgcctcaaactcaacccgctgcgggaagtcatcaacggcaaacgacttgtggtggtcgacgattccctggtgcgtggtaacacgcagcgggccttgattcggatgctgcgggaagccggcgcccgggaagtgcatgtgcggatcgcatccccgccggtgaaatggccatgcttctatggcatcgactttgccacccccggtgagcttgtggcgaatgccgtcgacactgcggatgaggcagccatggtcgaatcggtgcgcactgcaatcggggcggattcgctggggtatgtatccatcgaaaacatggtggaatctacccggcaaacccgcagtgaattgtgttgtgcctgctttgatggggactatccgctggggttgccagaaggcaacccgaatgcggcactcgtgcgtaaactgcaaaccccggccgcatcggcggagcagtaaacacagcaggaggcagcagtgtggaatcatgcactgctgcggataggtgcgcgaacagttgcaccccacaaccaccctacttgccgccctgattgatatttgattgaacaacacgaacaaagaatgtgaacaaaccctgatgacgaatcaaccacacaatccggcttccacaacacctgctgcagccccgcagcctgccccggagggggtctcctatgcggcagccggtgtcgacattgttgccggtgatcaggccgtggaactcatcggcccactggcgaaacgagccacccgcgaagaagtcactggtggtattgggggattcgccggattattcaaactgaaacaatatgaagaaccactgcttgccgccggcagtgacggggtgggcacgaaactcgttatcgcccaagcaatggataagcacgacaccatcggtatcgacctggttgcaatgtgcgttgacgatctcgtggtgtgcggggcggaacccctgttcctgcaagactatattgctatcgggaaggtgatcccggagaaagtcgccacaattgtcagcggtattgccgaaggctgtgtgcaggctggctgtgccctgctgggtggtgaaactgcggaacatcccggggtgatggagcccgaccactatgacgtgtccgccactgcggtcggtgtggtggaagccgcacagctactcggaccagataaggttcgcaccggggatgtggtgattggtatggccgcctccgggttgcactcgaacggctattcgctagcccgccacgtcctccttgagatcgccggccttgatctgcactcccatgttgaggaactcggccgcacgcttggcgaagagctcttggagccgacaaagatttatgcgaaagactgtcttgccctggccagtgaatgtgatgtgcacaccttctgtcacgtcaccggtgggggattggctggcaacctggcgcgggtcattcctgacggctacaccgctacgttgcaccgggcggcgatcaccccaaatcagattttccgggtcatcgaagacttagggaaagtatcccgggaagagatggaaaaaaccttcaacatgggggttggtatggtggcggtagttgccgctgaggatgcggatcgggcaatggcaatgctgaccgcccgccatgtggacagcttcattcttggtgaagtgcacaccgccgcagcggatgagccacgagtcgtgctcaccggggattacgccgacgagtaacagcatctggcttttggcggtgatcgcaggtcgctgatccggtagtgcagtggcgtgtgggacttatggtgcacacagtcaacgcaactaccgggaagtcgcgctacagggaattgctggcggtagcatccacggtcactgcaggcgcggcaggaatcctccactacagtaaacgcaatgctgctgccccttcgttgacggtaaatgagcagcgtacgacgttgatgtagggtgccgttcccacagcccgactaggtgttgcccgctgggttgcatggcgactgcttgcacccggtaccagtggtgactcattccgcggtggaataggggctttgctcctgtgcgacacctatcggcatcggcgcgggcaaactgaacaccccagtttcgcgttgcagaagcaacaccaggctaaggaacaatcattatcacccacgcacggcggcaccgaaggtgctgccagcggcctttgaacatggaatagctgtggcaatgtaggcagcggaaaaaccaccgtggccggctatggaaaagccgagcgacggtggttgcacaaatagattgcacgctttgcagttattgctgcacgtgtcagcatcgcgctggtactccgctggtaacgggatcagttcaatgcaacttcgcccgccaccgcacacggtgacgtggatattcgcctggcacaccagctagcgctgcggcgcctcatccgcccaatccgaccacttgtcatagtcgtcgtcatagtcgtcagcaccatagttctcgtgatcactcgagttgcccttgagttcacgttgcaactgatccaggtccatgtccgggatgttgtacttcaactgacgagcaactttggcttgttttgctttagcacggccgcgacccatggtctgacccccttgggttttcgtcgggcgtaagagtacgcccggaatgtctctcaatgtgtattcctgttagacaacaatagcggtttctgtgtgaaaataccgcaaatagtcattgagctgcagaaaacaacacattcccgacgcggtgatcggacgcagcccggttgttgatgcccctttttttgcatcaaaggcacatggatgattttcgctacgcttccccgagacttgggtcggtggtccttcgcggcaggcgagcaaacaattcttggtggcgctgtggccgacaaactgggttcctcccgcaaggcggggtgtcggaccagggggcagggtggggcacacctaacggtgtcaaggaacctgggttttgttgtcgcctgcttggggggtggggcagcaatctgccaagcattgtgttctgctggctagtcgtcggtgggatcaagtccgcgcagtttcgccaacgccacccgtccagctttcggaccggaatccgggggtagtgaatccgggtcgatagcaatcgattgaccggcggcggtcagggtgccggttttgccgacggcagaccgtttcaccaaagcaagggcaatcggaccatattcgtggtgctcaatgacactgccgatggtgccaacagtgcggcgaccattgctgatcgcagtacctggtgctggtagctgtggtgcggaaccatctaaatgggcgaccaccagcagttttgggggttggccaaggttttcaacgcgggcaacagtttcctgccccggatagcagcctttgtccaaatgc

SEQ ID NO: 3973 - DNA, 23315 bp, synthetic construct
  source 1..23315: mol_type = other DNA
  misc_feature 1..23315: note = Synthetic
tatcgacgccgagcactccccctacagtctggagaccgtgaccgcactacttcgtgccacggacgcctacgacgccacccgtgtagttcggctcccggtcaacgacacggtgctcatcaagcagtacctcgacctgggcgctcaaaacttgatgatccccatggtcgactccgccgaggaagccgagcaagccgtgcgcgccatgcactatcccccgcgcggcgtgcgcggcgtcggcagcgccctggcgcgctcctcgcgctggaacggggtgcccgactacctcaccactgccgcagagaccgtcaatctcatcgttcaaatcgaatcggcgcaggcagtggagaacgcccgtgacatcgtatccgtcgacggcgtggacgcggtgttcatcggtccgtcggacctggcagcgtcgatggggttcatcgggcagcagacccacccggacgtcctcgcggccgtcgacaaggccatgcgcgccgccatcgacgccggcgtacccgtgggtgtcaacgcgttcaaccaggaccaggcgcgcgcctacctggaccagggcgcagagtttgtcctggtgggcgccgacgtgcagcttctcgcctccggggcgcgtagtctggcggatacattcctcaactaaagcacttcatttaaggagcacacgcgatgaccgcgaatatcactgacgtcctagcgaaggtgcctaccggcctgctcatcggcaacgactgggtagacacggacgagaccttcgacgtggagaacccggcgaccggggaaacccttgccactctctcctccggcggggagaaggaggcgctggccgctctcgacgccgcttgcgcggtccaagacgagtgggcgcggacgtcgccacgcgagcgctccaacatcctgcgccgcgccttcgagctggtgcacgagcgcgctgaggactttgccacgctcatgaccctggagatgggcaagcccctggctgaggcccgcggcgaggtcacctacggcgcggagtacctgcgttggttcagcgaggaagccgtgcgcgactacggccgctccgccaccgtcccggagggcacgctgcgcatggtcacccgccgcaagccggtgggcccctgcttgctcatcaccccgtggaacttcccgctggccatggccacccgcaaggtcgccccggccgtcgcggcgggctgcacgatggtgctcaagcccgcgaagctgactcccctgacggcccagtactttgcgcagaccatgctggacgccgggctgcccaagggcgtgctcaacgtggtatccggtacctcggcctcggccatctcctcgccactcatggcggactctcgcctgcgcaaggtgtcctttaccggttccaccccggtgggcaagaccctcctcaaggcggctgcggagaacgttctgcgcacctccatggaactgggcggcaacgcgccgttcatcgtgtttgaggacgccgacctggaccaggccgtcactggcgcgatgggcgcgaagatgcgcaacatcggcgaggcctgcacggccgcgaaccgctttatcgtccacgagtccgtggccgaggagttcgcgcagaaattcgcgcagaagatcggcgaactcaagctgggcaacggcatggatgagaccgtgacctgcggcccgctggtcgaaaagtccgcacaggacaatgtggccgcgcttgtcgacgacgccgtgtccaagggcgctaccgccatcattggcggcgccaagggtgacggtgcgggctacttctaccagcccaccgtgctgaccggtgtgcctcgcgacgcccgcgtggctcaagaggagatcttcggccccgtggcccccatcctcaccttctccacggaggaagaagcactggagatcgctaacgacaccgagtacggtctggcctcctacgtgttcacggagaactccgatcgtctctaccgcctggccgacggcctggagttcggtctcatgggcttcaacgccggcgtcatctccaacgccgccgcccccttcggcggcgtcaagcagtccggcctcggccgcgaaggcggcgccgaaggcctggacgagtacaccaccgtccagtacatcggcgtgcgggatccttacgcagaaaactagagacagctgtggcgtgtgccacgcactatgatgtatagtggctcactaagtcactattgtgttatctgaaccactctagataaaaggagtccgcgtgtcttacgcaaacatggaagaactgctgtccgccatcactactggtgagggccaggaaattctgaacccggccactggtgagcaggtgggcttcgcgcccctcaagtccgttgaggacctcaatgaggctgtgcgcgtggcgcgcgagaagcagccggagtgggaggcgcgcggcgaggccgagcgcaatgacctactgctcaaggccgctgacgccgtggaagcctccgcagaggcgctcgcggtactgctgtcctccgagcagggcaagccgctcaacggcccgaacgcccgcttcgaggtgggcgcctgcgccgcgtggctgcgcgctaccgttaccttcgaatccccggactacgaggtcaccggcgaggacatcaacgcgaaggtcgtctaccgcccgctgggcgtcgtgggcgccatcggcccgtggaactggccgatgatgatcaccgtgtggcagattgcgccggcactgcgcatgggtaacacggtcgtcgtgaagccttctgagtacactccgctgtccgtactggcactcatcaaggtgctcaacgacgtcctgcccgagggcgtcctgcaggtcatcccgggtgacggcgcggtgggcgcggctctgtctggacatgaggacgtggacaaggtgatgttcaccggttccatcgctacgggtaagaagatcgtggagtcctctgcggcgacgctgaagcgcctgaccctggagctgggtggcaacgatgcgggcatcgtgctggacgacgtcgacccgaaggccatcgcccaggacttgttctggggcgcgttcattaacaccgggcagacctgcgcggcaatgaagcgcatgtacgtcccggccagcatctacgacgaggtgtgcgaggcgctggtcgaggtcgctcaggcgtctccgatgggcgtgggcctggacgagaacaacgtgctcggaccgctgcagaacaaggcgcagttcgacatcgtggatcgcctggtcaaggcagcgaaggatgccggcgctaccgtgctgctgggcggtgagccggactacgacgcgccgggctacttctaccccgctacgctcgtggccaacatcgacaacgacaacccactcgttgccgaggagcagttcggccctgccctgccgatcatcaagtacgagaacctggacgaggctatcgagatggccaacgccctcgaggtaggccttggttcgtcggtgtggtccgcggacaaggaccgcgcccgcgaggtagcagctcgcctgcgcgctggcacgacctggattaatgctcacggcgccgtggatccccgcgtcccgttcggtggcatcaaggactccggctacggcgtggagttcggcaccgaggggctaaagggcctggcgtacccgcacgccattaacggctaagcacacctcacaaagaccccgcgatagcgcggggtctttgtgcttttccagggacttttctgttcaatttttctgcattagtgattaacggcacaatagagcgtcggctttttgtgccgaccgaaattcatcgaccgacatctgcataagcgatgtggaaagcaatgtaaaagaacacttcaacaacacgttcaaaggagaacactctctcatggaactgaaagctgacgaggcggcccacggcccgccgtccccgcactggaaggctggccctttcaacatccggctgcccttcgtgcactacaaaatcgaatggcccgactacattcagggcctgctggtgtgcgtggtggacctgggcgccatccccttgatggtggatgcgttgggcatgccgttcgaagtagccctggccgtcgtgatgctcaacggcctgctgtacctcacccaccacatgctgggtgatccggtggtccccggctggatcacccccgctgtccccttgctcatcgtgtacgtgggcagcttccccgaggaagaaagagtctgggcgctcatcagcttccagttcgtactcggcatattctccatattcatgggtgccacgggcctggccaagaaagtcgcccgattcatcccctccgccctacgttccggcatcgtcatcggtgcaggtatcgccgcaattgtcactgtcttcgaagaaggcgggcgcttccacgaaatgcccatcaccatcaccgtggccactctgctgggcttcttgctcatgtactccgccggctttatgcgcttgaagcagaagtcgccgatgtggcgctacattggcaacctgggaatcctgccgtccattatcttggccatcgttctggctcccctagtgggcgaggccgcatggccgaacgtggaatggggattctcccaacctgacttcatgggcgtgtgggaaggctacaccgtcttcggtgtgggcctaccaccggcgcatatgttcttcaccgccatcccgacgatgctggctgcctacatcgtggttttcggcgacgtgctgcaggccaaggcgatcctcaaggaagccgaccacatccgtacggacgagggcgtcgtgtacgacgagaaccgtgcacacctcctgttcggtggccgcaacgcgttcatgtccatcgtggggcccgacgtggccatgtgtggcccgctgtgggccgctatgcaggtcatcatcgtggagcgctacaagcagggcaagaaagccatgaagtcggtcttcgccggtgtcggttcggtgcgcctgggcgcgatcacgggcttgtgcttcctcccggtggtcacgctggtgcagcccatcctggccgtcggcctggccatgacgctcatcatgcagggcttcgtctccgtgcgcgtgggcgtgatggaggcgaagaaccagaaggacctcggcatcgcgggcgtcgtcgccggcgtgctggtcacccagggagccgcctgggcctttgccgtcggcatcctgctgctggtgctgctttatgacaaggacatgttcaaggacatgccggacggcacgctcaagccgctttagtgcagcagtttcacaagcttgtcgtggtgggccgggggtagaacctccgcgtccaccacttttttagccgccgccttgtctcccatcttggcggcaaaagccatgcccatggtgacgccgtgatcgggggcaggctcaaaggtcagcggtgcgtcgcggcggatgcgcccgggttcacggacgcgcaggtaggccccggcgtcgccacgctgggtaaaggttttgacccagcccttctcccccatccagccgctgaacgtggcgcacggcgagcgcggaaccgagacctccaagagtgcaccgccgacccgcacgcgctggttgatgagcacgtccttccacaccacgccgccggtggtgaggttctccccgaagtgacccgacgggagttcgcggtgcaggcgttcttcccaccagtcgagttcctcgcgcgcgaaggcgtagacggctttgtcggcgccgccgtggtgttcgtgatccccgatgctgtcccctgccacccccgaggcagagtctgagagaggcttctcgacgtcgaggtaggcctccggccgcttatcaatgccggtgtaggcgtggcggccggaaggatcatcgcggcgaaaagcaacgttggtggacacaaccaaacaagtcatgcccaccaacgtaccgcgagatagcttttacatgaactgcttgagcagcttgtcaatcgccttgttgtcgatcttcaccaggccggagccgaatgcgcaagtgaaagaaagtgcctggtgtgcggccgggtctgcgggacggccggggaaaatcgattagattcaatgaaagtttgttgacagttgccccgaagactagaggaaaccagaatgctcactaccctgtcccgccgcgccggtgccgtgctggctgcggttgcgctcgtcctgccagcaacgcccgccgtggccgcgcccgctgacaaacaggtggtcatctttggcgattccttctttgctaaccccacctaccggcaggtcggtgctctccgggcgaagacgtccagcgacgtcaaccgctggggcaagcccggccgcccgtccccgcaggactgcccgcaaggcgccagcagcgtcggcgcggagctagagacctaccctggggtgtccgtgcgcgactactcttgctccgcagcgcgggcggccggcggctcgcaccgtccggacttcggtgagcagttggcccacgccaaggccaccggccgtctcaaccgcggcaccgacgtggtgttcgtgcagttcggtgccaacgacgccgcctccctcgcgccgggcggggcatcgtccgaggccacctactccgcggtcatgacaaagtacctgcggagcatccgccgtaccgcgccgggtgcccgcgtggttgtggtctcctacccatccgtttccgcacccaacggcgcgatgtgcccggtgcgcactggcgccaaccgcggggtgggcgtgaacctggatgtcctgtccgtcatgcgtaacgtggaaaacttcgcgtttcaggagatgcgtggcgccgcccgccgcggcggcgccgagttctacaacttgcgcgccaagaccaagtaccacaacatgtgcgcccccgagcgcgaacgctggatttccggtgtcttcgagtacgccgcgccgcacaacctgtacaaccattacacgcaccggggaaaccggggcgtcgccaagctgctgtactcggacatcgtccgccactcctaatggcccgcggctcacctgtggctattacactggtgaaccatgactaacccgagcgagtcctaccgttatacgccgcagctggcaaatgagattgagaagacctggcaggcctactggaacgagcatggcacctttcatgcgccgaaccccgtcggtgacctagccacggactcgcccctgcctaaggacaagctgttcgtccaggacatgttcccctacccctccggcgtgggcctgcacgtcggccacccgctgggttacatcgccacggacgtcttcgcccgttttaaccgcatgctgggcaagaacgtcctgcacaccctcggctacgacgcctttggcctgcccgcggaacagtacgccatccagactggtacgcacccgcgcaccacgaccatggcgaatattgagaacatgcgccgccagatcggcgcgctgggcctaggccatgacatgcgccgctccgtggccaccacggacgaggacttctacacctggacccaatggatcttcctgcagatttacaattcttggttcgacgaggagcagcagaaggcacgcccgattgcagagcttatcgacgaactctcgtccggccagcgcaccgccaaggacggccgcacctacgccgacctctcccccgccgagcagcgcgccgcggtggacgagctccgcctggtgtacctgtctaactccacggtgaactggtgcccgggcctgggcaccgtgctggccaacgaggaggtcaccgcggatggcaagtccgagcgcggcaacttccccgtcttccgtaagaatttgaagcagtggatgatgcggattaccgcctactccgaccgcctgctcgaggatcttgaggatctggactggccggagaaggtcaagtccatgcagcgcaactggatcggccgctcccgcggcgccgaggtggattttgcctgcgagggccacgacatcacggtgttcaccacccgcccggacaccctgttcggcgccacctacatggtgctcgcgcctgagcacgagcttgtcgacgccatcgtctcccccgtcccctacgacgccgacgtcgacgagcgctggacctatggccacgacgaccccaaggaggccgtggaggcctaccgcgccgccatcgccgctaagtccgacctggagcgccaggaaaacaaggacaagaccggcgtcttcctgggggtgtacgccaccaacccggttaacggcgcgcaggtgcccgtgttcatcgcggactacgtgctcaccggctacggcaccggcgccatcatggcggtcccggcacacgacgcccgcgactacgagttcgctactgaattcggcctgcccatccaggaggtcgtctccggcggcaacatcgccgaagcggccttcaccgaggacggcaccctggtcaactccgccaacgattctggcttggacctcaacggcaagaacaaggccgaagccaatgcggaggccattgattggctctcccaacagaacctggggcaggaaaaggtgcagtacaagctgcgcgactggctgtttgcccgccagcgctactggggcgagcccttccctatcgtctacgacgctgagggtgtgccgcatgccctgccggaggacatgctgcccgtgcagttgccggaggttcaggactacaagccggtctccttcgatccggaggactccgatacggagccgcagccgccgctggccaaggccaacgagtgggtcgaggtggaactcgatcttggggacggcccacaaacctattatcgtgacaccaacgtcatgccgcagtgggcaggttcctccttctaccagctgcgttacatcgacccgactaattccgagaaggtcgtggacatcgaaaacgagcgctactggacggggccgcgctctgacaacgatccgggtggcgtcgacctctacgtcggcggtgtcgagcacgccgtgctccacctgctttacgcccgcttctggcacaaggtcctctttgacctcggccacgtcacctcgcgcgagccgtaccgccgcttgtacaaccagggctacatccaggcttatgcctacaccgacgcccgcggcgtctacgtcccggccgaagaggttgaggagaaggacggcacgttcttctaccagggcgaagaggtcaaccaggagtacggcaagatgggcaagtcgctcaagaactccgtctcccccgacgacatgtgccgcgactacggcgcggataccctccgcgtctatgagatggccatgggcccgctggatacctcgcggccgtgggcgaccaaggacgtcgtcggcgcgcagcgcttcctgcagcgcctgtggcgcctcatcgtcaacgaggacaccggtgcgctcgctacgtccgacgccgcgctgacggacgaggacaccaaggccctgcaccgcaccatcgccggcgtgcgcgatgactacgagcacctgcgcgtcaacaccgtggtggctaagctcatcgagtacgtcaactacctcaccaagacctactccaaccaagccgtgcctgccgacgccgtgactcccctggtcatcatggtcgcgccggtcgccccgcacatcgccgaggagctctggcgccgcctgggccacgacgacaccgtgacctacgaggcgttccccaccttcgacgagaagtggctcaccgacgacgaggtggagctgccggtgcagatcaacggcaaggtcaaggcccgcatcatggtgcctgccgacgccgccaaggacaccatcgccgaactcgccaaggccgacgcccgcgtccaggaactcacccaaggcaagaccatcgtcaaggaggtcgtggtccccggccgcatggtgaacctggtggtcaagtaagggaatctcgacgtatggggcgtgatcgatctcactgagaaatagctgtctatttcgtggccgcgccctgaatttcagcgtatgctcaaacacgagaattgaacctcagtaaggctctgcctcgcttgcagggctgaatgctccggccggcaccttcgggtgccggtcttttttctacccgaagggactgtcttgatggatccacgccgttatgttgtcggtattgacgttggtagctactccattggctttgctgccgtggagttggatgaccaagaccagccaactgagctgctgagcattgtgtctcatctccatgattcggggttggaccctgaccagcaaaaaactgctaccacgcgactcgcatcatcgggtgtcgcgcgtcgtactcggcgtcgttaccgccgcatcaagaagcgtattcgccgtcttgagaccttcctcaatgaccaaggctggaagacactgcccaacgagtactacgaggatccctatttcccgtggaaagcccgcattgagctggccaagcaacgtgtcgccgatcccgcgcgtcagggcgagctattgtcagttgcaatccgtcacattgctcaccaccgcggctggcgtaatccttatcagcgggtacagtccctttattcacctcaaggaaccagcgatgctttcaaggaaatcaaggctggcatcgagaaggctaagaacgttaagttgcctgacgacgcaaccgttgcacagcttatcgccgtcgccgatttcggcgaagaccgcatccggggcggcggaaaaaacaaggacaagaagaaggaaccagagcaggtcaagtctgcactcataagcgcgcggcttcagcagtgcgaccacgccctggaaatcaacaagattttcgaagtccaaggactcgatgatgcgctccgcaagaaagttattgacctagtttttgaagccgaatcccctaagggcgctcaggtaggtcgcgtgggcaaggaccccctacaaccgaacaagtaccgtgctctcaaggcttccgacgcgttccagcggtatcgcattgctgcgctcttgggcaaccttcgcatccgtgaaaacaacgagtctaagccacttaatcccaaccagttcaaggtgctgttcgactacctagtttcgttgcctgctaagaccgagccggagtggatcctggtagctgagcagttggatatcgaccgtggccagctgcaaggtaccgcgaccatcacggacgacggtgagcgcgccggcgcccggccaccagtccacgacactaaccgcatcattgaaggttcgaaggcaaaagagcttgccaagtggtggaaggccgcgccgcaggagcaccgtgacgccatgctcaaggcgctctccaatgctgacaacattgacttagattcgccggagggcgcggttgttcaagcgttctttgtttctgtatccgaagaagagcatgagaagctcgactctcttcacctgccgttcggtcgcgcagcgtacagtgaggacactctccgtcgactcactaagcgcatggtcagcgaaggagtcgatctttacacggcgcgccgtcaggagtttggaatccccgaagattgggcgccgccagcacaacctgttggcgaaccagtgggcaacccggctgtggatcgcgtcctgaaggaagtcgctcggtggttagatgccgccgccgacgaatggggtgctccacagtcagtggtcatcgagcacgtacgtgacggtttctcgtccgagtccgtggcccgcgaaatcgaccgcgaaaacaacaagcgtgccaagcggaacaatgagctgttcaaggaactcaacgacaagttggggaccacaggaaagcgttcccgtgccgacctgtggcggtaccagtccgtacaacgtcagaatagccagtgtgcctactgtggttcaccgattaccttccagaattgcgagatggaccatatcgtcccgcagaagggcgaaggctccacgaacacgcgggacaacttggtcgccgtctgccatcgttgcaatctttcaaagtccaatgccgtattctccgtgtgggcgaagcagtgcaatattcctggcgtgagcctcaaggaagccattgatcgcacgcggcattggaatcacgatcctggacaatcctccaaggacgcaaagaagttcacccaaaaggttatcgaacgtctgcgtcgtacgactcaggacgaacctttggacgctcgttcaatcgaatcggtggcctggatggccaacgagttgcggtcccgcatagcgttccgcttccaggacactgacactaaggtcaacgtctatcgtggcgccattactgcgcaagcacgcatggcagccgggatttccgacaacttgcgcttcgtcgatggcaccggaaaatcccgttttgatcgacgtcaccatgctgtggatgcggccgtagtgagcctcttgacaccatacgttgcacaaacactcgcgttgcgttcaaacatgaagcgtgaatccgaacttaagcgaactcctccgcaatggaaagagttcaccggttccgatgccgctcaccgtgccgcctgggcacgctggcagccgcgcatgcacaagcttggccaactactccaggatgcacttaccaacgaccgcatcccagtgaaaacaaacctgcgtttgcgcatcggtaatgggcgtgcccacgaagactccatcggcgcactggcgacgctgaaagtgtcatccgcaataccggttgaagtcattgatcgtgctgcctccgaagctttgtggtgtgccttgacccgcgagcctgacttcgattggaaggacggcctccccgcaaacccggagcgttcaatccgcgtcaacggcacgcatttcggtcccgacgacgaggtcgagttcttcccggttgctgctggcgccatcaaggtgcgtggtggttacgcagagattagccgcttccaccacgcacgcatctatcgcattgacggtggcaaaaagccagcgtttgctatgctccgtgtctactcacatgatgctgcgaagttccgcaatgaggacgtcttcaccgccgagctgactcaacagaccatctccatgcgccaagcagagcccaaattgcgtaaggctctacgcgaaggcactgccacatatcttggttggatcgtcaccgacgacgaactccacatcaacccccatcccttcaactccggccaagtaggcaatttccagcaggagattggcccgacgacccgctggcgggttgatggattctattcgaattcgaggtttcgcttgcgcccgttgcagctaagtgcggaaggcctaaaagataagaatggtgtgttgaaataccatgcggatgttgcaaaagtcgtggatagtcgtgggtggatcacggccgtcaatgtgctttggggggccggtgacgtcgtcgttgttcgccgcgatgcgcttggtcgggttcggctgcgttcggcagcgcacctgccaattacctggaaggcataacaatgaatacaggatggcgggttattgactgctcggcactcgagggaagcattcgatataggaggggtcgactcgtcatccaaaaggggcccgatgagtttgatgtcccactggctcaggtcgccgtactactcatcggaactaagaccgggatttcaggagcggtactcgccaagcttagtgaacttgatgttgctgttttagtgtgtgattggcgaagcattcccgttgccggtgcattgccatggcgtgagcatacgagagtcggcgcgcgccaacgagcacaggcagaattggcgcttcccaaaaagaaggccgcctggaaggccattattaaggccaagatatacggtcaggctagagctgctgacgctatagtgcctgatacagcacatcaattggcagagattgtcaagtccgtacgttcaggagatacggacaattgtgaagctcaagctgctaggatttattggtcgcttctccgccgagaaggattttcaagtcgtaatcctgggtcccgcagcggaatcaatggtggccttgactatggttacactttgttgcgtggctatggaatccgcgctgttacttccgccggacttgccggttccttaggtgttttccatcgagggcgtggaaacgcttttgcgttggtggatgaccttattgagccatttcggccgatggtggattacattgttttccgagaatggggaacaagcgaagaacttactaaggaactcaagactcagattgcagctggttttgaacggcctttctctcgtagcggcaaaacaattccaacggtgtttgtcgagttcgcacagctttacggaaaatatgtcgagttggatgtgccaacattagatgttcccaaatgggatggcgagctcaatgccagcgaaaggtaaagagccagtgtggtgcattgtaatgtttgatttaccagtaggtaccaaacgtgaacgatcggaagccactcgatttaggaaccaattgcaagaccttgggttcggtcgcgcacaattcagtgtctatgtccaatacttcccactcgctgcaagggtcgcaaacgtagttaagatactcaaaacgcagctcccgcgcggcggcgacatccgaattatcagcgtcactgacgttcagtgggcaaaagcgattcgcttttctcgtgcgcaagaagccaaaacggaagaaactccaacacaaatgaccattttttgacgaagggaccccgaaaagaccccagttaaaggcgatttttcgacttaactgaagtctatcaggggtttcgagaattgaaccccagcatgcatcaacccttggcgggatgcagatgaagtctatcaggggtttcgagaattgaaccccagcgtagaaaaatcttcacgcacctgcacccgaagtctatcaggggtttcgagaattgaaccccagctccgagtctgtgacggctggcccgtttggaagtctatcaggggtttcgagaattgaaccccagctccgagtctgtgacggctggcccgtttggaagtctatcaggggtttcgagaattgaaccccagcagttgccggagcttgcggcggcggaaacgaagtctatcaggggtttcgagaattgaaccccagcacagaaaaggagacaaccgtgactaacagaagtctatcaggggtttcgagaattgaaccccagcagagcgagcagctcgcggtaacgcatccgaagtctatcaggggtttcgagaattgaaccccagcagtaccaggagattaacctggacgagaagaagtctatcaggggtttcgagaattgaaccccagcgttccagctccatccagatgcgatggtcgaagtctatcaggggtttcgagaattgaaccccagcagtccgtgacgatgaagattcctttcccgaagtctatcaggggtttcgagaattgaaccccagcgcacgcaggatggcaaggatacgggtgtgaagtctatcaggggtttcgagaattgaaccccagctcgtgtggggtcatggttctagtgctttgaagtctatcaggggtttcgagaattgaaccccagcgatgaggggcagtgggtaggtgtcctgggaagtctatcaggggtttcgagaattgaaccccagcctgccgcaccgcggtatgtcgctgaactgaagtctatcaggggtttcgagaattgaaccccagcggttgccctccgttatcccaggccatgcgaagtctatcaggggtttcgagaattgaaccccagcgctggtagcgagcgcgccggtcagccaggaagtctatcaggggtttcgagaattgaaccccagcatggaaaagggcttgttccgtcgccgacgaagtctatcaggggtttcgagaattgaaccccagcctcggtgacgcgggggtgaaacttcatggaagtctatcaggggtttcgagaattgaaccccagccatcgacgcactcaacgcgggggacaccgaagtctatcaggggtttcgagaattgaaccccagccttcacgggcgcggttccacacgttcgcgaagtctaccaggggtttcgagaattgaaccccagccctctagctcatctgcgatggctgggaggaagtctatcaggggtttcgagaattgaaccccagcacgtcgcccagtactcgtggatgcggcggaagtctatcaggggtttcgagaattgaaccccagctccacctggactcacgcaactctaagttgaagtctatcaggggtttcgagaattgaaccccagctgatgcagtgattcgtctggtgcgtaacgaagtctatcaggggtttcgagaattgaaccccagcatgggccgaaggttgggatcatggggcggaagtctatcaggggtttcgagaattgaaccccagccggtgcgtggatgatgggcgtatcccgggaagtctatcaggggtttcgagaattgaaccccagcatgtaccaggacgcggttccccgcggtggaagtctatcagcggtttcgagaattgaaccccagcgatgagtctgggttgctggcgcggcttagaagtctatcaggggtttcgagaattgaaccccagctgaggacgcgggcgtactggtcacgattgaagtctatcaggggtttcgagaattgaaccccagcggatgaccgtgatgctgttgctcgtaaggaagtctatcaggggtttcgagaattgaaccccagctggtccgcgatgacggccatctcacctgtgaagtctatcaggggtttcgagaattgaaccccagcctagatagggagcgggacgatgagtagagaagtctatcaggggtttcgagaattgaaccccagctggtggttgacgggtggttggtgttcatgaagtctatcaggggtttcgagaattgaaccccagcagaggtatttacggcggggcttcccggtgaagtctatcaggggtttcgagagctgacccccggtgttctctccgttttcgtagccctgcgtgcttggagtgattgggtctcgcggaaccggctaagcagcggagcggtcctgatggttcgcttgttttggtgagagttggaaatgattcttcagtgggaaaacgccaaaaatggattccaagtgatgcagttgacaagggaaaatagtggcctgacctctactgttgttctcagtgggaattgagaaagctcagtgggaatcttgttgtaaattcccactgagtattacaactctgcacatgaaggtgccactgagggtgtaagtgagtcctaatgaccgaacgcgcccagggcttcgccgacgcgcttgccggagtggatgcagccgccgaggaaggtgccttccagggcgtttttgccgtgcatgcctccgccgccgaaaccggcggcctcgccgcaagcgtacaggccggggatgggttggccggtgtcagtgaggcactggccgtccaagtcagtctcaatgccgcccaaggttttgcgagtgagaaccttgagtcgaacggcgatgaggggaccgtgggcgtcgtcaagcaatttgtgtgggggagcgcaacgaacgatcctatcgccgaggaagccgcgggcggtgcggatgtagttgacttggatgtccttgctgaacgggttgttcagctggctgtcgcgatcctcaacaaccgtgcggagtgcggccggctcgatggagggggcgtcggcaggcgccagatcgttcatctgttggacgaggtcatcgaggttctcagcgatgcaccagtcgatgccgttatccatgaacgcgcggatggccacgtgggtgccgggggagagcttgcccgcgagcttacggaacgacttgtccgtcagatccgggttttgctccgagccggagaagatgaactccttgtccgcgatggtctggttgagcaggaaccacgagtagccgtgccccgtgcggccgatgtgggacagcgcggcgaggttgtcggagccggggaagaggttggtgggaaggcgcgtgccggaggcgtccagccacagcgacgacgggccggggatgatacgaatgccgtggtcaggccagatgggcgaccagttggtcatgccttcggggtagtgccacatgcggtcggtgttgactaggtgggcgccggcagtggcggcgacgtcgatgccgcggccgtccacatgcgcgggcacgccgcggacgagctccggcgggcaggtgccccagcgctgcgtgggccaggaggcgcggactttgtccaggttaccgccgatgccgccggtggcaatgaccacggcggcgccgcggagttcgaagtgcttgacgacgccccgtggggaggcggcgccgcgctccagatcgtcgcagggctcgaggacggagcccttgacgccggtgatgcgatgatgggtggggtcaacgatcagctcgtccacctgatggcgaaagtggaactcgacgcgaccctggcgctcgaattcctccagcggctcacggaagacgcggacaacttcgggcccggtgccccaggtcaagtggaagcgcgggacggaattgccgtgcccggaggcgtcgccggcgccgcgctcggcccagcccaccgtgggcaggacgttgaggcctaggtttttgaggtaggggcgcatctcgccggcggcaaagcggacgaactcccggccccagcggcgcggccaatcatcgtgcggggcatcgtcgtacgcagcggaattctcccagtcgcgccaggccagcgcctcggagtcggtgatccgcatgaacttctgctcgggcgaggcaacgtagaacaggccgccgagggaccagaaggcctggccgccaaggttggcgcggttctcctggtcgaggaagatgacatgcttgcctgcgcgggcggcctcgtagcccgcgaccaggccggccaggccggtgccgacgatgataatagagtgttcgttcacgcctattaatctacggcattattggtatgaattcagcgctggcgctggtcgcagtgggggagtgctgcctaactcacactcactccggacgaggcgggggcaccggagcgcccttggggggaagcaccttcgggtagctgcccgaggtgcgtactggatccttgggcgcgttcccggtggcatcggcaggtacggtgcttgcattcgttgcctcgcgccatggggtcggatcccagttggtggcaaccagcttggtctgcgagaaccaaccgagagcaagtactgcgaggccgacgagggcgatcagcacgaggcccacggcgccgtcggcacgcgatgcccaaccgatgagcatgccgaaccagccgaagtccgcatcaccgaaggtggtgttggcctcaccgaaggaacccagcacgcccagtaggaacgcgggaaggaacgtgatgaggagaccattggcgaggccaccaaagatggcgccgcggcgaccgcccgtggcgttgccgtacacgcctgccgcgccgccggtgaagaagtggggaacgaggcccgggaggatgagggctacgccaaacgccgggttgagccacgagctgaggatagccaggccgataaggccgccggtgaacgacgtaataaagccaatgagcacggcgttttgggcgtaggggaagacgataggggcgtcgagtgcggggatagcgccgggaacaaccttcgccgcgatgccttggaaagccgggacgagctcacccaaaatggtgcggacgccgaacaagatgactgccactgctacgccgaattgcaggccttgggtgaaggactgcatgaggtagttgccaacgttggtggccccaccttcgaaagccttgaaggcctcttccgtgccagcacgagcaataaagagcagcgccaaaacgatgtacatcaacgccatggacagtgcggtggcaaccatggaatcgcggaggaaccgcaggccctccggaagcttgagctcctcggtggagggcgactgctttggccccttgccaccgacgagcttgccgacggcgcctgccgcaacgtagcccgcggtgccgaagtggccgatggcgatagagtcatcgccggtgacgcgccgggtccacgggtgggcgatggcgggcagcgagaccatgaggatgcccaaaaggaccgcgccgagcccgatgacgacccacggggagtagcctgcaggcgccatgaccatcgtgagcatggtggccatgaagagaacatggtggccggtcaaaaagacgtagctcatcggggtaaaccgagccaggaccagcgacacgacgaagccgaggatcatgatccaggccacctgagaaccgaactgttcctgggcgatacccacgatggcctcgttggtgggcaccacaccctgcgcgccggtggcgccttgaatcatcgtgccgagtggttccagcgaggcgacgacgaggttggcgccggcgccgatgaggaggaatccgagcgtcgccttgatagcgccacccagcaccttgccggttccgcgtttcatggcggccaggcccacggcggtgatgatgccgatgaggaatgccggaacggaaagaatctcgttgacgaggaagtttgcgattgaaatgagaatgtccatgactgttccttagacgtcgtagagctcgcgcagggcggcatcgacttcgatgtgagacgtgaaatctttgatgacataaactggaacgccaacgtcacctagcgtggcagcaatctctccggaggtgaggaggaaatcagcttcctttgctcggcctttggcggagatagtgtctgttgcttcgacgttgatgagcgggccccagccccactcgtccaagacctgttccagggtgttcttgaggaataaggaagtgccgaggccattgccgcagacggtgagtacctttcctttggattccacggagtcggcagcggtgtcatggtgcgcgtctacgcttgcggtggcggcggtagacgcaacggacttcttgcgtgcttgctcttcgagcagatcgcggagttcatcttctgaagtcaccgaatcaagacgctgccgaatcgcgggtttgcccaagagtcgggcgagttccttcatggcagccaagtgcgtggaagcgtcttcggcagccagggcgacgacgagcgtgaccggatcattggagtcgtgcccgaactcgactggggagtccacgcggagccaggacatggcggtgcgatgaaccgcttccgatgggcgggcatgtgcaaaagcgaagccgggcgcgacgacgatataaggtccgttttctttgactgactggatcatcgcagtggtgtagtcgctggaaattgcgccagatcgttcgagcaggtttccagcagtagaaatagcttcctcccacgtcgccgcggagccgtgcaattcaacggctccttgggcgagcaggtcattcaaggtggacataggcggtccttcctagtggtaggggccggtgcttgttattaccgggttgttactaatggtattaccactgtggagcccaatgtcaaagcaggtcagttaattaagtgtgggctagggcctgagtgtagagcggagtgattcaaagtctttcaagtgcgaaagcccgttttctccagtccgatcggcagcttcttcacataatgcctctacaagcgccattgctggaaccagggtgtctgagggcccgtgggctgcgactctcgctgaaaggactacatcagcaaaggttgcgataggggaaagccacctatcagtcaccaatactacttttgcatttcggtcttttgcgagcttcgcacgccgttctgtcgccacatcgtagcgccggaaatcaaaggtaacccacaaggtttttgccgaaattccattaatcaccgcggtagccgcgacatcgttacttggcagagtgaccacttgcgcccggaaaagggagagttgcgcggtgaggtgatgagccaggagtttagaaaagtctccgccatcagcgataatgggcatctttgaatttgaaagccattcgatggtctggtggacttcggactttcgcagatgttcgaatgtagctttaatgccttcgatgtagctatcgagtgattgcccgagaattgagtcctcggttcctggtggctcgacatcgtcagtgtgggagttccctagcgtcgcaagcgaggcagcagaattttgcctttcctgcagttcttcttttatttcctgttggaattctcgaaagccgccatatccgagggcttgcacgaaacgtaccgttgtcgctgaactaactccggcggaattggaaagatcattgacactttccaaagccgcaaaagggtagtttgtgagcagtgaacgtgcaacacgcttttcagaggaagacaacccttcaaaggcttgattaatcttttctgtgacacttggcttttcgatcatgaaggctttatctctatccgtttattgcagtgcctcggcagcagccgcgtagccagcgataaagcactgcgcagttctaagaacagcttcctctgggggaaggaacttggcatcgtgaagcgaaggaatattacccgtttgtgtccctacaaaacacatcaggctgggaactaggtcgccgtagtaagaaaagtcgtcagcgcccagtgaacgcatcggctcgaacgttgagaggccgattgcatgtgcagtgtgcacgaaatggtctgcgagattgtcgtcgttaattaaggcaggctccccgggtgaatattcgacattggcagcacaaccaaaagctttagccgtggcgcgagagaagtcctcaacggccgatactatagcctgattggtctccctattaggcccacgaacagtagcgagaatagtaccttgtccaggcaggacattcgcggcgccggaaccgacatttattgacccgatgctcacgagggcgggaagcataggatcaaccgttctacgaacaatctcggcgatagccgtagctatctgtgcggtgcagaccgcgacgtcgtttgctttgtgagggtaggccccgtgcccgccttgtccttgtacagaaatcgataattcaccagcggcagcattgacgaacccgccacctgaagaaacagaacccagcggaacggcgggatgaacgtgcgctcctattgcgcgtttgacgcggtaggcgtcaaataccccagattcttttatatctagggccccagaggggtaagtctcttcacgcggttgaaggaagggaacaagggtataagggagcgcgagcttcttcgccgcacgcaccaccgcagtaagtgcagctagatgtacgtcgtgaccgcaggcatgcatcgcgccattgatggacttccacgccacaggcgtttcttccaagaccggaagggcgtctagttccgcacgcactgcgatggcggggccgtctgatggcccaagcgcggcaatcgcgcccgtccccgcgacagtctcgaaggtgagctccattgcttccgtgacaaggtcggttgttgtttgctcttg

SEQ ID NO: 3974 - DNA, 23303 bp, synthetic construct
  misc_feature 1..23303: note = Synthetic
  source 1..23303: mol_type = other DNA
ttccaccagtcattccggtccatcccgtaccgatcggatacccacgccctcccttcacccgcggatcgccaagggcaccggacttaattccggaatagtcgaaggcctgcgtgtaaacgacccacctagcagcttctccgaagccaacccatgaccgcgcctcacctgcacgcatcgtaaagtattcgttctcggcctccggcacaattctctgaatctgtgaatgaccaccgctctgtgtagccagatcggcaacctgcatgaagggagtctcagggtgcaggaggtcgaagcgatcctcgtgcaacttcaggtactcgagtactgcttcatcaggactgttgtttcgtgccgattcttgctgtgtttcgtaccagtcaatcactgcatcgatggcatcagcgtcgcgaaagtcggcatccatttctgggccatgcgcgcgccaatagattgctagcaaaagcctaacaagagcgtaggtctgaaccggggaatccgcccggacctcttttacgggattcgagccgtcaaagacttgcctaatgcccaagtccgcttgctcaccgttctcgagaacgcaaggaatccatggttcgtcgagaagcgaaaaagtcatttctgtctccttcagtaagggggttccgttgaagctaatgaaacaatcgataaagagattcttaatccctattttcggttagaaggatcatttccgctcaacttcatggagcccaatttcgtgagaatattccaagacaacttttcccagcgtgatccggttattttcatccagcctgagagctacttcccccttcaaaagggggcttttcgcccacccctcgggggtatcaagctcaagctgggtgatggtggcctcgaagaccgactcatacctcgcgaatctgctgggcaacctcagcgaagaggatgcgagctcgagggcttgcgggaaatcaagaatctccccatctatgtgcatggtctcatcactcgagctcagggcgcggtaaccatagtcatttccgatgatgggaatgacctcgatggacgggtcggtgtcacggacctgggctcgtgcgcgaatgtcctcctgatccgccctctgccgaggcccgattctctcaaacagcgcaccaaggttcttcgcgtctttaggagcaggcagttgaaagacccccgcacgttgaagcaattgcgcacgatcggaaacgcttgtgtcgaccgcctcttcccatgcctttctccactcctcgggaatctcactccttacacgagaagtgtcgtagacgaactggaccgaatccggaacatcctcgggcctcttgaagggctttgcgccaaaacgcgaggtcagcaggtaatacgtccccagaaggatgctgttgtcgtagattgcttcggtgccaggatcgaactcaggtgtcggagtggtccccctgataccgcggatcaagaccattggcgacttcatacgctccggtcggtcgccgctgtgccctgaatgcctgtggactcttcctaggcgttggattatcaagtcgatgggggctatgtcggtaatgagcaggtcggcgtcgatgtcgaggctctgctccaggacttgtgttccacacacgataaggcggtgcgggcggccgctgcctcgatgagacttcttgccaagcgcttgaaggaggcgttcctctttggccgaccggtcattggccgcgaatgcggagtgatgaagctccacctcgcctgggaattcggcggccaaagcttcaaagctttcctgggcgcggcgaattgtattcgaaatgacgaggatacagccaccatcctctgtcgcagaccgaacctctgctaccaaggtggttaggtcatcttcgatgaaccggatctcagcctctgcgtcattgccacgcggagcaacctcgatttccgagagtcccttctcactggcaatggtgatgagtggatacgccgtcgattgaggcatcggcagcttagacttccacgctgatgaatacgcctcaacaaaggaacgcttgctttccaacgggagggtcgcactgagcatgatcaccgaggcgccgtattccgcgagccacttgagcgtggtttggaggtaggagctcgtgtacgcgtcgtaggcatggcactcgtctatgatgactacctttccggacaacgcaacgtgccggagcatggagtgccgcatctgcagcgccatcatcaaaacctgatccaccgtaccgatgacgaagttggagagcatccccttcttccggccactcagccagcttcctgccaccacgtcgccacctgccttgtcatcgtcaccgatgttccgaagccgaagattgttgtagctgctcaggaggcgattcttcgaatgtgccaaataaagagagctgatggtatcgggcggagtaattgtcttcgcccagtccttgaagcgatcaaacaggccattggcagtcgccatcgtcggggcagcaagcaccaccccttgggctcctgacttcttacccaagatttcggccaccttgaaggccgcctcagtcttcccttctccggtcggggcttcgatgatgaccaaggcgggcaccgcagcttcgacagccgcgcgaagcgcctgaacctgaacttccctggggcttgcgtcctctggccatccaaaggaagacaaatactcggattttggatcccggatgaccaattcgcagacttctcctatccacggatgggtcaactcgacctgggccattccttggatcacacgggatgcttgatcccctcgtcgttgcgtcggaaatgcttcggtgttcgaggcgatccagtcgcacatcacgacgaatcctgtgaggacttcaatcgcgccggcaggcaaataatccagtcgactaagcaggtcagaaatccctgtgacctgcgcaagcgagtcgagcagctcacggtgcaccgctttccagccggcggggtagtcgtcaacaatatcccttaccaggcctcgcgtcgatgcatctgcaggcagaccatgatgcgcctcggccacagatacgaggggcagaaccttgcgccggcgcgcaccattgttgcagagccattcgagctggatcgcgccagagaacgccgcgtgatagggcttgttttgtttttccagaagatccatgttcactggcagccccgcatccatgacggaatcgatgagcgaacgcttggaggtgggatccacgagcttttcctgaaagcagatggaagccttgccgatatcgtgggctgctgcacaccagatcgctaggactcgaacctcttcccgcgagaggctcgtcgccttgatgaggaattctttcgtctgatgagaaagatagttatcccacacgtactcggcgaccgcgccagaatccgccatgtgctgggcgagattcatcggccctgactcgtcgcccgacttggctaacactgaccttgtctgggcacctaaagcagttgcaaacatttcccaattcatcgaaatcctcaatttaaataagaaattaggttgtttctgttttcgagtataactcacctctcggtaggatgtagcctcgagaagaacaatttctctgcagtggcggagatgagccgttcttttttaagttgccaggctggtttttctcaccttccccgcacttgcggggcccaaagccgaaactgaatcttgatctcatcacaatgtgtgaacttagccatcccccacgacactcgggtatttgatcgaaaatccttgcgtaattcgggttcacgccacaccgcaatagtctgaatttatagcctgaatttcatctctcaagttaggaaacaatgctcagcgacaaattggtgaaggttctttacacagcgggaacggtcttcgacaacctccgctcgagcgagctttcgacgaggtccttcctccagagcggcgatgactctggcatcgtttctcgcgcagaccttgacctactcaatgacctgcgagacgcagcagagattgcggtgcaccacaagagcgttcaatcaccggtgagcgaggcaatcgtgaacgagatgcatcgggccatgacccgatcggccgcgctgcgcccgggcaagctgcgtacgaaagagcagaacatcggtgtgtccacttcctatggtcgccacatgccaccggcgctcgaaccaggggaaattgatggactgcttcgatccgcgctcactcaaggcgaccgtcgtcgacaagccgcgtggatattcgtgctcctcgccaaggcacaaccatttgaggatggaaataaacgcacggcattgctcaccgccaacatccatcttccgctgtccgaatacctttgcgcaccatttgatccagatgacatcgaggtatcaaggaagtttcaagatctcctcgcccgagcctatgtcttcgacgagatcgacccggtcgttgactatctcctagaatatgggctgatcattggggaatgatgggcgatccgtcctcgtgtcaacgatctgacgtggcggaaccacgctgcctcgtcaaaagcagcatgaccagcgccgccacctgcatcgctaggcagacggcaaccagcccggcggtcgacttctcgtagaggtaacccaggagcgtgccgcccacgaaccaagccgcgccgtagaaggcggcgaacagcccgtaggcggtggcgcggcgctgtttcggcacgaggtcggcaacgccagcgcgcagcgtgctttcctgcacgcccatcgcggcgccccagatgagcacgcccgcgatcgccgtccagaaaccgccgctaaacgacagcacggtgccaagcccagcgaggattggcaaggaaaccagcaccttgatgccgatctggtcgtagtacttgcccgtgatgagggcagcgatggcgtccacgcccatcgcgatcgcgtagatgaccgggatggaggccaccggcgcgatgccacgctcggaaaggtggtagccgatgagcccgaaggtggcgtatccggccatcgtcagcgcgacgaagacggcgtagcgccagaagtcgggcgagagcgcaaccgcgtcgccctcggtttcctcgaccgtcgcctcgtagcgggcgggctcgggcaccttcctggccagccagaacaggatcaccatggcgatcgcaccggggatcgccaggatggcgaagcccgtggagtagccgcccgttgcggccagcaccgccgcgaccagcagcggcccggcgaacgcaccagtctggtcgagcgcctcgtggatggcgaaggccttgccgcggccggtctcgctgccagcgtgcgagatgagcgtgtcttttgcggggctgcgcacggccttgccgacgcgctcgagcaggatgagtgccgatgcgcccgcgacaccgagcggcagcgccagcgccgggaccgccgcggcggtgagcaggtagccagcgatcgtccacgcccagtagcggtgcgtgcggtcggcggcgggaccggagaccagccgcagagccagcgcggtcgcctcccccgccgcggtcaccgcgcccaccagcgcggcgctcgcacccagcgagccaaggaagggtcccgtgatcgagcgcgccccctcgtagaccacgtccatcagcaagctgacgacgccaaaggtgacgacgaacccccagggcgaaagccccatcttcttctcactcggcgcgggcatactcccaagtctattgccgcgggccgagcgaaaagcagactgtctccaagcacacgaaaaggcacttcccgaggctcggcaagaacctcgaaaagtgcctttgacctgcgcgcccccagcaggattcgaacccgcgaccaatcgggtagaagccgactgctctaatccactgagctatggaggcatgtgggaaattccaacctttacaggttagcgcattccttcctcaccaatgaaaacgcgcccggcttccccggggtcgccccgggagttagctcgcgcgccgcgtcggcacgatcgagaacgccagctccaccagcagcgcgagcagcaccaccacgatcgcgccgccgaccatctgcggatagtcgcgagtcttgagacctgcgaagatgaacctcccgagccctgcgtcggcggtgtaggcggccagggtcgcggtggcgatgacctgcacgcaggccgagcgcagcccgccgaggatgagcggccacgcgagcggaagctccacctgggagatctgctgccacggggtcatgcccatggcgcgcgcggatttcacaacgagcgggtcgacgctggccacgcccgcgtacgcgcccgccaaaagcggcgggatcgccagcaccacgagcgcgatggagggtgcgagcagcccgatgccgatgaacagaccgagcagggtgagcaggccaagggtcgggatcgcgcgcccggcgccggccaccgcggctactaccccgctaccgcggccggagtgcccgatggcgatgcctatgggcagcgcgacgagcgcggccacggccaccacgacggcggtgataccgaggtgttggactaggcgcaaaaggatgccggaggtgccggtccagttgtggacgtcgctaagccaggaaaacgaggagctgaggagatccatcaggcgcccacccctccccgagcgcgggtccacggggtcagcagtcgcccgaggaggacgaccatggcgtcgacaagcagggctagcacgacggtgaggacgagccccatggcgacctcggccacgatgttgcgctggaagccgtcggtaaacagggtgcccaggctcttgattcccacgacggcgccgacggtgacgaggctgacggtgctgacggcggccacgcgcaggcccgcgatgatgacgggagtggccagcggcagctcgacgttgaggaaggactgccagggcgagtagccaaccgcgacggccgaggtgcgcgcggcgggcgagaccgcgccgaacgcgtccgcgcagctgcgagtgagcacggcgacggcgtagatgcttaggacgatcaccatcgtcgcctgcgagcgcatggacgtgcccgtgatgatgggcacgaggatgaacatcggcagcgaaggaatggcgtacagggcgctgatcaggcccaacagcgcggtgcggccgagcgagaagcgctgcgcgatccagcccacgggcacggagatgacggtcgcgatggcgatcgcggagagcgccagccacaggtgcgtgagcgtcagctccgccatgttatttacattgtgcgaaatccaattcattcccgcaccgcccccaccacgcgcccggttccatccacgaccacggtggtttcgccacgcttttcgacgctcagccttcggctgccggagttgatcccgaggaagtccgccacgaactcgcccgcggggtgagcgagcagatccgcggcgctgccgcgctgggcgatggtgccgccgggacgcaggacgatgatgtcgtcggcgagcgcgaaggcctcgtcgatgtcgtgggtgacaaacaggacggtcttgcccagctcggcctgcaggcggcggacctcctgctgcagctcccggcgcacgatcgggtcgacggccgagaacggctcgtccatgagcagcacgttcgcctccgcggcgagcgcgcgggcgacgccgacgcgctgctgctgcccgccggagagctgcgccgggtagcgggtgaacatggccgcatcgatgccgacgagctcgagtagctcccccgcccgcttgcgcgcctcggccttgctggcgccggcgagccggggcacgacggcgacgttgtcgatggcggtgcggtgcgggaaaagcccgccctgctggaggacatcgccgatcgagcgacgcaggcgcaccgggtccttggtggccacgtcgacgccgtcgaccagcacctggccgccggtcgggtcgatcatgcggttgaccatggagatcagcgtggacttgcccgagccgctggagccgaccaacacggtggtggtgttgtcgggcacggtgaaggacacgtggtcgacggcggtggtgccgtcgggatagaccttggagacgtcgcggaactcgatcatcgggccacctcgccaaggcgtgtgcggcttgctgcgtgacggtaaatgatcgtctccttatatatgcatcgatggcaatgtgcgccccagcctacccgccgcattctgcgcggcgcgagaaattgcctatgatgggtcggtagttggggatcgattgcgacacgggagcgaagaacacgatgaagaaaaccacggccgccgcgctcttgctcgccgccgccaccctcgcggcggctaccaccgcctgctcgaaggacggcgaggaatcctcgcccgccagcagcgtggcgacgtccaccacttcctccgcggcaccgaccaccgaggcctccgccgtcaacaagggtgccgcccccggcggcgtgggatccttcacgatggacggcccggccgccatcaccggcgccacctacgactcgatgccctacgagctcccgctcaaccccgcgggcccgcaggacacaatggtccgctgggtcaccggctgggggcagtcccccaccacgcccgagaagggcaccacctacgtgctcggccacgcgtggggccagcagaagctcgtgttcaacccgatctccgagctggtcactgccaccgccgacatgaacgccccggtcaccgtccccggcgacgagggggtcaccgtgcggcggttcaactccaccgcgctcaacggctcgaagatcacgatgtcggacggcaccggcgcccgcgagtgggtcgtggacaccgcttacctcgtggacaaggacgaggccgcctacgatacccagctggtcgacgagaccatccccgggcgcatcgtgctcatcgcctgctcggtcgacggctcccaggacctcgactacaacgtcatcgtggaggggcacctggactagggcggtcgccgtgggcgtcgaaaagcgaatgcacaggtagactaggcggcagttaaatccctgaccgaaaggcccacgccccatgaccctaccagctcccacgatgaacgcccgcgccgtagtcaccggcgccagccaaggcatcggccgggcgatcgcccgcgacctcgccgcgatgggctacaacctcatcctggtcgcccgccgcgaggaaatcctcaaggagctggccgacgagctggagaagaagcatgccatcgtcgccgaggtccgcgcctgcgacctcgccgacgagaccgcccgcgcagcactcatcgaagagctccagggtcgcgagatcaacatcctcatcagctccgcaggcatcgcctccttcggccccttcctcaagcaggactgggggtacgagaccaagcagttctcgctgaacgccaccgccgtcttcgagctcacccacgcagtgctgccgggcatggtcgcccgcggcaccggcgccatctgcaacgtcggctccgtggcgggcaacggcccgatccccaacaacgccacctacgtgttcaccaaggccggcgtcaacgcgtttaccgaggccctgcactacgagctcaagggcaccggcgtcacctgcaccctgctggcacccggccccgtccgcgaggcggagatccccgccgaggagcagtcgatcgtggacaaggtggtccccgacttcctgtggaccacctacgagtcctgctcccgcgagaccctcgaggccatggccgcgggcaagcgccgcgtcgtgcccggacccctgtcgaaggccatgaacgtggtctcccagttcgcgccgaccgggctgctcgcacccgtgatgggggcgttctacaagaagatgggcgagtagtactgcccgtgtcaatccccagatgagggtaattttccgtttttctgcgacatattgcaatcgcctactacaatcgaaaacgaactgaacctcagtaaaacattgccccgcttgcagtgttgaatgctccagccggccgcctcgtgcggccggctttttcataaaagaaaggcccaccatggtctccctcaaatatagagtcggcattgacgtcggaaccttctccgttggcctcgcagctatcgaggttgatgagaaagacatgcctgtgaagatcctcagcgcggtctcccacatccacgattcggggctcgacccagaccagcagcaagatgctgtcactcgtctcgcgtcaagcggcatcgcacgccgtactcgtcggctttaccgtcgcaagcgtcgccgtctcgtccagctggacaagttcattgaggggctcgggtggccggtcaaggagtttgaggaatacagcgatccgttcatgccctggcacgcgcgggcagaactggctgcgggtttcattgaggatgaggcagagcgaaacgagaagctctccatcgccatgcggcatatcgcgcgtcaccgtggctggcgaaacccgtattcaaaggtgtccaccctccacactgaggttgcacccagcgaggctttcctcgcgatcaaggaggagattgccaaagtggcgggcatcaagatccctgacgacatcaccgtcggccagctcgtcgctttttgcaacctaggcaagcaccggctccgcggcaagggcggcgtgctttcttcacgcctcctccaaagcgaccacgccaatgagatcatcgtgatcggccgcatgcaaaatctcgattcttcgctggtgaagcagcttatcaacgaggtgtttaaagccgagtctccaaaggggtctgctgcgggacgaactggtgtggatccgctccagccctccaagaaacgcgccctcaaggctaccgaggagttccagcgttaccggatcgcctcgttgatcggtaacctccgcatccgtgagggcagtggacaacgacgcctgacaaaggaggagacctccctcgtcttcgatcacctcatcaacctcaagccgaagtcggagccgtcatggctggctgtgtgcgagatcctgggaatcgatcgcggcaacctccgcggtaccgccacgatgaccgatgatggcgagcgcgcgggtgccgctcctcccgtccatgagaccacgcgccgtatcctcaactgcaaggttaaacctctcgtagcttggtggatggaggctaatgccgaggatcgctacgccatgattaaagctttggccaactccgaggtcgatgacttcgactcacaatcaggcgccaaggtgcaggccttcttcgccgagctttccgacgaagataacttgaagctcgattcactccacctacccatgggccgagcggcctactgcgaagatactctcgcacgcatcaccaagcgcatcctcgaaaacggcgaggacctttacgaggcacgcctccatgagttccaaactccggtcgattggacaccacccgctcccgagatcggtgctccagtaggcaacccagcggtcgatcgcgtcctcaaggccgtgtcgcggtggttggaaaccgccgtcgatacttggggagtgcccacacacatcaccatcgagcacgtccgcgacgcgttcaccagcgagagaaaatcccgcgaaattgaccgcgatcagcaaagacgcgccaagaggaactacgaggtgttcgcagagatggagaaaacactcggtgttcagaaccgcaatcgctctgatctcactaggtacctcgctgtccagcgccaaaatggacagtgcgcctactgcggaacgcccatctcgtaccaaggcgagggcaaagacaattttgagatggaccacatcgtgccccaagctggcccaggttcaaccaacaagcgcgagaatctcgtcgcggtgtgccctagctgtaacaggtcaaagggtaacgttcctttcgccgtttgggctgcgaaatcgaccaacccgaatatctctgtaaaagcggccgttgagaggactcgccactggctggcggatcccggcttgaacgcgacccaatttgccaagttccgtaaggctgtttgcgaccgactttcccgcgtttccatcgatgaggaaatcgacgcacgctccatcgagtcggtggcatggatggccaatgagctccgcgggcgcatcgctcagcgttttgccaaggacgggacaaaggtcgccgtctatcgcggtgagctcacagccaaggcccgcggcgcatccggaatcagcaagcgcctcgtcttcctcgatggctatggcaagacccgctttgaccgacgccaccacgccgtcgacgcggcggtgattaccttcattaccccgacgatcgcgaccatcctggctcagcgtgattcgatgcgcgactcccagaacctccttcgcgagcctgctcagtggaaggaattcactggcctcgaagaaaaagaccgtttcatgtggacgcggtggaagatccaaatggagaagctcagcgtcctactcaacgaagctctcgcaaacgatcgaattgttgtgatgtcgaacctgcggctgcgcctcgggaacggctccgcacacgaagacaccattggcaagctgaccaagctccacgttggcgacgctctttcggtggcgatgatcgatcgcgcggcttcagaagcactgtggtgtgcgcttacccggcatcctgatttcgaccccaaggaaggtctccccgccgatccgagccgacagattcggattcacggcacacgcctcggcgccacggatgaaatcggattcttcccagtcaacgcgggatgcattgccctcaacggtggatacgtcgagctcggctccagcttccaccacgcacgcatctacaagatcaccagcggaaagaagcctgtttacgcgatgatgcgcgtgtacaccgtggacctgctcccctaccgcaaccaggatctgttcaccgcagagatcaagccgcagtctatgacgatgcgccagtgcgagcccaagctccgcaaggcgatcgctgaggggaacgccgaataccttggatggcttgtcgtcgatgacgagctgctcattgacccgactccattcagcgacggtcaggttggaaacgcacaacaggagctcgggccaattcgacgatggcggattgacggtttccccttgaattcaaagttccgtcttcgcccaatccaaatgagcacggaaggcctcgatctgaaagcaccatcgggggttaagaaggatcgttttggccccgatgtgcgcaaaatcgtggactctcctggctggcgacctgcggtgaataagctcttctccagcggaaaagtaactgtcatccgtcgagatgctctgggacgtccaagactcgagtcggctgcacatctcccgatcagctggaaggtcgagtgatctaaatgaacgctggctggcaggtgcttgatttcacgagtttcaagggtacgatttcctactctcgaggtcagctccgtgtacttccaggggatagcgatgacgggatcgaagtacctctttctcctgtggcggtcgtcctcgtcggggtctcggcatctgttagcggagccgtgctttctaaactgagcgaatacgacatcgcacttttggtgtgcgattggaggggaatcccggtcgccggcgcatgcccatgggccgaacatacaagaattggtgcccggcacctcgcgcagtctgagctctcccgcccgcgcaagaaggctgcttgggcgagaattatttctgcaaagatcaaagggcaagcttccacgctaaaagcacttgacgtccctggggctgctgaactcattgcaatgggaaatcgggtccggagtggtgaccccgacaacttggaagcacaggccgctcgaaggttttggagtttgatctcggaaggcaaagaattttctcgcgtgcctggtgccgctgccggatcaaccaattcagcgctggactacggctacaccatcctgcgaggctttggaatccgggcggtagcttcggctggactatgcccttcactcggagtatttcaccacggacgctcaaaccagttcaatttggtagacgatctcatagaaccgtttaggccggtcattgatcactccgtgttttcaaatgaatgcttttccgaggatttgaacaaggaatcgaagcagcttctggttcaggccgcgaacagccagttttctcgagatggagaacccgttccaactgctatgtccaagctcgcccaaaactttggtcgatacgtggaagacgaggtcgggtcattagacgttccgatttggaaaggcccattcgatgccgagaagggatagtgagccagtgtggtgcgttgtaatgtttgacctcccggtgaagaccaaggcggaaagaaaggctgctactcatttcagaaactcgttgttagacatcggcttctgcatggctcaatacagcgtctacgttcagttccttccattagcttctcgtattcacgcattagtaaagagcatcaagcaggatcttccaccaggtggcgacatcagaattctttccgtcactgacaaccagtggtcaaaaaccattcgattctcaaatgcaaaaccggaacaaccagaagacgcgcctagccaattgatgattttctaggacaagaaacccctgataactccagcttaggcggccattttcgggcacactgaagtctaccaggggttttatgaactgaaccccagctgatccaggaaggcccgcttgcggacgtgaagtctaccaggggttttatgaactgaaccccagcccgtcgcggaccttctgcacgccgacgagaagtctaccaggggttttatgaactgaaccccagcgggcatgaggaggattgcgggggagactgaagtctaccaggggttttatgaactgaaccccagccggtgacccacaccatgtaccggtcatcgaagtctaccaggggttttatgaactgaaccccagctaaacctagcgcgggagtaaaactccacgaagtctaccaggggttttatgaactgaaccccagcagcgctttcacaatgcgggatttcctacgaagtctaccaggggttttatgaactgaaccccagctgcgccttggtcggtcagtgctaggagggaagtctaccaggggttttatgaactgaaccccagctgccgggggtgcggcacagactgatggggaagtctaccaggggttttatgaactgaaccccagctgtcgtggctgtcagtgtgtgggcggtttgaagtctaccaggggttttatgaactgaactccagcattgacagtgctggtcttcttgtgctagagaagtctaccaggggttttatgaactgaaccccagctggtgagccacgacgggatttcttgttggaagtctaccaggggttttatgaactgaaccccagcattcagacccatcaaagtaggcatgcttgaagtctaccaggggttttatgaactgaaccccagcatatccagcatcagaagcgcgctcaacagaagtctaccaggggttttatgaactgaaccccagcgaacgcgtggacgggattcactaccggcgaagtctaccaggggttttatgaactgaaccccagcgcaatggggcttgggtgcgaacgcttgtgaagtctaccaggggttttatgaactgaaccccagccatgtggcggcggcgtgttccttggtcggaagtctaccaggggttttatgaactgaaccccagctcgaggagatcacggccctagatcgtaagaagtctaccaggggttttatgaactgaaccccagccgctaaccccgtggcgcacaccgagctagaagtctaccaggggttttatgaactgaaccccagcggtctttggaatgcaaaaaccgccgtgagaagtctaccaggggttttatgaactgaaccccagcccggtattcctatatatgcaaaaaagaagaagtctaccaggggttttatgaactgaaccccagctcatgcgctgcatgagccattcgtaccggaagtctaccaggggttttatgaactgaaccccagcatggctattaccaccttcattccgaagcgaagtctaccaggggttttatgaactgaaccccagccgcgtcaatacctccctacttaaggccggaagtctaccaggggttttatgaactgaaccccagcttggcgccgcgtgatgttccaccgcctacgaagtctaccaggggttttatgaactgaaccccagcggtcatggcatacctaatggataagccagaagtctaccaggggttttatgaactgaaccccagcgaatcagcatgtcattgaggatctcgtggaagtctaccaggggttttatgaactgaaccccagccgctgcgacacccaccaatgatcacccggaagtctaccaggggttttatgaactgaaccccagctgctagggatgcggcttttgttacgagggaagtctaccaggggttttatgaactgaaccccagcgtccattttgcccgaagatagcgagcgcgaagtctaccaggggttttatgaactgaaccccagcctgattcatctcaccagtagtcccggccagaagtctaccaggggttttatgaacggaaccccagcgggtgggaaacaacagcatgttgccccggaagtctaccaggggttttatgaactgaaccccagccctgtgggcctttttcacgaagaccgaggaagtctaccaggggttttatgaactgaaccccagctgggggcggcgactgtttctaatacggggaagtctaccaggggttttatgaactgaaccccagcctctcaaccacatgctcaccagagttatgaagtctaccaggggttttatgaactgaaccccagcgacatcctcgcatcagctagcttcttgggaagtctaccaggggttttatgaactgaaccccagccgagtggctgggattgggtgaagacccggaagtctaccaggggttttatgaactgaaccccagccgaatgatgcgaagatttggtgtgtgttgaagtctaccaggggttttatgaactgaaccccagcagcgggtgggtgacgatgttgtctcccggaagtctaccaggggttttatgaactggaccccagcacccgcagacggttagccggttcatgctgaagtctaccaggggttttatgaactgaaccccagcaaccaaaaggcgatgaggaccgtttgccgaagtctaccaggggttttatgaactgaaccccagcaaccagaaggcgatgaggaccgtttgccgaagtctaccaggggttttatgaactgaacccagctggttcgcatcgagatacccgactaaaactactagcggaaattctcgccaaagagttaggacatctaggtttacccgctgaggaaaacagacgaagttgggttgttggcgccggttcgaacaggattagactattccccatgaccgaacccgtagcccccaagaacgaccgcctcgtctggatcgacctcgagatgaccggcctcgacatccaccgccacaccatcgtggagatcgcggccctagtcaccgacgccgagctcaacatcctcggcgagggcgtggacctcgtggtgcacgccaccgacgaagagctggcggagatggacgacttcgtcaccaccatgcacaccacctcggggctcatcgacgagatcaaggcctccacgatcacgctgaaggaagccgaggacgcggtgctcaaactcatcgaggagcactgcgacccggagcacccggcgccgctcgcgggcaactcgatcgccaccgaccgctccttcatccgcgagcagatgccgcggctggacgaggcgctgcactaccgcatggtcgacgtctcctcgctcaaggagctcgcgcgccgctggcagccgcgcgtctacttcaaccagcccgacaagggcatggcccaccgcgcgctcgcggacatcatcgagtcgatcagggagctggcctactaccgcgaggccatgttcatcccggaccccaccactgagcaggccgaggcggcgaaggagaaggctactggcctctaccagcagtttttgtaattcagaatctttgggttaatattgtcctcgctgcttaaacgcggtgatggtggctgtagttcagctggtagagcaccaggttgtgatcctgggtgtcgcgggttcgagccccgtcagccaccccaaatagctcccctacctgtgaaaacaggtaggggagctttttatgcctaactcggttcaggggttaagggttaaggctcaaaatgtgtgtgtggattccgtgatttagcggtgctgagcaggcagtttcggggataaatagctttcagagagctattcgaccgccaaatccactcaataccggccaaggctgccgtcgtgtggtaagggatcacggtttgcttatatcccatgtcaacgaatcgacctccttgcgaactgtgccgaggtagaaccatcaaaaacggtttcacctccaagaaaatcagacggtggcgctgcttagaatgtgtcacagcttcactaggaacacccagaccaacgcgaataagaaagcagccttccgcctattcctcgcatggattatgtccacccaatcgctggcccatcacgcgaaaacccgcggtatatcccgatcaacagtcaaaatacgcctcgtgtggtacaggcttagacgtcgagcaaaggtagccccacaacattcactcggcatccgatacggccaaatctgacacgtcgaagaaacacacattttgagccttaaccccggttcagctttaaactacgcttaagcagtcagattcacgccgcgtagcacagtggcgccgacggcatacataacagtcccctcccgaaagatccgtcatgcatcctatccccgtagacttgatgtgatttttacgtgtagcgaaagtagttaggaaggctgctcttttgattcatgatgccctgaagaaaaatgagaccattgacgcaaattcagcgctcgctgaaaaggttgccgtagagctgcctggtttcatcgacaaggacggtagattccttagttctaagttcgagtccgcgttatctgatgttgacgtcgatatgtctcgggagacctacgggttatcgttcgtgggtaaatcctacggtgattaccagtacgggtgtcagtgacggtggaaaagtagcccaagaatgacggtggaaaagtagcccatccgagaagaattggatgggtgatttccatggatgattgggcgcagatcaggattttgcgcaaagatggcatgtcgattcgcaagatcgcagcaacagtcggctgcgcgaaaaagacggtagagcgggccttagccagcaacacacctccgtcgtattcgaaacgagctccacaaaagaccgcgtttgacgaggtggaactggacgttagggccttgctcgacgaggtccctgatatgaaagccacggttatcgcacagcgcgtcgcctggcagggctcgatgtcgtggtttagggaaaacatccgacgaatccgccccgagtatctcccccacgacccagtcgataccctcgaccataagccaggtgtgcagattcaatgtgacctcatgttccccgatgacggtatccccgatacgcacggtcacgcgggggtgttcccggtgttggtgatggtggcatcgtattccaggttcatggccgcgtgtgttcttcccactaggacaaccggtgatctggtgtctgggatgtggctgttgcttcagcaacgttttggcgtagtacccaagcaactgttgtgggatcacgagggcgtgtcaagttgtttgtgtgtggggtgtgattgttagaggtagggctcgaagcgatcagggtaagccactgacatctgattgatggcctgcttccagttcgtcacccgcctgccctcgatcagccgaccactggaagccacgacccgtttaccctgcttcgcacgtttcgcggcccgcttatcctcgatattgcagatcatcaaccacaaggttttgaccgcagactcatcgttggtgaactgcacccgattccgggtggctttacgcagctcattattcatcgactcaatcgagttcgtggtgtagatcaccttcctggccatcgggggaaactccaggaacgggatgaaccggtcccacgcatcacgccacaccttcaccgactgcggatacttcacccccagctcagaggcctcaaactccgccaaggccgccagagcggtctgctcggtgggggcggtgtagatcttcttcagccccgcagacaccgccttacggtccccgtaggccacccacctgttcgcggccctgatcagatgcacgacacaggtctgcaccatcgaatccggccaggtcgcttccaccgcctgcggtaggcccttgagcccgtcacagcacacgatgaacacatcgtgcactccgcgggcagcgaggttggtacacacctgggcccagaacgaggctccttcctctttggccagccagatacccaggatgtgtttgattccctccatatccaccccgatagccaggtgagggcggacttgttgaccacccgacccccgtcacggactttgatgcgtagtgcgtcgaggaagatcacggggtagaactcatctaactggcggttctgccagatcatcacctcctccaacaccgcatcagtgatcgcggagatcgtctcatgggagatgtccacgcccatggcggtggccatgtggtgctggatgtctcgtatggtcatgcccccggcgtagaggctgatgatcatgtcgtcgacgtcggtgagccggcgcgatcctttgggcaccattgtcggcaggaaggagccgttacggtcccgggggacagcaacatcgatgggcccgtagttcgaatcgactcgtttggggtaggaaccgttgcgggagttgttctgaccagcagcttccttgctgtcccggtcgccgtgctggtagccgaggtgggcgtccatctcggcgttgaggccccggttgatcgaggcctagagcaggccccggacaaggtcgttggcgtcggtggtggaggtgccaagctcgtcgatgagcttcgccatttcagggttggccagcagtttctcctcgatcgctttgatcttggcggagtcctgggggtttcgtcgtgccacggtagtcattatggttcatctccttgatgtgaagggaatccctcatacacaaaccattagacactctcccagggtcctgcccacacctgctgcgaaaaacttttccatgttctacatcgtgccctttcccccttgggagtggtatccgcggggtgagggggcgtcgacaagcacccgttcagacgccaagccgcctgaccagcgccgggagcccctccgcggccgtcgcccgccacgaatacgtggcgatccgtgacaaatcagtctctttcggcgtgatctcaaggatcggcaccccacgctgatgcgccagaacgggcaacgacgccgccggatagacaatcccagaagtacccacaatcaccaccagatcagcctgctgcatacgacgctccgcaaccgaccattcctcctgtggcaacgcctcaccgaaccagaccaccccgggacgcaccggattcccacacaacgaacacgccggaggagtaagccgctccaccggctcccgcggataatccccgtcatcccgccacggtttagaacatatcgaacaccgaaaatcaaagagactgccatgcagatgggtgacctccgtggaaccagcccgctcatggagatcatcgatattctgcgtggtcacatgcaccgtatccaccaggtggctgccctcccagtacgcgatggcctcatgccccgcattgggccgcgccttcatcgcctgtccagcgcgccaccggtaccacgcccacatcggctccggatcctgcacccacgcatcgatgctcgccatcgcctgcggatcaaccttcgaccacacccccgtctccggatcacgatacgtctccagccctgaatcggcactcatcccggcaccggtaaatacctcaatgttgcgggccccacgcgccacggccactgcctgcataatcgactgctcgtccatgacccccagggtagcgctacggctgcacccacgttttcaaggcgaacagccaggcggacacgcttaggcaggagttgtaaataccccgcccaccacagggtctaaagtgtgaaagacagtactatccgataacaatttcgaaggcagggatgcaccaatggtcatgggccccacccatgcgatgagtggtgccgcggtcggcctggccgtggcccagatcctcccggaacaatggggtggcgtcaccaccgccgaagagacattcatctacgcaggactcgctgccggagccgccatgctccccgatctggacgccccctccgccacggtctcccgttccttcggacccgtgacacaagtgatctcccgtttcaccgagaacatcgcgcagaccttcgtcaatgtcacccgcggccgcaaggacaaaccctgcaagaacggccaccgtaccgccacccacaccatctgggctgcgctggctgcaggcatcggagccacagccctgatcggtgccttcggaaaaacagcggtaatcggcctgttgttcttcctcctcggtctcggcatcagggggttgctgccggaatggtcaaaaaagacagactggttgatcgtcaccggactgtccgccgcccttgcctacgcggtgtggagttatgtaccggaggaatccttcggtgtgttcctcggatcggcgatcacggtcggatgcctcacccacatgctgggcgacctggccaccaaacagggcatccccgccttcgcacccctgcttcccttcaagggccgacgctggtggaacctgaagctcccgaaattcctcagcatccgcgccaacgggccagccgactggatcctgctcaccggtttcaccatcgccgtgatcgcccagatcggcctggttgcctcaggaaacatgcgtgacgtgatgctggatcttctgcctttcgaggtggtggcccaggacttggggataaccgcccctgactttgctgacctgcactaacccagagatcctgttcccagaaaccgcgtggcttaacccagagaccgcgactgctttctggggacaggatctctgggttatggggtggcatctccgtccacgacatcgcatcaccgatatcagtactgatgtcggggttgaggtggcgagaccctgtccacggccccgcctacatctgcacggtgatcaggggcagctgggtgactgcgagggggaagcgctgtccg

SEQ ID NO: 3975 - DNA, 23300 bp, synthetic construct
  variation 15189..15198: note = note, n is a, c, g, or t
  misc_feature 1..23300: note = Synthetic
  source 1..23300: mol_type = other DNA
tccctgcgtgaaaaccttctcgtaggtttttcgcgccttgcacaggcatggcggtcacgtaacgatgtatccaatctgatatcccattgaggagagtctgccttagggagacttttagaggtgaccaggtctgattggctaggtccaccatgcgaccgatcattttttcccacacagaataaccattttcagctaattcatagtccagcagaaaacgatcagtgccattcctggggaggggctccctaagacgtcccggataccagccgagggaggtggcgtgctgaatggcgtattgtctaaaatcctctacgctgcgggagtgtgcacggaactcctctgctggcatttcctttggggcgtttaactgaagcgaagtacgtaccccgggaagctggccgctggggctaagcataactgcctccaccccctcaaataacgctaatcgtgcggcgtccacggcagagaggccagtacctaaaataccgatgcgggaagtgggatggttttctagccagtgtgaaaaactggggtcataggggctgggaaaactgggaccgtatcacggtatgactggcaagatgaagggacccgtgctgttttcggccacctgtgatgatgacgaaatcggctttaaagagcccgtgacgcgcagtatgaatgaggacaggggctgcagaatcttctacacaaatgaccgaatcgagtacgtactgaagacggccatcgcagctgccgctctcagagggtagagcctgttgcaagtaagatccgtacttttttcttgaagagaatacagaactggactcttgtttattctatcccaggaactccgcaaaatcatgtggttcctcgacatccagcgacattactgaagtacttgtgttacatagcaagcgtttatcaacatggccaaaagcaaggtgcttctgaggaggtgtcgcgtcaaagatagtgagttcaatatgcgggaaagtagaagatacccgtcgtgcgaccgctgcagcagcgacccctgcgccgataacagcaattcgggtcgtcatcacgcatcctttccgggggcaacagtaaacagatcaccatgggcgtcgaaagactcaagagattgaagatcggtctcaacagcagcacggtcagaagagccaagaagaaccatgccaaacgcaccagttgttacgcgattcgagttatcgatataagtgccgatctttggtcgccgcgagattctctgaacggtcgggcgagtttggacaagatcccagtggcactgttgaagcacaccgtttgactgcgggataggcatgagccaggcgacacacccgtcaagatttccggcgagtacttcctgttcggcagcttgtaaaccatccactagcatcgtggcgagaacgctgatctggctgaaaccgcgagtcgggaaatagacctcgtcgggtacttcggggcccatacagcgaccgttgtattcaataagtacccactgccccttagaccacctcagttccacgtgggaggctccgaagtttacttccagagcgtcaaggagcgataaggtatattctacggcaccggaatagtggttgtcctccggtcctactgtgatagctgaatatatgtggggagctccagattcctccgtaagtccgtatcggaaaacttcggtcacaatatgacgcccttcggctgtcaccgtgttcacaaaatattgaggtccgtctacgtactcctgaagaaccacggagggtgatttttctcctagcaaagtcgtagaattttgaatggtagtaatcgcttgaagagtctcgggttctgttttgcagaaatagacatggtcactgcccccgcttcccacaggcttgacaacacaatccttgaccagggacgggtctagataaaggctgtcttgtgcagaagcgggggatagggtaacagaccttggggcacgcagtccatattggtgagcaacttcaatcattccttgcttatggcgacggtgccagatcttctctctaccgtcctaactcagctgaaacccactcagctatggatactcctgattcgcttcccggcacaacaaggtcaaatttttcttggctacattcccggagtagggccagggcccatggatcggaaatgctcccgtcttcgttagctgagatggcatacggcgggttagcagtagcaacctctacgtccctttttttggcgcagggttgccaccagatcggcgccacttgaagaatcatcaactactaatattttcatttttccgtgttccccacattgcttggcttatggttattgccacaatgagcatcaacaaagttaactgaattggttcgacttgagagcccaatgccacctcggtagccatcaccacggccggaagggccgcgatgatcagtgccgagatgaaaggcggcgctaaggtaattccccactgcaagagcaggataggaaaagtaatgcacatcaccgatagcaggacgattgacagggtagagcctcgaagcatctccgcttccacggaaaagaaagccacgagaccgctaataatccaagctaagtgaaacctcactgctgcaatcgtgagaacgctgttcccttgttcagtagcccagcgcgaggagtaaagcactcctaccgcagaaattcctgcgcctacagctagagcgaaacccagataagactggggtgaactgcttcccgttcctaggaagaaaaaacatagagccagaaccactactgcagttgttgacaccaatgaactgctgagccttctggccgaccaagtcattattactgcgacaataaaagggccgactcctgtttcgatgacacttgctgcagtgggctgcatcaaagtagtggaaacatagaataagcagaaagcgcccgcagtaaacagattgaggcttgctgcagttgtcattttcatggggggatgcggtgtttccgtagctcggtattttctacgataaaacgctaaatagaccactgtggagataatcgccgcgataagaaacgctgaaaacgtagtaaaagtagatagctctgggtctacttgggctccgactatcgcagtgccgattccttgccataggacagctagggctacgataaccgcccctacaactggtttattggactggatcataaaaccttaccctcaaaatccgtaaagttaacttaataggtgttgttgcaaagttgggcggagagcagcgatgaagtgccccgagttttgttcctaggcatttgccttgatttctattattgcctgtggcgggttctgcttccaaaactcggtttcgacctcgaccggggttcggtatcccaagctttggtggagccttacctcgttccaccatgacaccccactcgaatgtcgcaatttctacctcgacaacatcattccacctgcgggtatggactagctcgttcttgtaggagccgttaacgttttcagccagagcattgtcataggagtcgccgacagttccggtggaagcagtgatcccgtgttgggcaagtcgctggttgtagacaacgctgacatactgcgatccgtgatccgaatggtgaatgagacctgttgtttccctcgcgctcacaatcgcttggttgagtgcttgcagcggcaaagcttcggtccgcatcgaatctgacagcgcccacccaacgatccgccgggagtaaacgtcggtgacaaacgcggcatacacaaagcctttcttcgtgcgcacgtaggtaatgtcggccacccacagcttgttcgggccccgggctttgaattcacgctcgaccaagtccgggcgcaaatcaggcacgttagcttttcgggttgtgattggtgatccgcctttgcctttgccagaaacgccagccaggcgcatcagccgggtagcgtgttcacgaccgatatcgattccttcacggtaaagcgcatgccacattttccgcacaccgtagacaccgtaattatcccgatgaacagcactaatgcgttcaaccagaacagtatcacgaaggcgacgagcacttaacccgcgagccttggactggcgatacccacgcgaggtgataaacccaccagcccggttatttttcaacgtcttgcagatgaactcgggcagtgaaacgattccggttttcatcgatgaaccggatcatttcttaacgtttcgggtcgagttccgacgcgaaaaaagccgaggcagccttcaacaactcattagtatcgcgtagctcttgattttcacgacgtagcctcgcgttttcggcagccacatcttcaggcacaggttctggggttcttcctgcacggcgagcaggcttaagtccattgacgagctgtgtgccatgaaacccccagctttggagctactgcctggcacgcggggtgcatcgacatattttccgccacgatgcgatcttccacgagacggaccacacgatcctttgcatcctggtcaaattttctcggcacgttccagattttcccatctactcaaacggaacaaaacctaggacacttcacacaagcatttagaaactactgctcatcgttaggtgtacgccagtccatgggcgcggttggaacgagtgccgataatgccctggcagaatcatttaacgccaccttaaagcgggaagtactgcgtgataggaaactctttgaaagtccaatcagctgccgccaggaagtctttcggtggtgcatgggctacaacacccgaaggcgccactcctggtgcaatcttgtagctcctgatgtctttgaagccgagacttcagctacactaactaaagcagcatagctacccccgacgtgtccacatttcgggggtcaggcccttatgccgaattcgcccaatcgggctggcaacaaaaaattaaagaacgccctatggcaatcgtcttttgcatcgatcagattccacgagcgttcccggcaattctatgaacgaaaacgcaaagaaggcaaaagactcaacgccgcagcaacctaaagtcaacacacccccagcaagcccacccacgaagttgacaacctatataggaacatcctctcgctctagccgttttcgagcagcccgagcagccgctcgcgcagctcatttttccgctccaccaccgcggagtcttcgctgccgctgcgcgggcggggcaaccccacctcgatgtcctcgatgatggtggcctctggccccggcgacatcaccaagatgcggtccgagagcagcaccgcctcatccacgtcgtgggtgaccatgaccaccgtgcggcggttttcttcccatacgtttagcagcagcgactgcagctggcggcgggtaagcgcatcgagcgcgccgaagggctcatcgagcaaaagaatatccgagccgatggcaaaggcgcgcgccaacccgacgcgctgctgcatgccaccggatagccgcgatgggcggcggtcggccgcatggcctaggctgacctcgtcgaggaagtcctgcgcaatctgggcgcgctctgctttggatagctccgggcgagccgaacgcagcccgaattcgatattcccacgcgccgtcatccacggcaggagcgcgtgattttgaaataccacgccgcggtctggacctgggccggtcacggcctcgcctcgcgcgcgcacctcgccggtagagggaaatgcgaggcccgcgatcatattcagcatggtggatttgcccgaacccgatggccccagcagggatacgaattcgccctccccaatggaaactgaggtatccccaatgatcttggttgggccgtagcttttggtaataccagcaaattcgatatgggcattagtcatagcgcaccactttctgcagggaagcaacgaggtaatccaggaccaatccgatgacaccaataagcacgatgaccacgacgatggcgtcaatatcgaggcggttccacatattccagacaaagaaaccgacgccttggccgccgacgagcatttccgcagccacgatgactaaccaggcggtcgatagcgattgccgcatgccggtgataatccctggcagcgccgccggcccgacgatgtagaggagctgttgcatccggttcgtgccgagcgtggccgccaagttcttatacgtggggtgaatcccgcgaaccgcctcgatggtattaagcagcgtcggccacagggcggagaggatgatgacgaagacggcggtattctcggcatcgcgaagcagtgccaggcctagtggcagccatgccagcggggatacggggcgcaggatctggacaaagggatcggtcgcgcggcggaaggtagccgaggaccccagccaaaagcccagcggaatggctatcaccatggcgatggcaaacccgatgagcacacggcgcagggaggccaccatgtgccaaaagatgcccaccgaggccgacccatcccggtagaagggatcagaaaggatctctacagccctatcccaggtgcgcgcgggagtgggggcgatatctgaaagccagcccgcagctgcgaccgcctgccagatggcgatgaaggcaatgaaaagcgcaatacccaggcctattgccttccacgggctctcccgccgcttcttccggctggcggtgcggcccgaatggagcgctgcggtgtgagtgccagtggagtgcgctgtgctggtgctagtgctgtgatttttcagtgtggtcataagcgtgggggtccttaacgctggtatccggtggtggggtgcaggggatcgaaggtatggccgttgatttccactgggtccgtagtgagatcggcctcgcgcggcaagacggattttgtgacgtctatgagcgcttgatcatccatcggcattgcctttccgcccagatcccagcgggccatttgggcggccatccacgtaattgcggtggcagaggtgctgccgccgaacttaatcatctgtggatccaccagttctttgccgtcccaggtggtgtaatttccggccaacgcccgcgagatcagctcttccttctggttcaggtacttctccttggccagcatggaggccgaatcgtggacgtggtgcgggctatcgacgtactgcgcgccttcgtgcagcgccgcgactacgcggtcgcgcacgccccggtccacttcctttgccacggccaccgagcaacacgggtggttatcccacatctggcgggtgggcacaaaggcccggcccgatccggtagtcagggcgcgctgattgaaaggttctgggccaatgaagccgtcgatggtgcctaccgaaagttgcgccaccatatcggccgggcgcaagaggcgcagctccacatcggagaccggatcgaccccgccggccacgaggtaatcgcgcagcaagagggcatgcacggagtattcaaaaggtatgcccaggaccatgcccttcagatccgcgggccgcgacacggtatccaggtgggaagtggacaaggtcagtgcctgcccattggtgttttgcgtaaaggccaactcggtgggccgggaggcattggtggcaccggcatcgatggccagcggcatgggcgagagcatgtgcgccacgtctaaggcgccggtggcataggcggtccagagatctgcccatcccgcgaatttgcgcagctcaacgttgaggccctgctttgcaaaggcgcccagcccgtcggcggcgaccagcggggacgcgcacgcgatgggcacgaatccgatggtgagggtttccccgccccgcccggatgtcccggactgagccttgtcctcctgtcgcggcgaggaacacgcagagagcacctgcgagcccactgctactccgcccattgctactgcactgcgcagtatctgccgtcgcgacagcttcagatcgtgaaccatgcgttctttcttaactagaccaagtggtttgttcagaacaaacctaggctaggcgcactacggtgtcaatttctaaattcacaggtcagcaaatgcggtgcacacatttatattcactctagacctggcattctctacaaaatagaccccttgttctagatttatatttgccttcgcgttaccatggcgccatcagttaataaacatctgatacaaggagcaatttaatgtctgatctcaccccaaaccacaacgaaggcgacgctctcgagcccattgatggcgagaagctcaacgacctagcacagaagaacatcgacaaccctgagggtgccaagaagcacgtccgcacccacaccgaggctgacggtttcttccgcaataacaccaccgtgcgcgaccacaccatcaaggtgggcgagcctttgccgctgcttggcgatgactccgcccccaaccccaccgaggtcgcccaggctggtcttggcgcctgcattaacgttggtatccaagccatcgctcagcaccgcggcgttaccctgaccaagctggagctcgacatcgtcggtgacatcgacctctccccaacctggggcgttggtgacttgagcgaggacaagcgcccaggcgtttccgacgtcaacgttaaggtcaacatcgacggcgacgccgaccaggaaaccctgcagaagatcgtggacgacgccatcaagtggtccccggttgttaatacctacacccgcccggccaacctcacccacgagttggtctaaggtttagatagataaaagcgcctggcaagtgccaggcgcttttcttatgctttaggagcaactacaggaattgccacgattcccgcaggcgctcgaaccaccactcgcggcggctagccggggcggccaaggcggacaggcggtccggttctggggcgaggatctcggcgcgcaggtggccttcgtgtagctggcggggcgcggtgacatcttcttcgaagaggctgcccgtggcaaggcccgctgcggccggggtgacgtcgatatcttcgtcgtcgtagatttgtggcaacgccgccaccgcagccaagcccatattgatgccaatggaagtatccagcgccgaggccaccgtaatatccatgtgccgttcgcgcaggtgctgtgccacgtcgaggacgcggcgcaccccgcccagcggcgcgggtttgaccaccgccacatcggctgcctgcagatccgccacgcggtacggatcctcaaccttgcgaatggattcatccgcggccacgcgcacaaaaagcccattgcgcatgagctgcctgcgcacctccaccagttcttccgcgctggcgcagggttgttccatatagtccagaggcatgagcgcctgggcggcctctaccgcctctgccacgctccagccgccattggcatccacgcgcagcaccgggataacgccccgggcgctcacgtgttcgcggacggcgtggacgcgcgcgatgtcatcggcaagcgtctggctcttctccgccaccttgatcttgaacgtccggcagccggggtagcgatccacaatcgccgggacctcgctggcgggaacggcgggaacggtggcattgacctctacccactcgcggacgggtttaggaaagccctcgtaagcagcctccaacccggcgcgcagccacgcggctgattccgcgggcccgtattccaggaacggcgcaaattcaccccaaccggcaggcccatcaataagcagtgcctcccgcgtggtgatgccgcgaaacttcacggccagtgggagggagactacgtgggcgcggtcgagaacgtcatctatgttcatagagccatactatccggcattatttacccctacctaagttgggatggccacagttgctcatcggagccactcagcagggttaatatttacccccaataggtggatatattctgcctgatctacaaatgttccggataataagttatattcttatatgagaactgaacctcagtaagcgtcggctcgtttccggcgttgaatgctccagccgaaccttcgggttcggcttttcttatatctgaaaggactttcctcgtgtccctctcctaccgcgttggcatcgatgttggcacctattctctgggatgcaccgccattgaagtagatgataatgaccagccagtcaatatcctgagctcggtatcgcttattcacgattctggactagatccagaccagcaaaagcgggcggtaacgaggcttgcttcttctggcgtagctcgacgaactcgtcgcctttatcgtcgccgtcgtcgccgcatgataaatctggaaaagtttctcacctcccaaggatgggaaactcgcccctttgagcattactccgatccctatctcccctggaacgcacgcgttgcgttggtcaatggatatatctccgacgatgcccaacgaggaatgtacctctccatcgctttccgccatatagccaaccaccgtggctggcggaatccgtactggaaagtatcgagcttgtactctcccgacaaaccgagcgatgcctttgaacagatccgcaaagaactcgaggagtccactggccacaagattccggaaaccgttaccgttggccagctaatttcctttgcgcagtttggcaaggacaggctgcgcggtggcgggaagaaaaaggatgaaaagaaaccacaggagcaggttaaccaagcagtaatctcggctcgtcttcatcagattgatcacgctcgtgaaatcaacgaaatctgccgagtgcagaaaattgatgacgccctccgaaagcagattttggatcttgttttcgccgcagaatctcccaagggcgcacaaattgggcgcgtaggaaaagacccgctgcaaccaaagctaccccgtgctctaaaagcttcggacgcttttcagcaataccgaatcgtcgctttggctggaaacctgcgtatctaccgcgacggtgtttctactcctctcgaccgagacgaaaaactcatcgtctttaactacctgatcaacctctcgcataaagaggagccgtcgtggctcaaagttgccgaggtcttaaacatcgacagaggccagctccacggcactgccacgatgaccgatgatggtgaacgcgccggagctgcacccccggtgcacgataccaacagaactatcctggggtgcaagataaaacccctcgtgcactggtgggaaggcgccaacgacgatgagcgtgctgcgatgctgaaggccctatccaactccgaggtggaagacttcgactccccagccggagcacaaactcaagcattcttcgccaatttagatgaatctgaacaagagaaactagattcccttcacctcccaattgggcgtgctgcctacagcgaagacaccttgatgcgtctgactagccgaatgctcgacgaaaatttggatctttatgaagcccgcctagctgagtttgatatccccaaagactgggcacctcccgcgcctcgaattggtgaacccgttggcaatccagccgtagaccgtgtccttaaaggagtggcacggtggttagaagctgcagcagatgaatggggcgctcccaaatctgtggtgatcgagcacgttcgcgatggcttcattagcaaatccaaagccaatgaaattgaccgagctaacaacgcccgccacaagcggaaccgagagctcttcaagcaaatgcaggaaaacctaggaatcgacggaaaactgcgcagttcggatttgtggcgctaccaatccgtgcaaagacagaactgccaatgcgcgtactgcggttctcctattacctacacaacctgcgagatggaccatattgttccgcgtgcgggcgaaggctctacaaataccagggacaacttggttgccacctgtcatcgctgcaacttggcaaaaaagaacattccttttgctgtgtgggctgcgcaaaccaatattccaggcgtcagcgtcaaagaggcacttgataggacacgacactggtcagaagactccggaatgacttcaaaagacttcaagaaattccgcaagaacgtctgcgaccggttaaaacgcaccgttgtcgatgaacctttagatgctcgttccatggaatcagtagcgtggatggcaaatgagctgcgcggccgagtggcgcaacggttccaggaagaaaatactgtggtcaacgtctaccgtggtgagcttactgcagaagcgcgccgagctgcaggtatctccgacaagctacggtttattgacggaactggaaagtcccgactcgaccgacgtcaccatgcagtcgatgcggcagtcgttgcgtttacccaaaactatgtcgcggaaactctagccattcgttccaataaaaagcgtgaagctcagcttctacaggctgccgaacaatggaaagaattcaccggatccgatgcagagcaccgcgctgcgtggaatgcttggcttcccaaaatgcaaaaactggctgtcctgctgcaaaaggcactggatgaagatcgcatcgccgtcacctccaacttgcgtttacgcctaggaaatgggcgtgcacacgaagatagcattggcgaattgaagaccatccgagtcggcgacgccatctccgtcaccgatatcgaccgtgcctctagtgaagctttgtggtgtgcgcttacccgagaaccggacttcgatgaaaataacggacttccagaaaacccagatcgacggatccgcattcacggtacttggtatgacgcagaagatgacattgaagtcttccctgtaggtgcgggagccatcaaggttcgtggcggctatgccgagctgagccgcttccaccatgcacgcatttacaagattcccggtaagaaagcgccggtttactgcatgcttcgcgtctataacgccgatctcattcgacaccgtcacgaagacctgttttctgttgaaatcaagccgcaaaccatgtctgtccgacaagcagaaccaaagctgcgaaaggcactggcagaaaatacagcagagtacctaggttggctcgtcaccgatgacgagctggtcattgatacgtctaacttcaataccggccaaatcgcggagatgcaaagcgagctcggtcaagtccgacgttggcggttggacggattttactccccatccacgttaaggctccgaccactccaaatgagcgcagaaggtctgcgtgaagatacttcgataggtgctaagaagattattgaccgaccaggttggctgcctgctataaataagctctttggtgagggacacgttacggtggtaaggcgtgatgctttgggcagagcaaggctcaccagcaatgcgcaccttccaatctcgtggaaggcggagtaagaaaatgaatgctggatggcgagtaatagactgtctaaatcttcacggttcacttcgatattctcggggccaactcgtcatcagcaaggtcgatgccgacgatgtcgctatacccctatcccaaattgcagtagttctgatcggatccaagagctcaatcagtggtgccgtgcttcagaagtttggtgactatgacatcgcattattagtttgcgattggcggggcgttccagtgtctggggcctacccatggaatcagcactcacggttgggtgcacgacagcaagcacaagcgcagctctctgttcctaaaaagaaacaggcctggactcggatagtcgctgccaaaatccacggtcaggcgtccgtattgaaagctctacaaaagaacggtgccaatgaactggttaaactatctcgcactgtaaagtccggggatcccgagaatcgggaggctcaagcagcccgaaaatactggtcctgcttatcgcatgaccaagcattctcgcgcttacccggtgccggcgatcctggttggaattccgcattggattacggctacacgcttttgcgtggctatgggattcgtgccatcgccggtgctggactctctggaacactcggtgtgtttcatcatggccgtggaaataactgggctcttgtggacgatctcatggaacccttccgccccatggtggaccagatcgtattcacaaccatcaactatggagatgaattagctgcttctcaaaagacagcaatttccactgctctaacttgggccttcgaagctgatggaaaatcattaagcaccgtttttaatgaatttggccagcactatggcctgtatgtcgagggagcagttcgtgatctaagcgtaccccgttgggaaggaatcctcgatgccagcgaaggatagtgaaccaatgtggtgtgtggtgatgttcgatctgcctgttaaatctaagaaacaaactagtgaagcgaacaaattccgaaaccatctcttagatctcggattctgcaggtctcaactaagcgtttatgtccagtacttcccactgtcttctagaatcgcttcgaccgtcaaacaaataaagacagctctcccagaaggtggcgacatcaggataatttccgtcactgataatcagtgggcaaaagccatcagattttctaaggcagagcccgctggagtagaggaaaaaccgtcccaactcgtaattttttgaagcaggatcaccaataaactccagttaaacggcctttttgggccgcactgaagtctatcaggggtaatgagaactgaaccccagcacctccttagccatcggccccagcatctgaagtctatcaggggtaatgagaactgaaccccagcacctccttagccatcggccccagcatctgaagtctatcaggggtaatgagaactgaaccccagcttccttgcgcagtgtcgaccgagcatcggaagtctatcaggggtaatgagaactgaaccccagcttccttgcgcagtgtcgaccgcgttgaggaagtctatcaggggtaatgagaactgaaccccagcgtctatagtggccccaccaccgcggggggaagtctatcaggggtaatgagaactgaaccccagcgatccggagccaatccggaagctatcacgaagtctatcaggggtaatgagaactgaaccccagcggtctcacaatcagaacacgatgaacgagaagtctatcaggggtaatgagaactgaaccccagctggggtgatgggcgtcgtgagcgtgtgggaagtctatcaggggtaatgagaactgaaccccagctgtttgcggcctcttccaggggctttccgaagtctatcaggggtaatgagaactgaaccnnnnnnnnnntctatcaggggtaatgagaactgaaccccagcgtgtagtcgtacggctccgccgcaagccgaagtctatcaggggtaatgagaactgaaccccagtcacctccctcctgctacctccggttcgcgaagtctatcaggggtaatgagaactaagctctgactgggagagccacaagcgatacgttcacagcttcacttttgtgtctcagccccattgaccccagcccccacccagactacgttggttcctacctaccctgaaggaggaaccatgttactggcagaggcattagcagagcgcgcgcaggcgcaggagcggctcaatgagctgcgcgagcgcctgctctccgtcgtccgcgtgcaggagggcgataccccggacgaggatccggccgagcttttgcgcgagttggagggcgttaccgggcgcatcgataagctcgtgcaggccatcaatgccacgaacgtcgccaccgattttgatggcgagaagaacctgatgcaggcacttgcgcttcgcgatggcctcgtgcgcacccgccgcatctaccacgacctcgcccaggccgcgggcgcgcgccaggatcgctactcccgcgcagagattaagtttgtggccacgctgccggtagcagagctgcgcaagcgggttgatgacctgtccaagcggtaccgggagcttgatacccgcatccagcagttgaactggaatacggaactgataactccatagcgaagctttagtcatgccacgccgcgcgcgtggcggtagcctttatgcacttgcagcgagtatgcccccgccttcgaggggaaattcgaggacatctaggcaccctttggcgttaaagggttgaggaagttcgagtcttcctacagtattgatgaccgcgccggcatagggtacacgggtacattgcgggataaccccccgcagttattgagtatcgattattaccagcatgctgggcagtgcgtagaggtgagggttgggaatggggactaaacttattcgcgcccactatgctgggcgctatgagcgagcagaagaaatacagcaccgaaaatccgttccgtgaggaattgtggcgtccagttgagggctttggggatctcacggacgtcacctaccaccggctggcggcggacggccggaagaatggcatcgtgcgcatcgccatcgacaggcccgaggtgcgcaatgccttccggccgcacaccgtggatgagctgtaccgcaccttggatcacgcccgccgcaccccggatgtgggcacgatcttgcttaccggcaatgggccctcgcaaaaagatggcggctgggcgttttgttccggcggcgaccagcgcattcgtggacgctcggggtatcgctacgccaccgagcatgcccacgatgatgcgacggcggatgaatccagcgtcgacgaggcccgcgcgaaggtcgaaggcggccgcctgcacatcctggaggtccagcgcctcatccgcaccatgcccaaggtggttatcgccgtggtcaatggatgggccgccggcggtgggcactcgctgcacgtggtctgcgacatgaccgtggcctcccgccaggaggcacgctttaagcagacggacgcggacgtcggatccttcgatgcgggctatggctcggcctacctggccaagatggtgggccagaaattcgcccgcgagatcttctttctgggccgcacttacgatgcccagcgcatgtatgagatgggcgcggtcaatgaggtcgcggaccacggcgagctcgaggacgccgccatccgcatgggccaggaaatcaacatgaaatcccccaccgcccagcgcatgctgaaattcgcgttcaacctcaccgatgatggcctgatgggtcagcaggtcttcgccggcgaggccacccgcctggcctatatgaccgatgaggccgtcgagggcaagcagtccttcttggacaagcgcgagcccaactgggacgagttcccttactactactaaggagtgccccgcaccgtgctcatcgcattctgtatcctgctcgcggtccttgccgtcgcgggcgttcttggctcccgcgtgtggatgctgcgccgcattaaagaagccgaggccaataacgagcgaccctttgagcaggaggacacgtaccgctgattcctgcatcgactcaccccggccgcaaccggggtttgtcccgccgtggctctaagatctagtgccgtgactatcctcgcccccttgcccgtcgacccgcacgatcccgcggccatcctgccggacctcgaatccgccattgccggtaggtcctgctttttgccgctgccgcttgccgatgccacccgcgccaccctcctgcgcaattcccaacgcgccggtgaacccatcgccgaggacatcgcgctcgtggtctccacctccgggtccaccggcaccccaaagggtgcgcaattaacgccggccaacctggtggccagcgccgatgccacccaccaggtcctcggtggccctgggcaatggctcttggcgatgcccgcccaccacatcgccggcatccaggtcctcgtccgttccctggtggccggggtggatccgctctgcctcgatctcagcgaaggctttgatatctctgccttcgcccgcgccgccgcggagctttcccgcactggcgaccgcacctataccgcgctcaccccgctgcagctggccaaggccatagatgtgctggagggcatcgatgcgctccaaagtttcgatgccatcttggtgggcggtgccgccatccacccgcgcctgcacgccgcggccgcggaccagggcatcactatcaccaccacctacggttcctccgagaccgccggcggctgcgtctacgatggccgcccactgcccggtacgacggcccgcgtccaggacggccgcatcttactcggcgggcccaccatcgcgcagggctaccgcaatgccccaagccacgaggcatttcccggaaacgggtggtttgccacttccgatgccggcgtcatcgaagatggcatcctcaccgtcaccggacgcctcgataatgtcatcgactccggtgggttgaagctgcacccagaggtcttggagcgcgagatcctccgggtgccgggtgttgccgaggcgtgcgtcgtcggcatcccgcacccgcggctgggccaagccatcgtggccgcctataccggtaatgccgagcttggcgatatcttcgaggccctcgaagacgccgaactcccccgctggcagctgcctaaggacttaaagcgcctcgcggaatttcccaccaccggtcctggcaaggtcgaccgccaggccgtcgccgccctctttaacgcatagccccaccgcaggccccagcttcctgattgctttacgcccactacgcagtggcacaatggtggctatgacttcatcagccggtaattattccgcgaccgccaaggattggatcaatggtgctcgcccacatacgtgggccaatgccttcgcacccgttgtcgcaggtacgggcgcggccttcggcattaatagcgggcatatcggccgcgcggtgctcgcgctcatcgtggcgtgggcgcttatcatcggcgtgaactatgccaacgactattccgatggcatccgcggtaccgatgatgaccgcaccggcccgcaacggctgaccggcagcgggcttgcacaaccgcgccacgtgaaatacgccgcgttcgggtgctttgccgtcgctggcttggccggaatcgtcctgtcgctggcggctggtgcctggtggctcatcctcatcggcgcgctgtgcatcgctggtgcgtggttttataccggcggcaagaacccctacggctaccgcggcctgggcgaggtcgccgtctttatattcttcggcctcgtcgccgtgctcggcaccgaatttacccaagccggccgcatttcctggacgggcctggccctggccatcggcatcggcgccatgagctccggggtaaacctggtcaataatatccgcgatattccctccgatgccgaggccggcaagatcaccctcgcggtacggctgggcaataagaacgcccgcctgctgtttaccggcctgctgctcctgcccttcgtgcttaccatcgcggtcgccttcggcagctggctcgcgctcgctggcctggtctacttcccgtttgcactacgtgcggtgcgcaccgtcaatcgcggcgccaccggagccgagctcatccccgtgctggggctgaccgggcgcgccatgctcatctgggcagtcatcgaggccatcgccgtcgccctggtctagtccgtgcctaggcttgcgcgcctaggcctctgcgcggccttccaattcggcctgcacccactgcttatgcgccttgcgctgcgcggagtattccgccagcgtctgtgtggcctcgatgcgccagtttttaaaaatcagcatcgatagcggcagggcaacaaagagcgccaggagcgctgccacgaggacgggaatggggaacttaatcgctaccgccagcagctcgatgaccgcggtgagcgcgataaaaagcaccacgcgcgcgagcccgtatttccatagcgccttgcgggagcgacggcgcagttcggggtccggttttggtggctcagggttgtgcgtcatgggggtcgattgtacgccgtacaggtagaataatctgcatgggtcgactaatcctcctactgctttttgtcctcgccgcctacctggtgtggaaggcctttgggccatcatcctggaagtcccgccaggttgaagaacaaccgcgttccatcaagggccccgatgatgacgaggagttcctgtggaacctggaaaaggagcgcttcaagcagcgccgcaagcaggaggccgaggaagaaaaacgccgccagcgccgcactcgcgacgccgacggcaacggtgattcaaagggccagaacgacaaccaggattaatccttaggtacgaaccgcatctcaagtcccagcgcttctgccacggcggtaaccttttcccaccgcacgcctgccccaccgtgttcgatggtgtggagggtggagcgggagacttgggcggcatcggcaagctgctgctggacgatgcccaactcccgccgccgctgcgcaatctgcgcgcccaagcccaagatgagctcgttatcgccggcgggctttccctgtttattgcgcgggctatggttggtggccatttagttcagccccgcataggagtgtaggccggagaccaccatattgatgaagaagaggttgaagatcatcacggccgtagccaaaatgttgatccacggcgcggccttgcggaaggccggggtcgcacgcgcgtgcaggtaggccgcatagaggatccaagtggcaaaagacacggtttccttcgggtcccagccccaaggccggccccacgcggattctgcccaaatggcgcccaagatgatgcctaggcccaaggtgggcagggtgataacgcccaagcggtatgccaggcggtcaatctttgccgcggacggcagcggataagccagcgcgccaaagaagccgcgttcggcgtcctttggctgccacaggcgcaacaggctcaaaagcgaggcgatgccggacacgatgccgatggacgcgcccaaggacaccaccgtgacgtgaatgggcagccagtgcgattgcagcgccggcaccaccggtgcggaatccgcataaagcttggtggaaccgtaaaacatcagcgccagcaccggggtaaggatccacggccagaccgtgcgccattccttgcgctgcatggcgatattgcccaccagcagcacgccgaagcacaccatcagcacgtattcgtagaggttgccaaatgggaaacggcccgtggccagcccgcgcaggacgatggccgcggcgtgcaaagcaatgccaacccacatcagcgaggtggtcatgccgccgagcttatccagcttgcgttccttctccgcgactttgtcctcgctcgaggtggcggccgcagacgacgcctcagcctcgtaatcggtgctggcagctgctgcgcccgtgccagtggcggcgtcagagccggtggccgcgtctgtgccggtgccagccccggtggcggtcccggccgcggcgccagcctcggctccagcgccgaccaataccttggacgcctccgagcggcccgcgcggcgcgcctcgatgaggctgcgaatgcggccgtagtacaacagcgacataaatagcgcgacgcagtacaccacgaatgcggtctgcaccgcgagatccgagaagttcgacagattctgatcgatctgcaagggagtccacctagccttcacacgtgcgggataatgctgaataccttactcatgcacacagcgggatccaactatagttggattaatcatcagtatagagtttgtcttcttccacctcatctggatccggaagctccaagagcgcgcggtgcagctcgtggaattcctcggaccagccggcgcggtcggtgcgggcaagaccacccatctcgatggtggtgccgccggcggaatccggccgcaggcgaatatagacgcggcggcgcttaatcatcaatgaggccacgagggataccaacatgatcagcgcggatgccagcacccacttctggaatgggtcataggagacctggtaattagcaaactcattggcgccgttgaaggtgatcttggtgccatcgtcaagcgtgacgtcatcgccctggctcaggttcacgcggtcgatcttctgcaactgtcccgagtgcacgaggcttgtgtccagcgagaagagcgactgcggcgtaccggtatcgaggccagcatcgccgcggtagatatcaaccgccagcgccggatcgttgaggcccgggtgggaagactgcaaaagcttgccattctcaccgctccactcggccgtcggggcgaaaaggccctggatggccagttggttttggcggcgctcgaaaagatccgggtatatgcccgcaggcgggtcaaagcgcagcacgcccgaagacaggaagaaggtcgtgtcagtgggctggaactggatggtctgcgtgcgcttttccccatccggccactccaccgtcaccgtcggcgcatagccgtggccctgcaggtagacgcggttttgcgccaggcgcagcgggtggttgaccttgagctcgtagtccttccattcggaaggatccttataaatatcgtcgccctccgcgtaagaaacgttggaggtaaacatctccgcctggccattgggcaggtacttcgcggtgaagtcgtgcgcggtcatgcagaaggggtggagcccagtgccatcgaaaagcggccctgcccggaaggagtcaaagttcgaggtggaggtattacagaactccgtggactgctccagcgaagtattgccgccctgcgagccggactccgtaaccacgatgacctggccctcgtagttgaccaggcgcccggcggccacggtgaccaggatcgccaccagggcgacgtggaaaatgaggttggccagctcgcggccgtagccgcgctcggcggaaaaggcgtgcaccccggcgcgatccttatccggggcgtactcggccacgcgccaccttttcaggcgcttgtggatctccgcgctgagttcttcctcgctcttatccgaatgcccctcggcgctcagcggcaggcggtgcaggtacttcggcgcgcgcgtgggttgagtgcgccacgccttgtagtgatcgatggagcgcggaataatgcagccgatgagcgagaccgccaaaagcaggaagatggcttggaaccagacggaggagaagacatcaaaaagctgcagcttatcgtagatttccgctacggtgccattggattcgatgaactcctgcacgttttgctcgtttaggtcgcgctgcggcaagagggagccggggatggcggcgagcgccagcaggaaaagcagggccagcgcggtgcgcatgctggtaagccagcgccaggctttgcggatatatttcacgtttctcctaaatgagggttgcgccgtagtccacggtccatttct

SEQ ID NO: 3976 - DNA, 23300 bp, synthetic construct
  source 1..23300: mol_type = other DNA
  variation 14866..14965: note = note, n is a, c, g, or t
  misc_feature 1..23300: note = Synthetic
atggcgaggccttcctacttgcccgcaccgccgcgcgcctgctgacctacccacaattcctgccgctggctgggcctgtggccatgcgcgggccggtgggccgcatgctcatgccggccgcagcgcgtcttatgggcaacctcatcaccgacgaggacaaggatctgcttgcccgcgcctggcggctggccggcggggcagtttctacgctgcggcgcgatacacctctctgggcctaaggtgcctaggcgggcttaactgcggagtgcaacgccacgatgccgaaggtcaggttgcgccacccagcttgcttccagccattgcgattaatagcggcggccagctcatgctgctccggccacgcacggatggactccgcgaggtagatataggcctccgggttggaggagacgaccttggcaatcggcggtaacaggcgggtcagatactccttgtagacggtgccaaagaccggaatgaccggcttggagaactccgccactgctaggcgcccgccgggcttggtcacgcgcgccatctcccgcaggcccagctcgaaatcgtggatattgcgcagaccgtaggaaatggtcaccgcgtcaaaagtgttatccgcaaagggcaggcgcattccatcgccggccaccttgggaacatcgcgttccgcgccagccgcgagcatgccgagggaaaagtcacaggccacgcaccacgcgccggacttggacagctcttccgtcgagacggccgttccggcagccaggtcgaggaccttctcccctggcttcaggttgagccgctcgcgcgtcagacggcgccagcgcgcgtcctgcccaaaggacagcaccgtgttggtgatgtcgtatttcttgcccaccgcgtcaaacatgcgcgcgacatcgaagggcttcttctccagatctgccttagacacaagcgcctagtttaggcgacgcgcgctcccagagcgcgagcggcccaacgcggcagctccggacgctggcccagaatggtcagcgggacctcacggacattctccaaaacctcttcgtagtagcccagcagctgctcgcacaacgccggccaagtcttggaggcaatcgacttccgggcgttctcccgcatctcctggtgaatctccggattgagaagcgcgtcgacggcattcgggagatcctcgacgaacgtggggacatcgagaagcaacccgttatagccctcctcaatgaggtccaccgggccgcccgcgcgggggccgatggtgggcacgccggaggcctgcgcttcctggatggcctggcagaaagtctcgaactcgccggcgtgcacgaagacatcaaggcttgcatatgcggctgcgagctcctcgccacccagcgccccagtgaagactgcacctggcagctgggcctccagcagcggacgctctgggccatcgccaacaatgacgagctgaatatcctcacgatcattgagcgcggacaggcggtgcacgcccttttctgcggccagccggcccacaaagccgacgatctttttcttccccgtagagtcccagttccggcgcagcgccgccgagcgcttcgaggggtggaagcgctccgagtctacgccgcggccccagtggcgcacgttcttgatgtggtgcttctccaagtcgctgatggtcagtgaggagggcgcgagagtcatttggcacgcgttgtggatggtgcgcagccactcccacaccccataggccagcgcggaggcatggtacttggtggcgaatcccgcgacgtccgtctggtacagcgccactgccggaatgcgcagctgacgtgcggagaatgcgcccgcagctccgagaacgaagggactggccaagtgaatgatgtccggcttgaactcgcgcagcgcctcgtccacagcggaagtgggaacgccgaccgggagcgaatccaccagtggcacccgcacggtgggcacgcgcacgatggtgaacccgaggtaatcagggatctcctcctgcccatcccgggcaccaggagcgatgacgatggcctcgtggccgtgctcgtggaggtattcgaggacacgcagcacggagttggtcactccgttgacgttaggcaagaaggattccgcgacgatggctacacgcatgcgccccatcattcctttcctgggtgctcggttggtaaagcacgcgctaaattccggttaattttcccgcttgcccaccacaacgccccggcaatcagggtcgccacagctgcagaggacagcgccggaatgatcgatagtgtccattctcggccttccaccttgactaggtccgggttgttcttggcatagagcacccagacctgctggccctcccccagcccggtgggataaagcaggccggtgggcggggtgtgatagataccctcggagtcctggaaatccacgaaggtacgcaaggtgccgacatccgtcaccgtggccagggcgcgcccggggttggcgccgatggtgcggtcattgagaaaagggccgatgaccattcccgccatgcccacgagagctgcggcgtacagcaccaggatcagctggcgtacccggcgccgcgtcatttactgacctaccttggcattcaaagcttcctgcagcgcgcggcgcgaggacctcgtggtatgcgcctccaccacggtgatgccggtggagtattccttgagttctgccaaaacgtcgagcagctcctgcgccgagctcacctcgcggtgctcagcaccgcaggcttccgctagcttggccacgcccaccccatgcggcgtcccaaacgccttctcgaaggagtcgcgcaggggctcgcggccctgttcgagcacctcgaagatgccgccgccgtcgtcatttgagacgacgatggtgaggttctccgggcgcgggttgtcttcggggaggatgagcgaagtcgcgtcgtggaggaaggtgacatcccccatgagcgccacggtgcgcggtgcgcgcggggcgtcggcttcgcgggactgggtggccagggcgataccgatggcctgcgcgatggtgccgtcgatgccggcagccccgcgcggcgaataggtctccaccccatcaaaaggcaggccaatgaaggaagcatcccgcactgcgttggaggcacctaggacaagggtgtcaccaacggcgagggtatcgcccaccgcggcggcgacgtggagaccggtaaagccaatctcgggctgagtagcctcctcaccggtggtctccgcgagaacctcacgaacaccgtcggccgccatctgggctgcgccttcgcagattttcatccactctcgcgtgggctcgccgctggtcttgacggtggttcctagctgcgcggccccgccgcgcgggttagtgaaatcttccgtgcgggacaggcagatgaggtcgatatcgggatcactcagcagcgccagaactccacggtgcagggtgggatggcccacgacgatgacctgctccaccttggtgttgaccacgtagtcgttggcggagacctgagcgcggcggaagaggtgcgccgcggccgggtgcaccgggtgatagggcgcaggtgccgtgggctcggcgatggtggggacatcctccaggccttcgacttcccaggcctcatcgccggcgatgacgagcgtgttgcggctgagatcgacggccacctctccgtgattcgcccaccgcggggtacgagcgcggtgctgcgtgtaatccgtcgggctaccgggcagctcttcgcctaccagcggggcatcgagagccacgttgatgtgcacctggcggtcattcaaaaagcgctccgcgataagcgggatatcactcgtgctctccacctgggtggtctctgcgtacacgccgaagatgccgggctgctcaatagtctgggaggcccccgtgcccaccaagcgggccggccggtccgcgctgatgacggccagcggggtatgcgagtaatgcgcctccaccatcgcgggcagggcattagccaccgcggtgccggaggtcatcacgatgccgacgtgccggcgttggacgcgtgccaaacctaaagcagcgaaggcggcggagcgctcatccaggcgggtatgcacgcgaatatcgctgcgcgcgagaagcgccaaagacagcggtgcgttgcgcgaacccgggcagataaccacgtcggtgaggtgccgcgaaagctgggccgccagtgcttcggccagctgcatcgactccggctgcgcggaggcagtgggctcggtgtgagattcagtattaggcattgcctgcaccacccgtatcgagctcttccatgcccgaatcgaattgctcgaagaggtcattgatcaacccttccaattcggctccaccctggtccacacggtcctggacgtccggcggcagctccgtcggcagctccgtcggaatatcggtggggaggttatcccgcggcgagctcttggtggtggtcaccgtggtgggaacctcggtggtcacggtctcggtaaccggctccggggcgggtttgtcagcatccgctgccgcaccgcgccacaggaagaacagcacgccggcgaaaacgacggcgatagcagcgatggccgcgaagacataggacagggctcccccgcccttcttcggctgctccacctggtagctggacgggaccgggtcatactgcggctgctgatagttctggtcatagccctgctgatagggctgaccataggcctgcgcgttctgggatccgggctccgggaagtgttgttggggacgctgtggcggctgctgttggggcgcgccgaactggcgggtttcgttctcaccggtgacgcggccgaactgccgcgtctcgttgtcgccgttgttgttggtcatgggatttaccttatcgtgcacccgcgccacttagcacccgcccggtgggcgttagtcccgtggaaacctgacccggcgtgccatccgccacaatctttccgccatccgaaccagaccccgggcccatctcaataacccggtcagcgccggcaatgaggtgacggtcatgatctgccaccacgacagtatgggaggcctccaccagcgagtgcagctcagcgatgagcaggtcaatatcggccgggtgcaacccgacggtgggctcatccagcaggtagacggtatggccccggcgcgagttgcgggagcgctgcagctccgtggcaagcttgatgcgctgcgcttcaccgccggaaagctccggagcgccctggcccaagcgcaggtaacccagaccgaccgcctccaaggtttgcagcgcgtggaggatcggcgcttcatctgcaaagacctccagggcctcttccaccgtaaggtcgaggatgtccgcgatggtcctgtcctgccagcggatggacaaggtgtcatcgttatagcgctgtccctggcaatccgggcattgggtataggagcctggaaggaagaccagctcgacctcgatctggccggcgccaccgcaggtggggcactggccttgcttaacgttgtaggaaaagcgcgagaccgtccatttcttcttcttggcctccggggtggccgcgaagagcttgcgcacgttgtcgaagaggttggtgtacgtcgccaccgtggagcgcggggttcggccgattggcttttgggtaatggagaccacgcgcttgacctgcttcggacagtccggccccgtgagcatgtcatggagtgcgtccagcaacgtggatttgccggaacccgaaagcccagtaatggccgtaaactggccgagcccaaagttcacgtcgaggccatcgatggtgtgcgagtacacctggtgcagcgcgatgtccccgtgtgccgggcgcacatcggacttgggcgtggggcgcgggcgcgccaaggcacgcgcggtgggagtatctgcagagtccgccgcctctatgtactcggcgacgggacccgagtacaccacctggccgccgcgctcaccggcgagcgggccgacatccacgatccaatcggcctgcttgaccagttccatgtcgtgttccaccagcagcaccgagttcccctccgcgatgaagcgccggcacatatccagcaccgcgccccgctccaccgggtgcaggcccgcagagggctcatccaggacataggtcacgccatagagtccagagcgcagctgcgcagccaggcgcaggcgctgcacctcaccgcccgagagcgtgtccgtaggcctatccaggctgaggtgccccaggccgagttccaatgcagattcaaaggctggcaggagagccttgaggagtaggtcttccgcgtcattcggctgcggactttggccgttaagcagctcgtaggcttcgctcaacggaagggcattgaattcgtcgatcggcagcccggcgcaggtgaccttgagcgccttcgccgtcagccggcgtccctgacaggtatcgcagcggcggggttccatgaagctcaagacgcgggcgcggagtgtatccgacttcgtctccgcataggtcttggtcaggtagctggccacggagcgccacgtgccctcgtaattgcgctggatctgatccgccccgcggcgcggcttgacggttaccaccgggcgctcctcggtgaagaggatccactcgcggtctttcttcggcaaatcctcccacggtgaatccaagtcatagcccagttcttgcagaatgtcgtggaagttcttgcccgcccaggctccgggccacgcagcaatcgcgccttcctcgatgctcaggctggggtccggcaccatggacgcctccgtgggttcgtggaccacgccggtgccctggcactccgggcacatgccttctggggtattcggggagaaggaatcggagtacaggccctccgggttgtcaccgcagcgcgagtaaagaaggcgcacggagttagacatggcggagatcgtgcccacggtggagcgcgcgctgcttgccgacgccgactgctgcaacgccaccgtcggcggcaacccctcaatgcggccgacctgcgggtccaccgctgaagcgatgaggcgtcgagcaaagggcgcgacggattccaggtagcggcgctggccttcgccatgaatggtgccgaaggccagcgaggacttgccggaaccggacacccccgtcacggccacgagctggccgcgtggaaggtccacatccacgttgcgaaggttgtgcaggtgcgcgtctctcacggaaatcgtcatgcccgccagcctacgctgacctccggacatggaccgtgagctgtgcttttaaaggtgcggccagcactgacgcacacgctcgaaccaccactcgcggcgctcgcccggcgcggcgagcgcgctgaggcgatccggatcgggggcaagggattcggcgcgcaggtgaccgtcgacaagctcgcgtggtgctgtcacatcctccaggaacagcgacccggtagccaggcctgcagcggccggggtgacgtcgatgtcttcgtcgtcatagatttgcggcaaggcggccactgcggcaagtcccatggagattcccaccgaggtatccagggcagaggccaccgtgatgtccatgtggcgctcgcgcaggtgggaggctacctcgagtactttgcgcaccccgcccagcggcgcgggcttaaccacggcgacatcggccgcctgcaattccgccacccgataagggtcgctagccttacggatggattcatcagccgccacacgcacgaaaatcccggcgcgcatgagctgggtgcgcacctccttgagttcctcaacggtcttgcacggctgttccatgtaatccagcggcatgagctccttggccgcggtgacggcttcctcaacgctccagccgcagttggcgtcgacgcgcaaaaccggcacgcgaccctgtgcctcgatgtaggcgcggacagcgtgaacgcgcgcgatatcgtcctctagggtctgccccttctccgccaccttgattttgaaggtgcggcagccgggatagcgctccatgacctccggcacctgctcggcaggaaccgcagggacggtgccgttgacttctacccactcgcgcacgggttccggaaagccttcgtaggccgcttccagcccggcggcgagccagcgggcggattcctccgctccgtactccaggaagggggcgaactcaccccagcccgcggggccatcgataagcagcgcctcccgggtagtaatgccgcggaatttcacggcgaggggcagggataccacgtgggcgcgatcgaggacgtcatcaatgtgcatgaggttcatcgtacgtgtgggggggttgagcgcgacacctgtcatagccggtgttaccttataacagtaagtggatataaccagaagaaggatcctcagatgctttaccttctcatcgcactgctggccatcgccgcagttgtctacctcatctataagaaagtccacgccgcggcctccatcttcgccgttggcgtagtcctgctcatgctcgccgccctcactgggcgcgcggatttccgcaccaccgaaatcgaagccacgggtaatgccttctacgatcagctgctcgtcgtggacgcgctattcaaagcacgcttctccggcatcggcatggcgattatggtgctcttcggcttcgtgtcctatatgcggcacattggtgctgatgccaagacggtcgtggtgctctcctcaccgctcaagcgcttcaaaggttcctactggctggttccagtgggcttcatcttgggcacgctgctctcgctggtgatcccctcggccgcagcgctgtccttgcttcttgtggccactctcctgccagcgctcatcgctgcgggcctgaccccgctgaccgtgggcgccatcgtggtgacctcctctaccattgtgcccaccccacttgaggccggcctcattcagggcgccgatctcaccaacatgacgccgacggaattcgtctacggtgctgtcgcctatgccaccgttcccacgctcctcatcacggccttcgtccacatgtggtggcagcgccactgcgataaggtggatgcccgcaaggctgaaagctccggtgaggtcagcgccgattcgatgcacgatgacgctaccgaggaagctatcgcccgcgccgcttccctgccgggctactacgccgtgcttccgctcatgccgctgctactcatcatcgtctccgccatcctcaaccgcatgggcgttatcccctttgagggcggcatcctcccagtgactgtggtctccctgttcatcgcgatgatcatcgagtccatccgcaagcgcaccgtcacgggtgccgtggattccatctccagcttcttcaagggcatgggcgaaggtgctgcgggcgtcgtggccctgctggttgccgccgccgtcctggtcgaaggtattacgcagatgggcgtcattgacatgctcatcgacgccgccgaaggctcctccggcgccgccgtcatcatcgttctcatcttcgtcgccgcgaccgccgcgatggccgcactcaccggttccggcaccgcgccttacttcgccttctctgaggtagtgcccaacctggcctcgcagacctccatccacgccccgcagatgctcaccgccatttggggtacgtccaacctgatgcgccaggtctccccggtcaacgccgcggtactcattgttgccggcgccatcaaggtcaatcccatccaattggtcaagcgcacctccgtgcccatgattgtggcgacggtgctcaacacgctgtttgcgttcatgtttattggatgaaagtcatcggtgcgaacccaatagtcttccgccaattttgtggaggaaaccaagacacacgagacgtattctgctatgttcttaaccagaactgaacctcagtaagcgtcggctcgtttccgacgttgattgctccaagccgaaccctcgggttcggctttctttttatctgaaagggctaatcctttgtctctctcttaccgcgttggaatagatgtcggaacttattcgcttggctgcaccgccattgaagtcgacgaaaatgatctaccagtaaaaattctcagtgcggtttcgctgatccacgactcaggactagatcccgaccagcaaaagcgagcggtgacccgacttgcttcttctggagtcgcacgacgtacgcgacgtctgtaccgccgtcgccgcaagcgcatgattaagcttgaaaagtttctcaaagcgcaaggctgggaaactctaccttttgagcactattccgacccttaccttccatggaaggctcgcgtggaattggtaaattccttcatccacgatgacgaagaacgaggccgatatctttctatcgcgctacgccatattgccaaccaccgaggttggcgtaatccatattggaaggtatcgagcctgtacgcaccgagcgagcctagcgaggcttttcaacaaatacgcaaggagctggaggcggccaccggccgcgcaattcctcacgatgccaccgttgggcaactcatttcctttgctcaattgggtaccgacaggctacgaggcggtggcaagaagaaagacgacaagaagcccgcaaacgaggtgaagcaggcagttatttctgcgcggctgcatcagatagaccacgcgcgcgaaatcaacgagatttgccgtgtccaaaagatagacgacacactacggaaaaacattttagaactagtcttcgaggctgaatcccccaaaggtgctcaacaagggcgcgtcggcaaggaccccctgcaacccagtcaagaccgagctctaaaagcttctgacgtctttcagcagtaccgtatcgctgctctcaccggaaacctccgtatcaaccgcggcggcgatacctctccccttgatcgcgatgagcggctgattgtttttaattaccttgtcaatctttctcacaagaaagaacccacctggttagacatagccgagcttttgcgcattgaccgtggccaactaagaggaacggccataatgactgacgatggcgaacgtgcaggcgctcgaccacctgtgcatgacaccaaccggacgattctcggctgcaaggtgaagcctttagctgcctggtgggagcgggcctcggatgacgaacgcgccgccatgctcaagtctctgtcgaatgccgaagttgatgatttcgattcccctgaaggagctcaagttcaagctttcttcgcggagctcgacgagaccgagcatgagaagctcgattctctacatctgccgatgggccgtgccgcatactgcgaagacactctgaagcgactaactagccgcatgctggacgaaaatcttgatctttacgcggcacgtttggcggaatttaacatccccaaggattggacccctcccgctcctcgaattggtgaaccagtaggaaacccagctgtagatcgcgttctgaaaggcgtggcaaggtggctggaagcagccgcagacgtatggggtgccccaaagtccgtcgtaattgaacacgtccgcgatgggttcgtcagtaaatcgaaggctaacgaaattgatcgcgagaacaacgcgcgccataaacgcaaccaaaagcttttccaagatatgcaggagaaactaggcatcgaaggaaagccacgcagtgccgacctttggcggttccaatcagtacaacgccaaaattgccaatgcgcctactgcggggaaccaatcacttattccacgtgcgagatggatcatattgtcccccgcgctggccaaggctccaccaatactcgtgacaacctcgtggctgtgtgtcatcgctgtaatctgtccaagaaaaacttcccctttgctgtttgggcagcccagtctggaattccaggtgtgagcgttaaggaggcactcgaccgtacgcgccactgggccgaagattccggcatgtcagcaaaggacttcaacaaattccgtaccagcgtccgcgagcgactgaagcgaaccgccatggatgaaccgatcgacgcccgctcgatggaatctgttgcttggatggcgaacgaactacgcggcagagttgcgcagcgctttcaagataacggcactaccgtaagtgtctatcgaggtgcactcactgcggaagctcgccgtgcttcgggaatatcaggccaactacgtttcatcgatggcactggaaaatctcgcctcgaccgtcgtcatcatgctgtcgatgctgcagtagtagcttttactcaaaactacgtcgcagaaactcttgccattcgttcaaacaaaaagcgagaagctgagctgcttcgctctgcaccccagtggaaagaattcactggagctgatgaagcacatcgcgcggcgtggaatgcttggctgcctaagatgcgaaaactcgccatgctcttgcagcaggcgttggatgaagaccgagtcgtagttacctcgaatctaaggctacgcatcggcaacggacgcgcccacgaggacacaatcggagagttaaagaagatacgcgtcggcgatgctatttcggtcaccgatatcgacagggcatccaccgaagcattatggtgtgcactcactcgcgaagaagacttcgatcctaaagaaggtctgccagagaatcccgaacgacgaattcgtgtgcacggcacttggtacgatgccgacgacgaaatcgaagtctttccagttggtgcaggcgctatcaaggtacgaggtggttacgctgaactaagccgtttccaccatgcccggatctataaaatccccgggaaaaaggcttcctccttcagcatgttgcgggtttataatgtcgatctaatgcagcaccgacatggggacctgttctccgctgagatcaaaccgcagacaatgtcagtccgccaggcagagcccaaactgcgcaaggcccttgccgacggcacggcagagtatattggttggttggttgtagacgatgagctagtcatcgacacctcaagcttcaacaccggacagattgcggaagtgcaaaaagagtttggacaaattcaacgctggcgcctagatgggttcttctcaaactctaagttgcgactgcgcccactttatatgagtgccgagggactatcttccgatgtgtctcaagcctccaagaaagtaatagatagaccgggctggctgccagccgtaaacaaagcttttggtgaaggcaacatgactgtggtccgtcgagatgctctgggaagaataaggctgactagcaaggctcatctgcccatttcttggaaggcagaataatgaactctgggtggcgggtcattgattgtctcaatttgaaggggtctctccggtattcccggggccagctcatcatccatcgagaagatactccaaccgatgtttcgctgccgctagcccaaatcgcagtcgtcctcattggctcagaaagcacaatcagcggtgccgttctccagaagctcagtgactacgacatcgccctcttagtttgcgactggagaaacgttccggtcgccggtgcttacccatggaacgaacattcccggatcggtgctcgccaccaagcccaatcacaattatctttgcccaaaaagaagcaagcttggtctcgaattgtcgcagccaaaatttctggtcaagcttccgttctaaaagcactagctaagcctggagccaaggaactctacgccctctctcgtaccgttaaatctggcgatccagagaatcttgaagcacaggcagcgcgcaaatactggtcttgcatctcccatggtcatgcttacttacgtttacctggcagcggagaacctggctggaattctgcgctcgattacggttacacacttttgcgcggccacggcattcgagttgtagctagcgctggattatctggagcattaggcgtattccaccacggccgcggcaacaagtgggcattggtcgatgaccttattgaaccatttcgaccaatggttgatcaggttgtattcaccgtttctagtgacggacaagcattaggatctccgcaaaagaccctcatatcgcagtatctaaacagccccttcaattccagtggaaaatccttaagcacagcttttaatgagttcagccaacaatatggcctatatatcgagggaaatctaaaacacctaaacgttcccgtctgggaaggaaaactcgatgccggcgaaagatagtgaaccaatgtggtgcgtggtcatgttcgatcttcccgttaaatcaagaattcaaaccagagaggccaaccggtttcgaaaccacctcttagaccttggcttttgtagatcccaactaagcgtttacgttcagtatttccccctcgcctcccgtatcgcgacaaccgtcaagcaaatcaagtctggtctaccagaaggcggagatgtgagaatcatatccgtcactgatattcaatggtcgaaagcgattcgcttttccaaatcagagccttccgaaatggagaataccccacctcagctcacgattttctagcggaggatcaccgataaactccagttaaacgacccttttggggccacactgaagtctatcaggggtaatgagaactgaaccccagcccgtcggcgtacaccagagcgcggcggcgaagtctatcaggggtaatgagaactgaaccccagctgaatctgagcaatctcttctgcactgaagaagtctatcaggggtaatgagaactgaaccccagctatcgcgcatagtcaaatgtgcgtccgagaagtctatcaggggtaatgagaactgaaccccagcacctcgtcgttgttaagggtcatgcctggaagtctatcaggggtaatgagaactgannnnnnnnnnnnnnnnnnnnnnnnnnnnnnnnnnnnnnnnnnnnnnnnnnnnnnnnnnnnnnnnnnnnnnnnnnnnnnnnnnnnnnnnnnnnnnnnnnnnatcaggggtaatgagaactgaaccccagcgttggtcgcgccttctagggctgcttcggaagtctatcaggggtaatgagaactgaaccccagcccttcggggatggtttgcatgtgcctgccgaagtctatcaggggtaatgagaactgaaccccagcccatctgcattgcggcgtcgaaggtgccgaagtctatcaggggtaatgagaactgaaccccagcagccttgctctgcgacgagtgcgcccaggaagtctatcaggggtaatgagaactgaaccccagcggcggacgatgcggacgtctgggatgccgaagtctatcaggggtaatgagaactgaaccccagcaggtcgagggtgatgaggctgcgggtgagaagtctatcaggggtaatgagaactgaaccccagcgggcaattgtacggcagacagaagggttgaagtctatcaggggtattgagaactgaaccccagcctcactaccctgctatcaatagcttagtgaaggatttccagggacgcggaaagtcgaattgtcgcaaagactctgaaattgatctcatcatctattgacagcgaagcgccgtagccctagcttaattcttctaacttcttaaggaggaatcatgctacttgctgaagccttggccgagcgcgctcaggcgcaggagcgcctcaactcgctgagtgaccgactcgcggcaaccgtccgcatccaggaaggcgatgaaccggatgagaacccgacggatctcctccgtgagctggagggcgtaaccaagcgcatcgatgagctcgtcatcgcgatcaacgccacgaacacggctaccgcgttcgacgatgagatcacgctgatggaggcactcgcacttcgtgatggactgctgcgcaagcgccgcatttaccagggattggccgagcgcgcgggtgcgcgccacgaccgctactcccgctcagagatcaagttcgtggccacggtgcccgtgccgaagttgcgcgagcgcgccgacgatctggcccgccagtaccgcgagctagatacccgcatccagcagctgaactggaatacggaactgataactaaataaggtctgccgctagttgtgccgcatgcttgcggcacgccatgtcgttcgacatgtagtcatgttgcgcgccaagcgcgcgacggtagcccacacccttcgcagcgagcgcaacccttactgggcagggaagagcccagtgcttctcaggcgccttcgtagcgcaagaaggcagggaggttcgattccgtcccactgtatggtgtaccgcgctggtacggagtacacgtgcacattgacggggataatcccgcagtattgtttattgtttatcaccgccgcgctgggcggagagtgtgggtgagggtttgggaatggggactatacttccggcgcactgctttgcaattaagctggtgtgccatgagcgagcagaagaactacagcaccgataaccctttcaagccggagctctggcagcccgtcaagggctttgaggatctcacggatatcacctatcaccgacttaacagtgacggtccaaagccacagcgtaaggatggcatcgtccgcatcgccttcgaccgccccgaggtgcgcaatgcgtttcgtccgcacacggtggatgagctttatcgcgcgctggaccacgcgcgtcgcaccccggatgtcggcacggtattgctgaccggcaacgggccttcccagaaggacggcggctgggcgttttgctccggcggtgaccaacgcatccgcggccgctccggctaccgctatgccacggagcacgcgcatgatgacgcgactgccgatgaatccaccgtggacaccgcccgcgagaaggttgagggcggccgcctgcacatcctggaggtccagcgcctcatccgcaccatgcccaaggtggtcatcgccgtggtcaacggttgggccgccggcggcgggcactccctgcacgtggtgtgcgatatgaccattgcctcccgccaggaggcccgcttcaaacagactgacgccgacgtcggctccttcgatgccggctatggctcggcctacctggccaagatggtgggccaaaagtacgcccgcgagatcttcttcttaggccgcacctatgacgcacagcgcatgtatgagatgggtgcggtcaacgaggtagttgaccacgccaatctggaggacgccgccatccagatggggcgcgaaatcaacatgaagtcccccaccgcccagcgcatgctcaagttcgccttcaacctcaccgatgacggcctcatgggccagcaagtcttcgctggagaagccacgcgcctggcctacatgacagacgaggccgtcgaaggcaaggaatccttcttggaaaaacgcgagcccaactgggatgacttcccgtactactactaatcgtcattcctcgaggaggatccacagtgctgtatttcgccattaccctcgcggccatcgcgctcattgccgtcatcgcatcgcgagtgtggatgttacgccgcatccagcaggctcagagggacggtgagcgccccttcgatcaggaggatgagctcatcaacccttacgagcaccgcgggcggtaacctagctaaccgtgaccatcctctctcctctgcctgtcaatccacatgaccccgccgccatcctccctgatctggaagcggccatcgcaggacaagccaccttcctgcccgtcccggcggaggaccgcacccgcgcgcagctcctgcgcaaccacatgcgcgcaggagaacccattgactcctccatcgcgctggtcgtggccacctccgggtccacgggcacaccgaagggcgcgcaactcacggccgccaacttggtctccagcgccgatgccacgcaccgggctctcggcggcaccggccagtggctgctagccatgcctgccgcccatatcgcgggaatccaggtattaatccgctcgctcgtcgcgggtgtagagccgctctgtcttgacctgtcggaaggtttttctatccccgacttcgcctgcgccgcgcacgagctggccgccaccggggatcgctcatacacgggactgacccccatgcagctggccaaggccatggattcgctagagggaatcgaggccctgcgcacctttgacgccatcctcgtcgggggtgctgccacccacccgcaactgttggagtcagcgaagaagctgcgcatcaccatcgtcaccacctacggttcctcggagacttccggtggctgcgtctacaacggacagccactggatagcgctcgtgttcgcctcggcgaggagaaccgcatctacctcggcgggcccatgattgcgcagggctaccgaaacgtggactcagatgccttcgtggtcgatgagtccggcacctcgtggtttgctacctccgacgccggcgcgcttcacgacggccacctcaccgtcaccgggcgcctcgacaacatcctgaacaccggcgggctcaagctccacccagagcagctcgagcagcacatcctgcacgtgccgggagtggacggcgtgtgcgtggtcggcatcccccacccacgcttgggacagatgatcgtcgctgcctataccggatgggcggatgtcggcgatatccttgtggctctcgacgatagtggccttccccggtggcaaatccccaaggacttcaagcgcctggcccagctccccaccaccggccccggcaaggtagaccgcctcgccgtcgcccgcatgtgggacagctaagcctccgcttcgccaaagctgcgtacggcaatgccgcgcgcagcggattccccgagggggaagtgcgcaccgccgtcgacggcaacctcgagcacacccgcaaccgagggggcaacgacggtcaattccactcccggccgcactccatatttatccaggtagcgcagaaactcgccatccgcgtcagtgacctgctccacggtgacgggggtctgcgcggggacgtcgataagcgtaatgcgcgagaccggctcggcagtgccgtccggggcaggtatgggatcaccatgcggatcgcgggcggggttgcccaggaaagaatcaagacgttcaacgagcctgtcggacgtcgcgtgctctagcatttctgcctcatcgtgcacctcatcccaggtatagcccagagtgcgcacgaggaaggtttccaggagtcgatgccggcgcaccattgccacagccagccgccggccttcctcaacaagccgaacaccgaagtagcgttcgtgttccaccagccccttcgcggccaggcgcttgaccgcctccgaagtagtgggcagtttctgccccgccgctttggctagatccccgagcggcatcgcggtattagcgccctctttctcctcataggtccagaggatcttgaggtagtcctgggtgcgttcgggcagctcactgatgtgcatacccccatcgtagttcagcctattgcttccaaaggtttcaggacttatgctctttcaagttcaatctattgaacatcgacattcacttttaataagagaggtttcccgtgaagaaacttattgcgcttcccctcgcttccctcgtggctgccaccgcgctgactgcctgcaccagcagcgactccgccgaagcccaggacgacaatctgacgatcttcgccacgaccggttacttggctgatgcggccgccaacatcgccccggacgccgacatcaccaccatggtcggccccggcggcgatccacacacctaccagcccaccacgcgcgatattgaaaagatgcaggacgccgacctcgtcctctggaatggccttcacctcgaggcgcaaatggtggaccagctctcctccctcggtgagaagcagctagctgtcggcgaacagctcgatactgctgacctcctgccgtggcccgagcaaggcgacaagggcgaaaaactctacgacccgcacatctggaatagccccgagctgtggagccaggtcgtcgatcacatcggcaccaaactcggtgaaatcgactctgacaatgccgaagactatgccgcggccgccgatgcatatgaagacaagattgcagccgcgcacgacaaggccgctaaggaactcgaaaacgcctccccgcgcgttctcatcaccggccatgacgctttcaactacttcggcaagaccttcgactttgaagtccaagccaccgacttcgtgaccaccgaagccaccaagtccgccactgagatctccgagctcgcggataccatcgcggagaagaaggtccccgttatcttccaagataaccaggcgaacccacaggccatcacttctctcaaggaagccgtagaatcccgcaactggacagtcaccatctcggatgaggagctcttcgccgataccctcggcccggaagcccccaccgatacctacctcggagccttcgaacacaacgctaatgccgtggcgaaagcactgagctaatgctccacgttgaaaaactcaccgccggctatccacgcacgccggtgcttcacgacgccaccttcaccctcacccccgcgaccatcaccggactggtaggcgcgaatgggtcgggaaagtccactctggtccgcacgctggtcgggctccttccgccactagcctgcgggtcgatgaccttcgatggcgtcgatcttgcgcattttcggcagcggctcgggtacatgccacaacatgcgaatatcgactggagttaccctgccaccgccttcgacgttgccctgatgggccgcaccgccgggctgcgctggtggcagtggcctagccgcgctgacaaagacgccgcccacgcagcacttgctcgcaccggaatgcaggcacacgcgcaactgccaatttccgcgctatctggtgggcagcgccagcgcgtgttgttggcgcgcacgctcgttagcgatccggaattcatcatccttgacgagcccttcgctggtgttgatgccgcaagtcagcgcgccatcatggatgtactcaaggaactgcgcgacaacggcgtgaccatcctgctggtgcatcacaacctggcggaggtcgccgacttttgcgatgaggtcctcatggtcggccacggccggctcattgctgctggccccaccgaacaggtgctcacagagtccgccattgccgatatgttttccctgccatcatgaacccactcgagcttcttcagaactacacctatacccaggcactcctgggtaccgtgctgatcggtggctgcgccggcgcgctcggcccattggtatatgttcgccgcaccagcctgctggccgatgccatctcgcattcttccctgcccggcctgctcaccgccttcctcgtggccaccgccattggctgggacgggcgaaacgtctggctccttgcttgtggagccctgctcaccggaacgcttgcggtggtctgtattcacctcatcccgcggttgactcccctggggcaaaccactgcgatggcggccacgctgaccacgtttttctcggtaggcatgctgctcatgcagtatatttcccgccgaccattgcctggcaaggccggaatccaggattatttgctgggaaatgcctccacgctcactcgcgcggatgtgcgctccacactcatcatcggtggctgcgtgctgctttttcttttcctcattcacacccggcaggccgcggtcacctttgactcaagttttgcccaggtagccggcattcgcgcctcgttcctcaacgcggctagtttcttcgccctcaccgccatcacggtgctcggtgtcaaagtcgtcggcgtggtactcatggtcgccgtagtcatcagccctgccgccgctgcccgcccctggaccacgcgcttgctacctttcatcgcgctctccgggttcctcggcgcggccaccgctgctctcggctgctatgtctccattgcgcacggcccgctgcccaccggtccggtcatcgtcctggctcaggcagcgctcgtcaccatcagcctcctcagcagaaagctcgcctcatgaccctcgccgccactgcttgtctccttgccgtcctgactgccttagcctgtgctatccccggcacctttgttgtcctcaaaggccaggccatgcttatcgacggcatcggccatgccgtccttcccgggattgccatcggttacctctttacctccgatctggattcgcccgtgctgctcgctaccgcggctgccggcgccttggtagtagcgttggggaccgatgcgctccagcgaagcccactggtgactgctgattccgccctcgggttggtctttcccgccctgtttgccgccggagtcatcttgatctccacgcacatgagccacgtgcaccttgatgtccacgcggttctcgtcggtgatctcaacctcgcggccttctccaaccctaactattgctacatcatggccgcagtgctgggtatcaatgctctcttcctcgcccttacactgccgcgtttatccgccacgacttttgacgccgatttttgtgccgcacgcggggtgcccacgcgcgttcttcacgtcatttttatgaccgtggttgcctgcactgccaccgccgcttttcacgctgccggtgccatgctggtcatcgcgctcatggtattcccgacgatgaccgcgcgactgcttactcagcgcgtgcccacgctggtgttgactgcctgtggcgttgccgcgatcagcgcagtcgttggattttgggttgcctatgtcctcgacgcagctacctctgccgcaatgacagtcaccaatgccgtcgttttcgtcgcggtgctcattatctaccgccttcgccaacgcaccagctcattgccgcagcgaaccacaccagtggcacaatagtgagcatgtctgccttttccgccactcctgccgattggctccagggtgctcgcccgcatacctgggccaatgcctttgctcccgttatcgctggtaccggcgctgccgccgcggcgcatggtttgcactggggccgggcgttgctggcactcatcgtggcctgggctcttatcatcggcgtgaactacgccaacgactactccgatggcatccgcggcaccgatgatgaccgcaccggcccccagcgcctcaccggcggcgggctggccaaaccacagcacgtcaagttcgccgccttcgcttgcttcggcgtggccgccatcgcgggaatttcgctctccctggctgccaacgcagcttggttcatcctcgtcggcgccgtgtgcatcgccggcgcctggttctataccggtggcaagaacc

SEQ ID NO: 3977 - DNA, 23300 bp, synthetic construct
  source 1..23300: mol_type = other DNA
  misc_feature 1..23300: note = Synthetic
gatcaactactttgttgccgagggcctcaatatcaatctcaacacagtaatcctgctctttttgacgctcgccctgtttgcgcaccgaagcgtgaaggacttccttaacgccgtgcaagaagcgatcacctcgacacgtgggattattctccagttccctctttacgccggtgttgcgggcatcatgtcagattcggggttggtggagacgttctccaatgcgttcatttctattgcaaacagtacaacattcccattgttgaccttcttgtcggctgggcttgtgaacgtgtttattccttccggtggcgggcagtgggcgatccagggccccgtcatgctgcaggctgccgagtcgatgggtgcaagcattccccagacaatcatggcgtttgcctggggtgatgcatggacgaaccagattcaacccttctgggctctcccgctgctgggcgttgctggcctgaatgcgcgaagcatcatggggtactgcattctgtggcttgtcatcactggtgtgatcatctgtactggttttatattgctgacgctgttgtgaattgtgttttcgggcagcgaagtggggaaacctagagtggtgtacctcgtttggccagccgctgcgagaacataaaattttgatggcttaacctttcgcatccggcaaaacgtgaaaccttaggcccctaaagtttcgcgtttcccgaaacctcaaaatttcccgcggtaaatctgcctcgcagcgcaggcggtgcgcctagagccccgcgacatcctccgctagcatcgcctggtcaaccttgatgcccacggccgcgcccgcgcccatcgcctgcggcacctgatccggcgagctcaccacgttgcccgcggcccagagcccgcgtatcgacgtcccaccgccgtccacccgcacccagccgtcaggcgtgccgtcgacggttgcgcagccggcctgtttgagcagcgcatcgttggggaggaagtcgggtccggtgaagcaggcgtcgaaggcagtggcgtcgtcgccggcgcttacgaccacgccgattgcggaggcggcgtcgggggccatgcgggtgaccggggcgtcgttgatggtggcgccgagggcgtggagaatgccgcgctctgtatcgtcgataagaagcccgttggggtagaaggtgagctgatccgtccacttggacagcagcttggctatgtttgtggtgaacggcgggttcgcgccgccgatcagcgcgaccttctggccgcggacttcgtggccatggcagtacgggcagtggaagacgcgcgtgccccacagttcccgcaggccagggacgtcggggaggcggtcggtgatgccggttgcgacgacgacgtgacgggagcgcagcgactggcccgtggagagcgtggtgagccagccgccgtcggtggcggaaagcgcgtccgcagtcgcgcgcacgagggagccaccgaaggaagcgaactcggcgtggcccctttccaggagctccatcggcgatacattgtccatgcccagaatgccgtgtgcgtgctcactgaagcgattacgaggctggcctgcgtcgacgagtactacttggcggttagcgcgcgcgagcgtgatcgcagcggcagtgccggcgaaaccgccgccgatgacggtgacgtcggggcggacgtaactgtttggatacgggatgggtcggttgtgcggcatacggttcctcgtggcgcgtgactgatgtggtgccttcgtcacgataatgattcgggacgccagcgcaaacggagctagctccatttgcgccgacttcagcagtaaaaccccagttcgcgcgcgttgtgtccaaaaagtccttagacatgacaagcccaggtcgcgttctcgcgctgagtccaacgggagctagcttcattggatacggaataggggcgtgcttgcatccgccatgggtggctgatgttgggttttcctagggggaaagcgaaaatgcttcgccgttcaaatcgaacgacgaagcattttattttgcgtggaacctagaacgtggacgtccagtatgccttgcgcattgcccatagaggttcatagccaagcttgtattcgcctggctcagccgcgctctcgaagcaaacggtcccgctcatgcttccgccaggattgaccttggcggtttggaaatctcccgaagtggtgatggtgctatcaaccgtgatgccagccggagttgtgagattgaaatcgaactgattgaaatcgacggctttattggagtcgtttgtgatagcaacatcggtgcagatgtgattgttgcccaaaacatcggctccgtcatctcggaatccgtccgcagtgattttcagccccttgatgtcggcagtctctccaatttggagggtgtcgtcacccgtagtttcgttgtccgctgctttctttttctcctccggtgcagcgacttccttctcctcctccggtgcagcgacttccgcgccgtcagagctggctcctgtgtcggtgctgactgcaccgtcctcatcgcccccaaggactgaagagattgctccgagcagaatcagtacaccgaagatgatgaggccccacttcatgcagccgccgcgcttcttcttgggcggttccatctgagggttcgtggcagggttgttgccgaaattcggttgcggttgttcaggcgtgggtgatggcgtgctcaactgctgatcctttcaagagggaaggagaagttggtgtccttgcttgcggaagcaggaaaccgtactgatgtttacgggatattgtatagcacggacagcgcccgttgcggtaatgtaggggaaacaatcagttggggctaaggttaagggtaggttcatcaccgcaaagcgatcctttacagttcctcgcgggtgccctgcgggctgcggcgcaccaagtacccgtccttgacccagtcattgatgtaggccacaccggtcttcggcagctccatgtcggtctgctcccggatgtccaccagcatggtgtcgacggtgagcgcgaaatcggagccggcgacctggcgattgtccccttcaaacaccgaccgcaggatggccaagacggccggggcattcttcgcgcgaagtatcacccaggccgggttcgaggtggataacctgatctgctcaagcgtcgtggcaaccactgagatgctgttcatgccctcaacctaacaacggcaccggacatgatctgcggctttctcgaacgggtgggcggttgccctacatggagctagctccatctacaacagcgccgcccggaaaacaccaggtcgcggcctggcggttggcctagatggagctagctccgtttgcaccagcgccgcccgtatcgcctggcctggtgaaacgcccacgaaacacccacgaaacgccagccaagccagccaactacccgcccatcccagacttccacgccgcgagcgtcgtgtgcagcgggcgcggcgcgaagttcaccgtgtacgcccccggctccgcctccgccttgaagcacagcaccccgctgttggtttgcccgtgctcaaacgtcaagttcaagtggttgaaaccgggcgcgtagctgggctccacggtcttcccgctcggcatcgtgagcatgaagtcgctcttggaaatccactgctcgtcgttggtcatgttgaggaacgacacgtcgttgcaaaggaagttgtcctcgccgtatttccccatgtcgcgcactggcccgacgccgatgcgcaggcccccgacgttcgccacctcgccggcctcgagtggcgtgagctcgaaggcgcttttcgacggagcctccatccccctcggactcaccggaaccggatcctgcaccccggatcttgggtcgtaatcgtccgggcggtacatggcgggctcctcgcccgcctccttggcttgtgaaatccgctcatccaccgccccgaaattcgggaactcagcctctgccgtcggcgactgttcccgaccctccgtagtctccgccccgctggggccattggtcatcgaggtgtagatcaacccgatcgccccggccaccgccagcgccagcacgatgacgacccaccagttcttgaactcaaacagcgttctttcctccgggtcggaagggacgtcgttgcgccagtgctgccccgacccgaactcgcccggcccaaacacaccggacccgccggccccgggctggttcgaactcggctggtacgagaagttcttgtacggattcgggttcttgctgctcatgtgctggtcctttcgggagggccggcgaggccgcgccgggcgcggcaacgcttcgaacacccctcacagtaccggccggcgcgcccccgcactcgcccatgacaattgtcatgcccacctcatgacaaaaaccagtgcgcgctgagtcgcccatacataggctgcgaatcatgtccaccgcagcagtcgcttccagctcccgccccgtcgccatccacgtcgcggacgtgaccaagacgttcactccgagtggcaagcatccggtccacgcgctgcgcggcgtttccttcgacgtccgtgtcggcgagatcgtcgctctactagggacgaacggcgcgggtaagtccacgctcatcgacatcatcctggggctcaccacggccacgtcgggccaggtgagcgtccttggcggcacacccaagcaggctacggggaacgcgcgcatcggcgcagtgatgcaaacgggaggcctgctcacggacatcaccgtcaaggacacgctcaacctggtcgccgcggcgttccccacgcaccggccgctggatagcgtcgtcgagcgggcgaatctggaaccgattctgaggcgtcgcgtcggcaagtgctctggcggcgagcgccagcgactccggttcgcgctcgccttgctgggcgacccggacatcatcatcctggacgagcccaccgccgggatggacgccggcgcgcgccacgcattttgggacgcgatgcgactcgaggccgccgctggacgcaccatcattttcgccacccactacctcgaagaagccgaccagttcagcgagcgcgtcatcctcctcgaccaaggccaagtgcttatcgacgccccctcgctcaccctcctggccacctcccccacccgcctgctcaccgccgagttccccgcgggcatccccgacgacctccacctaccggccgacgcggagctggagcgcgacggcaacatcctgcgcgtgcgcaccgccgacgccgactcgctcgctcgcgccctgcttacctgcaccgacgcctgcaatctcaccatcgccgcccacaccctcgaggacacgttcctcgagctcacgcgcaagaacgccaaccaaacggagtgacccatgaccaccacgcaaaccccgacgttttccaacaccctgtcctacatcggccacgacctgcttcgcctgcgccgagaactcaccgtcctggtcttcagcgtagttctacccatcttcttctacctcttgttcggtgcgatggacgattacgccgacgagccggtcaacggcggaaacatctccgccctggtcatgctggggatggcggtctacgcgggcgtcaccggcgcggtcggcgccgcggggtccacgatcaccgaggcggagagtggctggtcgcggcagctggcgctcaccccgctgcgcccgtggcagctcacgctgtccaacatgtgcaacgtggcgttgcgcgccatcttgcccatcgcctccgtctttattgtcggggcgctgaccagggcggagatgcagccgcacctgtggttcctcgcgttcatcacctgcgtactggtgtgcatccccttcgggttctatgggatggcctgcgcgatggcggtgccggggagtaatacggtggcgatagcgtcgacgtcgatagtcttgctcagttttgccggcaacctgttcattccgctgaaggagccactgctggaaatcggccgcttcaccccgatgtatggcgcggcggcgctggcgcgttggcctgtctcgcgcggcacgcagctgctggccagcggtacaaccaccgacccaatgtggtgggcctgggctaacatcgcggtatggacaacggtgttcgtcaccgcggtgttgctcctccggcgccgcgacaagaaccggaagtagccggggtgttgtctgcgccgttgcgtggcttcaacaccagcaacaccctgtttgccggcgtgtggctggtgttcctcgcgcccgccatcatcgccgtgaccgcggatcatgcgcacgcgcccgggttcctctcggcagaggccggtgtcgtcctcatcttctgtgtcgcctacctgttcagtttcggctccgcctcctacttcccgcgcggctggtctagccgcagtcgcgtggctgcgcgctgggcgctactggtgcttgttgcgctggcgtcgatccccgtgttcggcgtgagggcagtgattttcatgccgtacttgggcgccctactggcgtatctcgcgcccgtccgagccgcgctgcccgcgatcctggctaccggtaccgtcgtcctcgcggtggtgtggcgcacttcgcctgccgacgcccccggtaccgccatcatcgcatttgggctaccactcctggtgctggtcctcggcgtgctcacgcgccgcaaggaagccaccaccgagctcgagcgtgacctggacctggctcgccagcgcgaggacatcgccaccgacgtccacgatctcctcggtcacacactcactgtgatcaatctgaagtcggaggtggctcgccgggccgtcgataatgaccccgcacaggcgaaacatgaactcgcggagattgcacagctgtcccgccagtccctcgccgaggtccgcgctaccgtcacccgcatgcgcacgcccaccctcgccggcgagctggaggctgcgcgccgggcgctgtccaccagcgggatcgccgcccacctgcccgaatgcgcgcccacgaaccacgacgccctcttctcctgggcgctgcgcgagctgaccacgaacgtgatccgccactctggagcccgaaactgctgggtcacgctgacccccgatacgctcacggttgccgatgacggcgccggcttcacttccaccaccgccgaccacgccggcggtctggccggtctgcagtcccgcctcaccgaaggcgcgctcctcatcacccgcgagctggggcgcactacagtcaccctgtcgatgggccgcccatgatccgcgtcctcatcgccgaagaccaggcgctcgtccgcggcgcactcgtcgcgctcctcggcgccgaaccggacatcgaggtcgtctcccaatgcgccaccggcaccgaagtcgcggggttgctcgagcaatcgcctatcgacgtcgcactcctggacatcgaactccccggccgcaacggcctcgacgtcgccgccgacctggccagtcacccctgtcgcacgctcatcgtcaccaccttcggccgccccggctacgtgaagcgagccttggacgcgggcgttgacgggttcgtggtgaaggacactccgcctgaggaactggcctgcgccatccgccgcgtccacgccggctaccgagtcatcgacccccatctcgccagcgaaagcctcttcgcgccgaacaatccactcacagaccgtgaacaagacgtcacccgccttctgctccgaggcctcggcgcccccgacgtcgccgccacgctgcacctttcctccggtacggtgcgcaaccacgtgtccagcatcattgccaagacgggtgccggaaaccgtttcgaggcggcccggcttgctgaggacaacggctgggtgtgacgtctcgccggcacccgaggccgccgcccagacggcgctagctccatttggcgacaacgcacctgcaaaaccccaggtcgccgctcggccgctgatccaaacggagctagctctattggtggccagccacagccagccccaccagctccgccaaccacactgcccacactccccgatattccacgcctcgacccggtaaaattacccacaaatccagaaaccaccccaggagcagcgatgaaccaggatctccccgtcaatcgcccggaggtgttcggcgacgccgactccaccgacgatgccgaccgcgcaacgcgcatcgataccgtgaacgccgtggaaccgaagccgggcggcgcgcgcccagcggtcaagcgcatgttgcagggcgacggcgcgaacctcatcgtgttcaacttctgccctgggcagacgcttccggaccacaaggcggcgcacccgatcacggtgcagtgcgtcagcggatcgcttgagttcgagtgcggcggcgaccgctttccgctgcagccgggcgaggtcgttcacctgcgcgcatacgtgccgcacgcggtgtactgcccggatgacgccccggaggagggcaacgtgctcctgctcagcatgctcaccggagaacgccactaaattacaggtgcacgacctccacgtcgtcccacgcctccgcgaggtactcggcggcgacgagccggtggcaggtggaggggtcggcctcggagcagaggagtacggcgtcgctgaaaagctggcgatcgagcgacgagacctcgccgtcgtcgtactccgcgcggagcttgcgcgcgaactcgtcgaactcgatctcgtcgtgtcggtaggcgtgcatgaggtcggcgctgggcgcgagcgacacctcgtgcgtgtacggcatgtccaggatgaccttgaggaagtagcgcaggtcgtcctttttcgtaaaaccggcgagttggttcgtgttggagcggcggatgtccactacgcgccgggcgccggactcgcgcaggatgtcaaagaactcttcggcgcttttgtgcgaaaacccgagtgtgtagatccgcattagatgatgaatccttgccagcgggcggcctgcagcgattcgtcgagaagctcgcgcttgggcgtcagttgcttgaccacctggttgatgtagctgtctacgtgctggttcgcgttgcgaaggtcgtagtacgtggtcatttcctggtcgtagtcggcgagtgcctcggaccagttggtgcggtgctggtagccgttttccatgacgcggaattccggcgccatgcgcggcttgagctgcggattctgccccggccagccgagcgtgagtccgacgactgggaacgtgtagcgcggcagccgcagcgtctcgatcaccgcggccgtgtcattgtggatgttgcccaggaagttcgcgccgagcccgagcgattcggcggcgttgaccacgttctgcgccatcaggcacgcgtcggtgaacccctccacaaacaccttcgtcttgcccgcgccggtcgggtcgtagccctgttcgcgcaggatggcggcgttgcgcgcggaatccacgatgaacagcaggtacaccggcgcacgcttcacgtactcctgattcccgatctccgcgagccgctcccgcagcgccggatccgtcacccggatcacgctggcgtgctgcatcccgcgcgagctcgccgtgcgcatggccacgcggtacagcgtctccagcgtctcgtcgctgacgggctggtcggtgaactcacggatcgtgcggtgcgtcagctgcgcgcgcaccgccggcggcgcgtcgatggagaggtcttcgggcttgggcgcgagtgcatcagtcatgcagcccacgctaccgcaggaccaatcgcttatcgacgccccgctgtccccacctcacctcctcccaaaattccggcgctggaccctcgcgttgctccaaccggtggtcggaaacatggcaaaatgcggggaaaagtatgaatgaaattggtgaaaatggtgcgaatgtcgcgggtctggactaccatgtgtgttgagaattgaacctcagtaaggtgtcgcctcgattgcggcactgattgctccaaccggcgcctcgtgcgccggttttctcataggaagatcacgaacgatggcagttactcctgtcccataccgagttggaattgacgtaggtacgcactcagtcggattcgccgcaattcagatggatgagaacaaccttccactcaaaatcttgagtgcagtctcgctcatccatgattccggagttgacccggacgagaacaaagccgcgatttcgcgccttgcaaagtcaggtgtcgcgcgccgaacgcgcaggctttataagcggcgacgtgcccgcctccgacggcttgaagcgtttcttactgctttggggtggcgtacggtgccttttgagaactacagcgacccctatcacccgtggaaagttcgcgctgaactggtcaatgggtacattgctgatgagcaagagcgtggagagaagctttccgttgcggtgaggcatattgcaaatcaccgtggttggcggaatccctacaagggagtctcgtcgctgtacaatcccggcgatgcgagcgacaatttcgaacagatccgagcggagctgtccaaaaagaagggtatagcgatcccgaaggactgtaccgtcggtcagctcatatcgtttgcatcgttcggggttgaccgtttgcggggcggcggtaagaaaaaggacgccaagaaacctgctgatgaagtgaaaaacgcagtgctttctgcgcgcctccaccaaagggatcttgctcgtgaggtgaacgagatctgcagagtgcagcgcattgatgatgacttgcgcaaggaccttcttgaccacatcttcgtggcggaatcgccgaagggagcacaggcagggcgcgtagggaaggatcccctgcaaccaacccgcaaccgcgcgctgaaggcatcggatgcgtttcagcgttacagaattgcttccataattggcaatctccggataaaggacgcgggtcccctttcctcggatcagtttgcactggtttttgaattccttgtgaatgcagacccgaaaaaggatgtgtcatggaatgacatcgctgatcttctgggcattgatcgcggggatttgcgaggtactgccgcaattacggaggacttcgaacgagccggtaatcgtccaccgatccatgagacagcaaaaattttctccacgacaaagatcaagccattaaaggaatggtggagcctggcttctcccgctgcgcgaagtgcaatggtcggtgccatgtccaacggtgcaatggagcaggtcacggccgagccgatggcagaagtcgaatcgttttttgcttcgctttcggaagacgaacaggcaaaacttgatgatgtgcatttgccgatggggcgtgccgcatacagcgaagatacattggaacgcctgacggccaggatgattaaggaaggcaccgatcttttcaatgcgcgaaaggcagagtttggcgtggcaaacgactggcgcccgccagccctcccgattggggagcgagttggaaaccccgctgtagatagagtgttaaaggctgtcgctcgattcctggccgcggcggagaaacaatggggtgcgcctgccgcagtcgttgtcgaacacgtgagggacggcttcatcagtgaagcgaagacgcgcgagctcgagcgggacaacgaacggcgtcgtaaacggaatgaaaagctcgttgaagaaatgcaccgtacccttggcatccaagggaaggtacgttctggggacatctggagataccagtctgttcagaggcagaactgcaagtgcgcctactgtggggagacgattacgtatcacactgcggagatggaccacattgtgccgcaagcaggtcccggctcaaccaacacccgtgataatctcgttgcggtttgccatcgttgtaaccttgcgaagaaaaatgttccgtttgcgacttgggccggacgttgcgggattcccggcgtgagcttgcagaacgctattgagcagactcgcttctggtcggaagatgaggggcttacgcgcccacaattcaataaatttaggaacagtgttcgtgcacggcttcgtagaacctcactcgacgagccactagataatcggtctttagagtcagtagcctggatggcgaacgaattgcatgcgcgaattgcccagcatttccaggcatatggcacgaaggtcaatgtttatcgtggtgagctgacacatgaggcacgcctcgcttctggtattcacgaccgaattcgatttgttgatggtactggcaagagtcgacttgaccgtcgccaccacgctgtcgatgctgccgtagtgagcatgacgacgccgtacgttgccgaaactctttcgttaaggcggaaccagcaacgcaaccacaggcttaccggtcaagcagggcaatggcgtgagatctgcggcatcgacgtagagcatcgcgctgcttggtccgcttggaagcggagaatggatattctcgctgagcttctcgccgccgcgatgaagaacgatgagcttgtagtcacgtcaaatcgacgattgaggccgggcaatagccgggcccatgaggacacgatcggtgagcttgaaacgcgaaaggtaggtgacgctcttccagcagaggtaatcgacaaagcctccaccgaagccttatggtgcgcgcttacacggcatccagactttgatccgaaaaatggactgccagaaaacccgcaacgaaagatccgggtccacggcacgcatttaaacgcgaacagcgagattgggttctttccaatcaagtcaggggcggtagcggtccgtggcggatacgcggagttgagccgattccatcatgcgagggtctacaagatccatagcggcaagaaaccgacatatgcgatgcttcgcgtttatgactacgacttgcggaacaaaaaagacgtagatgtgttctcggtagggatccctccgcaaacgatgagtatgcgacaagctgaacctaaacttcgccgctctttggcggaaggaagtgcggagtacctaggttggattgcaccgaatgatgaatttgtaatcgatccattgttaatccaggggcccgacaccgaagccttatttgaagcgtatggacacatagatcggtgggtgcttaagggattctatgggagaagcaaattgacgttgttccccctaatgctgagcgccgaggggcttcaacccgacgaagatccccgggtagctaaactgctaaagaataaaggactaattaaaagcgtgaatcctctgttctcggcaggtgagatccaggtcattcgtagaacgacgctaggccgagaacgatggaagtcgagtgcacacttaccggtttcttggaagtcccgatgatatgaatccgggttggaggatcatcgatctcacgggattctgtggcgccattaagtacgagcgaggctgtcttagggtagtcagccctgataccgatcagcgtcttcctctggcccaattggcagtcatgttgatcggggtggcgacctcgatttcaggtgcagctttggcgaaactcggcgagtatgatgttgctgtgctggtgtgcgactggaaaggcatcccagtcgcaggtgcattttcttggaacccccacactcgaattggtgcacggcaaagggcgcaaagcgagctcaccacgcctcgaaggaagcaggcttgggccgctactgtcactgcgaaagtgcgcggtcaagttgctacagcggaagcgctcactggcagcaaacaacctgaattgagggcgttggccaagagcgtgcggtctggcgactctgggaatgtggaagctatagcggcgaaaaaatattgggccacattaaataccccgggtgattttaggaggcggcctggaggcggggaagatatagtaaattctgcgctggactatgggtacacagtgcttcgtgggcacggaattcgtgctgtgaattctgctggattggcaggggcgctaggaatgttccatcgggggagaagcaatcaattcaatctagtagatgatttgatcgagccgtttcggcccatggtagatcaagttgtttttcgccggtgtgggctcgatgacggcactgatctaacgcgggaagctaagcaggaactaattacctccattaacctagcttctttcgacagaactggtcggactgttcctaccgcgctggaagaatcagcccagagctacgggcagtacgtagagggagaattgaaaaagttcgttcctccaacttgggacggtgatctcagtgcctcgaaccgggagtgaacccatgtggtgcgttgtgatgttcgaccttcctactaacaccagcgtagaacgaaaagaagcaacgcgattccggaataccttgcaagacctgggtttctgccgcgcgcaatttagtgtttatgtccagtattttccattggctgcgaggatcgcgaagactgtaaaatcgatcaagctccatctccccgcgggaggcgacgtccaaatcctttcagtgacggataaccagtggtctaaagcgatccgtttttccgatgcacgcgagcgtgacgtagaagaaaagccatcacagctgacgattttctagagctttggtttgtaaaaaccaaagctcatagcacattttttgggcatgctgaagtctatcaggggtaatgagaattgaaccccagcgggttttgtagacgtgctgtgcgcggcagaagtctatcaggggtaatgagaattgaaccccagcgaatgagattcgtcgtgatgggacttcggaagtctatcaggggtaatgagaattgaaccccagcacggccattaacacgcgccgccccaccagaagtctatcaggggtaatgagaattgaaccccagcgacatgccgatcagccgcgtgcggcactgaagtctatcaggggtaatgagaattgaaccccagcaatgcgacgtcccggtgatttccacagtgaagtctatcaggggtaatgagaattgaaccccagcggtgcgctcgcggtcgctgtgctgggcagaagtctatcaggggtaatgagaattgaaccccagcgcgcgaccccatcgagcgatacgccgtggaagtctatcaggggtaatgagaattgaaccccagcccatgcgtcgccggcgtgcgcggtgtcggaagtctatcaggggtaatgagaattgaaccccagcccaggatcgagcacgccccatcgagccagaagtctatcaggggtaatgagaattgaaccccagcttgcggttcgattccgcagctcgacaccgaagtctatcaggggtaatgagaattgagccccagcggctcatccccgctgacgcgatttcaatcacgattgtagcggtgacaagtttatgttgtatcggacactcttggcgccccgcccgtgccacaatggcgttatgcacatctacttctcctctgtctacggttccacgaagcagtacgccgaggagctcgcgcgtcgcctcggtaccaccgcacaggagattccagatcccgccgaagtgcccgacgccgctgcaaaccgaccaatcatcgtcctcgcgccggcgcacggcccgatgaacgcggcggccaagttcgcaaagtcgctccctgaaaccacgatccaggcccgccccacctgtgtggtcacggtcggcatgacgctagaccatgtagtcagagaggcagaccccacggcggaactgctcggcgaccgtgcggaccaggtacagcgcttctatctccccggccgcctgaactactcggagctcaccactgcgcacctgggcgtgatgcgcggaatcattggcgcgctcaaattgaagccacggaagtcggaaaacgagcgctcgatgatcgagatgtataagaaggacaccgatcgcgtcgacctctcgcgcctcgacgagatcgtagcgtgggcggaggcggcgaaaaacaaatagaaaagatataaaaagatatcgaaacaattcgcctaccagcataaacgacaaaaatcgccccgcgaaacccggcctatctctttccgatatcttttccgtcccgaaaatcgcgccgaaaacaattccctggggaaatgcgtcgcgggagcgggagcaccgggcgtcgataagccgcagataagcgatggcccctgaccgcgccgggcctactacactgcatacctatgactgaggcgaatactcccgcgaactcccaaagcaccgcaggccccccgcaccgctattccgcagagctggccaacgacattgagcagaaatggcagtcgtactggcgcgagcacggcacgtttaacgcccccaacccggtcggcgacctggctaccggcgaggagctgccgaaggagaagctcaacgtccaggacatgttcccgtacccatcgggcgcgggcctgcacgtgggccacccgctgggctacatcgccacggacgtgttcgcccgctacaaccgcatgctgggcaagaacgtcctgcacaccctgggctacgacgcgtttggcctgcccgcggagcagtacgccatccagacgggcacgcacccgcgcacgaccacggagaagaacattgacaacatgacccgccagctggaccagctgggtctggggcatgacaagcgccgctccgtggccacgacggacccggagttttacaagtggacgcagtggatcttcctgcagatttacaacgcctggttcgacgaggaacagcagaaggcgcgcccgatcgaggacctggtgcgcgacctcatgaccggcgcgcgcacgaccaaggacggccgcaacttccgcgacctcaccacggcagagaagcaccaggctatcgacgaattccgcctcgtctatctcgacgactcgatggtcaactggtgccccggcctgggtaccgtgctggccaacgaggaggtcacggcggagggccgctcggagcgcggcaacttcccggtcttccgcaagcgcctgcgccagtggatgatgcgcattactgcctactcggatcgcctgctcgaagaccttgacctgctggactggccggagaaggtcaagagcatgcagcgcaactggatcggccgttcgcgcggcgcggaggtcaacttcgactccgccgcgggcgacatcaccgttttcaccacccgcccggacacgctgttcggtgcctccttcgtcgtgctcgctccggagcacgagcttgtcgacgccctcgtggccgacgcctacccagaaaacaccgacgagcgctggaccaacggccaggccaccccgcgcgaggccgtcgacgcctacaagcgctccatcgccgccaagtccgacgtggagcgccaggagaacaaggaaaagaccggcgtcttcctgggtacctacgccaccaacccggtcagcaatgagcaggtccccatcttcatcgcggactacgtgctcaccggctacggcacgggcgccgtcatggcggtgccggcgcacgacgaccgcgactacgagttcgctaccgccttcggcctgcccatcgtccccgtgatcgagggcgacgtctccgaggccgcgttcaccggcgatgcaacgcacatcaactccgccaacaacgatggccttgacctaaacgggttggggaaggccgaggcgattgaagcggcgctgcggtggatcgtcgagaagcaaaagggcgcggagaagatccagtacaagctgcgcgactggctgttcgcccgccagcgctactggggcgagccgttcccgatcgtgtacgacgagcacggccaggcgcactccatcccggaggatcagctgccggtcgagctgccggacgtggaggactacaagccggtctcctacgagccggacgacgcggactccgagccctcgccgccgctggccaaggccaaggattgggtcgaggtgcgcatggacctaggcgacggggagaagacctactggcgcgacaccaacgtcatgccgcagtgggccggttcctcctggtaccagctgcgctacgtcgatccgaccaacgagaacgccttctgcgacctggagaacgagcgctactggacgggcccgcgcggcgagaacgacccgggcggcgtggacctgtacgtcggcggcgtcgagcacgcggtgctgcacctgctctacgcccgtttctggcacaaggtgctctttgacctgggatttgtcagctccaaggagccgtaccgccgcctgttcaaccagggctacatccaggcctacgcctacacggattcccgcggcgtgtacgtcccggccgccgaggtggaggagaagggcggcaaattcttcttcgacggagccgaagtcaaccgcgagtacggcaagatgggcaagtcgctgaagaacgcggtcgccccggacgacatcgccaccgacttcggcgcggacaccctgcgcgtctacgagatgtcgatgggcccgctggacacctcccgcccgtgggcgacgaaggacgtcgtgggcgcgcaccgcttcctgcagcgcctgtggcgcctggtggtcagcgaggagaccggcgaggccaacgtcaccgacgccgagctttccgaggacgacgcgaagcagctccaccgcaccatcgccggcgtgcgcgacgactacgagcacctgcgcgacaacaccgtggtggccaagctcatcgagtacgtcaactacctcaccaaggcgtacccgcagcaggccccgcgcgccgcggtgaccccgctggtgcagatggttgcgccggtcgccccgcacatcgccgaggagctgtgggccaagctcggccacgccgacacgatcacgttcgagccgttccccaccttcgacgagtcgctgctcacggatgacaccgtggagatcccagtgcagatcaacggcaaggtcaaggcgcgcatcaacgtcgccgccgacgcctccaaggaggacatggaacaggcagcgcttgacgacgcccgcgtgaccgaactcaccagcggcaagcagattgtcaagacgatcgtcgtgccgggccgcatggtcaacctggtggtgaagtagggaagtcctgtccgtcccctgccgaggcgggcgttatcggtggggcggctgttatcatcggccgcatgactacaccgaacaatggaaacaccccgggcgacaatagcccgagcggggactccccgtacggctacgagccgtaccccgacaacccggcggggagccacccggagaacactggctcctccgcgtggaacccggacagcgccggctccgccggcaccaccggttccggtcagtccgacttcggccagaacagcgctggcgccgacgggtacggctccaacgagtacggctccaacagctacggcaccgacggcaccgccccgtacggccagggcggcttcggcccgaacgggtacgaacagttcgatgtgaacgccgcggctggtgccgtcggcgcgaccgcgctgcgctaccacggccaggagctcaccgacggcacttacggcgacggcgcgaccccgcacccgatcaatgacccggccaacaacggctggacgcacaccaagggcaacggcaagctgaacattaccgacgcgttctcctgggcctttaagaccacgttctccaactggaaggtctggatcgtcctcggcctcattgcgtgtgcgtggcagtggctcacggtgatcgtcccgaccggggtactcggcattgtcccgttgtttgtgtacccggtgttcttctctgccgcgctgcagcagacgctggcccgctcgttcgggtggggcgacatcaagactcccgcgtacgggaagaccctgggtgttctggcggtcttttttgcagttgttaccgtcggcatgtttgtgttcctcaccattggcatggttgccggcttcagcagcgtggacctcaacgcattgccagagaacccgacaagcccggaggatttcaaggcgctgcttcccctgctcggcccgctcctcggctccatgggcctgttcgggctcatcggactgctcgtgtccccgttcttcatgacgaccgtgtggtacgcctctgagaacaacggctccttcggtcaggcgtttagcaagggctttgccgacggcaagcgtaactacctgccgctgttggggctggctgtgctctctggcctgctcagcttcgtgggcagtgtccttgcgttcctcggcatgatcattgccaccccggtcgtgctcctcgcgcaggcgcacgcgtaccgccagatctccggcggcccggtcccggtggaggacgagttcccggcgcaactctaagcgcttaaccccgaaacgccccacgcagcccaccggctgcgtggggcgttcgctatgtatcactcaacttgcaatgtgacacaacactcactttccggtcgcgcaatggtccgcaccttgttacgctccgaaccatgacgagaccggaatccccgtacggccccgataacaaccccaataacaacccagcgttccacggctacgaccagtaccccgcgaccggtgcgaacgcaccgcagcccagcgtcctctcccattccgtgaacgccatgaagttccacggcaagcagcttatcgacgacacctttggcgacggccgcaccgcgcaccccatcaacgcccctgagcgcaacgggtggatccacatgaagggcaccggcaagctcaatatcggcgaggcgctcacctggggcgtgaacaccacgttctcccgctggaagttctggattccgtgcgggctcgggctgctgctggctatgttggccggcgcgattccgatcgtcgggtggctagtcatagccgccgtgtacccgctctgcctctccttggggctgaagcagacgctggtgtacaagaacgagacatcggagcagggcacatccaccttctgggtgacgctcggcatgtatatgctgaccgggatcatgtcgcttggcgccctagcgctgatcgtcgccattgctgagttgctgcgcctggccactggcaatcctgcgcctcctctacctgcggggtacccggttgtggaaccggagttgaccccctttgattacgtcgccttcttcttgttcttggccaccctgccggtcttctgtctgcaggtctggtacgcggcggacaacggcgccgatttcggcggctgcatcgtcagggggttcaaggcggcgcagcgcaactacctgccgttgctggggctcatcgttgtctcgttcctcatcttcgtcctcggcggggtagcggtgggcgtcggcctcatcgtcgcggtgcccgtcctcatcctcacctgggcgcatgcctaccggcagatctcgggtggcccggtgccgtcgaaaagcacgctctctgtacgctaacggcaaagggctgaggtcacggattggtatcgaccccaaacatttcccccaatcgctgctagtctcaggcgcatgagcaccccgaatggtgggcagaacccgtacgcggagcacagcaccccgccgccgacacagcccgcgggcgggctgcgcctcctgcccgcctacgcgtgggcggtgcgcgcctgggtaaccaacctgatcatctggggtccgctgagcctcatctgcttcatcgggttgtcaacgcggttttggcaaacgttcgctctcctggcggtgccggtgttgatttcgctcgcgatgcagcaaaccacggtgcggcgactcaagctcgatgagatcagcctgcccggctttgccaacctcctggtcctcgcgttcctcttcgggctctttgtcggcggcttcgccatcaccttgttcttcgtgttccttggcgcgtcgatgtggaggttcgacccgagcgggcatacgtcggaacagccctggtacgaggccggcacgacatacgtcttgctcggtggcgtactcatcttcaccgcggcgacagccttcgtcgcgttcgtcccgttcgccgcggcggacggccgcaccagcttcggctccgcggtcacactgggcctacgcgcgtcggtgcggaactggttcaaggtatttctcgcggtcgccgccccctacgccttgatgatcgtggcggtgtggaatgatctcaccatgttccccggctccaggtacctcacctgcggcgtcgccgcgctcgtcttcccgctcctgttcctcgccctcgcacacgggtactgccaggtcaccgagggcttcccgcttatcgacgccaccgccaacccccatgaccgctaaccccaaaaccatcaacgcccgcgccgccttcgagtggtcgatccgcaccgtgctgaacaactgggcgatatgggtgccgctcacgctcgtcgccttcctcgcgtgggtcgtcctgtgggtcctgctgcagttttatggccacctgatcgtgttcatgctggcgtcggccctgtttgccatcgtcgccctgcagcagacgcagcacccccggctgcgcctgaccgagctggagttcccccgcgccttccagacactcggcgcgacggcggtggtggagctcatcggcttcctgagcttcgccctctggctgggtattgcagccccctccttcgccgcgctggtggacccgtacggtgagcgaccacccaccccgctctacgccgacccagccgcctggttcatcctcggcggattcgtggcctttgttgtgctcgcgcccctgtgcagcttcctgcccctcgccgccgctgacgggtacggcctgctggccgcgacgaagcgcgccgccgcgaactggctgcgcctcatggcccttgaagccttgtccctgctcaccctgctcatcggcgcagtctgcatcggcgtcgggctgctggtggcggtgccgatcgtcgtgtgtgcgttcgcccacgcgtactgccaggccgtgggccgcacagtggaggagcccacagaaccaacagaacccgaaaaacccacacccgcccccacaccagcccccggcgaaaacccgtacgcccaggccagcaacacgtacatcgacccgcaggcctggcctaccgagcccggcaccgggcgggtccgggtgcgccgcgcgttctcctgggcgtgggccgcgttcaccggaaactgggccacgtgcgtgcagctgacgttcgcgttcctcgtcatcagtgtcgtggctggcaacccgctgcttttcatcgttgcgctgttcctcttccccgccgtgtggtttgtcgtggtggtcccgtttgccgtgtcggcggcgctgcggcagacggaccgcatcacgttctcgatcggggaggcgaagcccctgcacttcgcgcagaccgtggtggtcgggctgttcgccgccgcgatttcgtggccagtgccctccgccgtgcaccgggcgcttcaccagacgttgccgtgggacgtgccggag

SEQ ID NO: 3978 - DNA, 23300 bp, synthetic construct
  variation 840..1271: note = note, n is a, c, g, or t
  misc_feature 1..23300: note = Synthetic
  source 1..23300: mol_type = other DNA
  variation 4140..4601: note = note, n is a, c, g, or t
accgagcacatcgtgcagagcctgtgcgaggacctggcagaggcccagaagggcccggatagcccggtgcgcgccgctttgtggtcggtcggtttctcccgcaaacccacccaggtcctcggcgccgagggccgctataccttggagtcgcgccaccacatgttcgataaggccatttccttgggccagaccacgtgctccggcccgccacccttccgcacgcagcaattgctggcgcttgtcgatgccggcatcgtcagcttcgtcggcggcaaccccgtcttgggcacgaatgccgacgccggggaatggaccatcagctccagcgcctctggcggcaagcgcatcccgggcacgacgcttctcgatgcctgggtgcacaagcccgatatccgccgcaccccgcacgattccttcatgcgctcgcttgtagaatccgggcgcgtgcgcgcgtttacggaaaccgcaagcgatggcatcgaggtgcccaccggctcgcctgctgaggaccccgatacccgccaggtccacaacgccgacggcacggtggataagcgcctgcacctcgtgggaatccccgcccacgccgagtacccggataccaccttggccccgcccattccgggcaccgattcgtggttcatccaggaagccgataaggccgccgtgcacgcggcacaggtagcactcgccgagcaaacgtagctagcagcgagggggcaggcaaccgcctgcccattacgctgttagcagttccgttcagaggagcccaggattcatactcctagccccatgctgaggcaggttatgttaatctgcgttcggacctgacccccattnnnnnnnnnnnnnnnnnnnnnnnnnnnnnnnnnnnnnnnnnnnnnnnnnnnnnnnnnnnnnnnnnnnnnnnnnnnnnnnnnnnnnnnnnnnnnnnnnnnnnnnnnnnnnnnnnnnnnnnnnnnnnnnnnnnnnnnnnnnnnnnnnnnnnnnnnnnnnnnnnnnnnnnnnnnnnnnnnnnnnnnnnnnnnnnnnnnnnnnnnnnnnnnnnnnnnnnnnnnnnnnnnnnnnnnnnnnnnnnnnnnnnnnnnnnnnnnnnnnnnnnnnnnnnnnnnnnnnnnnnnnnnnnnnnnnnnnnnnnnnnnnnnnnnnnnnnnnnnnnnnnnnnnnnnnnnnnnnnnnnnnnnnnnnnnnnnnnnnnnnnnnnnnnnnnnnnnnnnnnnnnnnnnnnnnnnnnnnnnnnnnnnnnnnnnnnnnnnnnnnnnnnnnnnnnnaaggaacaatgagggcctctcgctgaactcagcattagccgaactcggcatcaaccgagcctcgctacattcatgggtcaaaaagtacggcaccggcaaacgtgcccgcataaaagccgtgcatgacaaagcccaagcggcgaatgattctgcgcgaatccgccagtgagacaaaagaaaacgcaaaactgcgcgaagaacgcgacatcctgcgtaaggccgcgaaatattttgcttaaagcaactcactggtgatccgcttccagtttgtcgatgaccaccgaaccgaatatccggttaagcggatgtgccacgtgttaaagctcaatcgctcctcgttttacaaatgggtcaaaacccgcgaaaaacgcaggttaaaaatgtattccgatgcccttattggtgcaagaataaagaccatctttgaagtgtcccaggttttgttccgtttgagtagatgggaaaatctggaatatgccaagaaaatttgaccaggatgcgaaggaccgtgtggtccgtctcgtggaagatcgcatcgtggcagaaaatatgtcgatgcaccccgcgtgccaggcagtagccccaaagctgggggtttcatggcacacggctcgtcaatggacttaagcctgcccgccgtgcaggaaacatcccagaacctgtacctgaagatttggccgccgaaaatgccaggctgcgccgtgaaaatcaccagctacgcgatactaatgagctgctgaaggctgcctcggcttttttcgcctcatgactcgacccgaaacgttaagaaatgatccggttcatcgatgaataccggaatcgtttctctgcccgagttcatttgtaagacgttgaaaaatagccgaactggtgggtttatcacctcgcgtggttatcgccagtcaaaggcccgtggattaagtgctcgtcgccttcgtgatgctgttctggttgaacgcattagtgctgttcatcgggataattacggtgtttacggcgtgcggaaaatgtggcatgcgctttaccgtgacggaatcgatatcggtcgtgaacacgctacccggctgatgcgcctggccggtgtttctggcaaaggcaaaggcggatcaccgattacaacccgaaaagctaacgtgcctgatctgcgcccggacttggttgagcgtgaattcaaagctcaaggcccgaataaactgtgggtggccgacattacgtatatgcgcacgaagaaaggctttgtgtatgccgcgtttgtcaccgacgtttactcccgacggatcgttgggtgggcgttatcagattcgatgcgcaccgaagcactgccgctgcaagctctcaaccaggcaatcgtgtgtgctgaggaaacaacaggtctcattcaccattcggattacaggtcgcagtacgtcagcgtggtctacaacgagcgaggtgcccagcatggcattgacgcttccaccggaagtgtcggtgacttatatgacaatgctctggctgaaaacgttaacggcccctacaagaggtgagttgattcatacccgcaggtgggatgacgttgtcgaggtagaaatcgcgacgttcgagtgggtgtcatggtggaacgagacaaggctccaccaaagcttgggataccgaaccccggtcgaggtcgaaaccgagttttggaagcagaacccgccacaggcaataatagaaatcaaggcaaatgcctaggaacaaaactcggggcacttcacttcccggcacaacaaggtcaaatttttcttggctacattcccggagtagggtcagggcccatggatcggaaatgctcccgtcttcgttagctgagatggcatacggcgggttagcagtagcaacctctacgtcccttttttggcgcagggttgccaccagatcggcgccacttgaagaatcatcaactactaatattttcatttttccgtgttccccacattgcttggcttatggttattgccacaatgagcatcaacaaagttaactgaattggttcgacttgagagcccaatgccacctcggtagccatcaccacggccggaagggccgcgatgatcagtgccgagatgaaaggcggcgctaaggtaattccccactgcaagagcaggataggaaaagtaatgcacatcaccgatagcaggacgattgacagggtagagcctcgaagcatctccgcttccacggaaaagaaagccacgagaccgctaataatccaagctaagtgaaacctcactgctgcaatcgtgagaacgctgttcccttgttcagtagcccagcgcgaggagtaaagcactcctaccgcagaaattcctgcgcctacagctagagcgaaacccagataagactggggtgaactgcttcccgttcctaggaggaaaaaacatagagccagaaccactactgcagttgttgacaccaatgaactgctgagccttctggccgaccaagtcattattactgcgacaataaaagggccgactcctgtttcgatgacacttgctgcagtgggctgcatcaaagtagtggaaacatagaataagcagaaagcgcccgcagtaaacagattgaggcttgctgcagttgtcattttcatggggggatgcggtgtttccgtagctcggtattttctacgataaaacgctaaatagaccactgtggagataatcgccgcgataagaaacgctgaaaacgtagtaaaagtagatagctctgggtctacttgggctccgactatcgcagtgccgattccttgccataggacagctagggctacgataaccgcccctacacctggtttattggactggatcataaaaccttaccctcaaaatccgtaaagttaacttaatannnnnnnnnnnnnnnnnnnnnnnnnnnnnnnnnnnnnnnnnnnnnnnnnnnnnnnnnnnnnnnnnnnnnnnnnnnnnnnnnnnnnnnnnnnnnnnnnnnnnnnnnnnnnnnnnnnnnnnnnnnnnnnnnnnnnnnnnnnnnnnnnnnnnnnnnnnnnnnnnnnnnnnnnnnnnnnnnnnnnnnnnnnnnnnnnnnnnnnnnnnnnnnnnnnnnnnnnnnnnnnnnnnnnnnnnnnnnnnnnnnnnnnnnnnnnnnnnnnnnnnnnnnnnnnnnnnnnnnnnnnnnnnnnnnnnnnnnnnnnnnnnnnnnnnnnnnnnnnnnnnnnnnnnnnnnnnnnnnnnnnnnnnnnnnnnnnnnnnnnnnnnnnnnnnnnnnnnnnnnnnnnnnnnnnnnnnnnnnnnnnnnnnnnnnnnnnnnnnnnnnnnnnnnnnnnnnnnnnnnnnnnnnnnnnnnnnnnnnnnngcttcgctgcggccacgttccgcttcggagagaggtaaaactccagggtctgaccaccggcggtgatcgcccgatagagatagcaccacctgccgccgacccggatataggtctcatccacccgccaggaactagcttgccagtcaggtacctgccggtaccaccgtgtttgcttgtccagctcaggcgcgcatttctggacccagcggtagatcctggtgtgatcgaccggcacgccccgctcggtcatcatttcctccagatcgcggtagctcaccccgtagcggcagtaccacccactgcccacagaataatgtcacgggggaaatgacgacccgagaaaatacccatggctgtgattatttcacctcgctcttcctactgccccaactttgcaacagcacccagcaacctaaagtcaacacacccccaacaaacccacccacgaagttgacaacctatataggaacatcctctcgctctagccgttttcgagcagcccaaggagccgttcgcgcagctcatttttgcgctccactaccgcggagtcatcgctgccgctgcgcgggcggggcagcccaacttcaatgtcctcgatgatggtggcctctggccccggcgacatgaccacaatgcgatccgagagcaatactgcctcatccacgtcgtgggtaaccatgaccaccgtgcggcggttttcttcccacacatttagcagcaacgactgcagctggcggcgggttagcgcatccaatgcgccgaagggttcatcgagcaataagatatccgagccgatggcgaaggcgcgcgccaaaccgacgcgctgctgcatgcctccggataaccgcgacgggcgccggtcggccgcatggcccaagctgacctcgtcgaggaagtcctgcgcaatcttgctgcgctctgccttcgatagctccgggcgggccgatcgcagcccgaattcgatattcccgcgcgccgtcatccagggcaggagcgcgtgattttgaaataccacgccgcggtcaggacctgggccggtcacggcctctcctcgcgcgcgcacctcgccggtagaggggaatgccaggcccgcgatcatattcagcatggtggatttgccggagcccgatggccccagcacggacacgaactcgccttccccaatggatactgaagtttccccaatgatcttcgttgggccgtagcttttggtaataccagcaaattcgatatgggcattagtcatagcgcaccactttctgcagggaagcaacgaggtaatccagggccaatccgataacaccgataagcacgatgaccacaacgatggcgtcaatatcgaggcggttccacatattccagacaaagaaaccgacgccctgcccgccgacgagcatttccgcggccacgatgaccaaccaagcggtcgatagcgattgccgcatgccggtgataatccccggcagcgcagtcggcccgacgatatagaggagctgctgcatccggttcgtgccgagcgtggccgccaggttcttatacgtggggtgaatcccgcgaaccgcctcgatggtattgagcagcgtcggccacaaggcggagaggatgatgacgaagacggcggtattttcggcatcgcgaagcagtgccaggcctagtggcagccacgccagcggggacacggggcgcaggatctggacaaagggatccgtcgcgcggcggaaggtagcagaagatcccagccaaaagcccagcggaatggctatcaccatggcgatggcaaagccgatgagcacgcggcgcagggaagccaccatgtgccaaaagatgcccaccgaggccggcccatcccggtagaagggatcagagagtatctccacggccctgtcccaggtgcgcgcgggagtgggggcgatatcggaaagccagcccgcagccgcgaccgcctgccagatggcgatgaaggcaatgaaaagcgcaatacccaggcctattgccttccacgggctctcccgccgcttcttccggctggcggtgcggcccgaatggagcgctgcggtgtgagtgccagtggagtgcgctgtgctggtgctagtgctgtgatttttcagtgtggtcataagcgtgggggtccttaacgctggtatccggcggtggggtgcaggggatcgaaggtatggccgttgatttccactgggtccgtagtgagatcggcctcgcgcggcaagacggattttgtgacgtctatgagcgcttgatcatccatcggcattgcctttccgcccagatcccagcgggccatttgggcggccatccacgtaattgcggtggcagaggtgctgccgccgaacttaatcatctgtggatccaccagttctttgccgtcccaggtggtgtaatttccggccaacgcccgcgagatcagctcttccttctggttcaggtacttctccttggccagcatggaagccgaatcgtggacgtggtgcgggctatcgacgtactgcgcgccttcgtgcagcgccgcgactacgcggtcgcgcacgccccggtccacttcctttgccacggccaccgagcaacacgggtggttttcccacatctggcgggtgggaacaaaggcgcggcctgagccggtagttagggcgcgctggttgaagggctctgggccaatgaagccgtcgatagtacctaccgaaagttgtgccaccatatcggctgggcgcaggaggcgcagttccacatcagagaccggatccactccgccggccacgaggtaatcgcgcagcaagagcgcatgcaccgagtattcaaaggggatgcctagcaccatgccctcgaggtccgcgggccgcgacacggtatccaggtgggaagtggacaaggtcagtgcctgcccattggtgttttgcgtaaaggccaactcggtaggccgggaggcattggtggcaccggcatcgatggccagcggcatgggcgagagcatgtgcgccacgtctaaggcgccggtggcataggcggtccagaggtctgcccatcccgcgaatttacgcagctcaacgttgaggccctgctttgcgaaggcgcccaggccgtcggcggcgaccagcggggacgcgcacgcgatgggcacgaatccgatggtgagggtttccccaccctgctcggattgtccggactgggcgttgtcctcctgccgcggcgaggagcatgcagagaggacctgcgaacctactgctaccccgcccattgccactgcgctgcgcagtatctgccgtcgcgacagcttccgattgtgaaccatgcgttctttcttaactagaccaagtggtttgttcagaacgaacctagggcaggcgcactacggtgtcaatttctaaattcacaggtcaggaaatgcggtgcacacatttatattcactctagacctggcattctctacaaaatagacctctcgttctagatttatatttgccttcgcgttaccatggcgccatcagttaataaacatctgatacaaggagcaatttaatgtctgatctcaccccaaaccacaacgaaggcgacgctctcgagcccatcgacggcgagaagctcaacgacctagcacagaagaacatcgacaaccctgagggtgccaagaagcacgtccgcacccacaccgaggctgacggtttcttccgcaataacaccaccgtgcgcgaccacaccatcaaggtgggcgagcctttgccgctgcttggcgatgactccgcccccaaccccaccgaggtcgcccaggccggtcttggcgcctgcatcaacgttggcattcaggccatcgctcagcaccgcggcgttaccctgaccaagctggagctcgacatcgtcggcgacatcgacctctccccaacctggggcgttggtgacttgggcgaggacaagcgcccaggcgtttccgacgtcaacgttaaggtcaacatcgacggcgacgccgaccaggaaaccctgcaaaagatcgtggacgacgccatcaagtggtccccggttgttaatacctacacccgcccagccaacctcacccatgagttggtctaaggtttagatagataaaagcgcctggcaagtgccaggcgctttttcttatgctttaggagcgactacaggaattgccacgattcccgcaggcgctcgaaccaccactcgcggcggtcggccggcgcggccaaggcggacaggcggtccggttcaggggcaaggatgtctgcgcgcaggtgcccgtcgtgtagctggcgtggcgcggtgacgtcttcttcgaagaggctgcccgtggcaaggcccgctgcggccggggtgacgtcgatgtcctcgtcatcatagatttgcggcaacgccgccacagccgccaagcccatattgatgccaatggaagtatccagcgccgaggccaccgtaatatccatgtgccgttcgcgcaggtgctgtgccacgtcgaggacgcggcgcacccctcccagcggcgcgggtttgaccaccgctacatctgccgcctgcagatccgccacgcggtatggatcctcgaccttgcgaatggattcatccgcagccacgcgcacaaaaagtccgttgcgcatcagttgtgtgcgcacctccaccagttcttccgcgctcgcgcagggttgttccatatagtccagcggcatgagcgcctgggcagcctctaccgcctcggccacgctccagccgccattggcatccacgcgcagcaccgggataacgccccgggcgctgacgtgttcgcggacggcgtggacgcgtgcgatgtcatcggcaagcgtctggcccttctccgccaccttgatcttgaacgtccggcagccggggtagcgatccacaatcgccgggacctcactggcgggaacggcgggaatggtggcattgacctctacccattcgcggacgggcttaggaaaaccctcgtaagcggcttccaacccggcgcgcagccacgcggccgattccgcgggcccgtattccaggaacggcgcaaattcaccccaaccggctggcccatcaataagcaacgcctcccgcgtggtgatgccgcgaaacttcacggccaacgggagggagactacatgggcgcggtcgagaacgtcatctatgttcataggttcatactatcagccgtacttatcaatacctaagtaagaacactccagcacacaccgtccattgtattcattttatactaaccccaaaagagggaaatttttcatcacatcaacaagtccaataaataatcggatagaatgtacttcgagaattgaacctcagtaagcgtcggcccgtttccggcgttgaagaatgctccagccgaaccttcgggttcggcttttcttgtatctgaaaggcttatccttatgtccctcctataccgcgtcggtatcgatgtcggcacctactcattggggtgcactgccatcgaagtcgatgacaatgaccagccggttagcatcctgagctccgtttcgctcattcacgactctgggctagatccagatcaacagaaaagggcagtaactcgactcgcttcttctggtgtagctcgtcgaacgcgccgcctttatcgccgtcgacggcgccgcatggtaaagctagaaaattttctcactgcacaagggtgggagacactccccttcgagcgctattccgatccttatcttccttggcatgcacgcgtagcccttgtcaatggttatatctctgacgatactcagcgaggacaatacctttctatcgcttttcgtcacattgccaatcaccgtggctggcgcaatccatattggaaggtgtcgagcctttactcgcccgacaagccaagcgatgcatttgaacaaatacgcaaagaactggaagcttccactgggcgtcagattcctgagaccgctaccgtcggtcagctaatttcttttgctcaatttggcaaagatagattgcgcggtggtggtaagcaaaaagataagaagaaaccacaagaacaggttaaccaagcagtaatttctgccaggctgcaccaaatcgaccacgcccgtgaaatcaatgagatctgtcgcgtccaaaagattgatgacacgctacgaaagcagattttggatcttgttttcgctgcggaatctcccaaaggcgcacagaaaggacgcgtaggcaaagatccactgcaaccaaagctattccgcgccctcaaagcttcagatgcttttcagcaataccgaattgcggctctgactggaaatctccgaatttaccgtaacggcgtcacagttcctctcgaccgggacgaaaagctcatcgtctttaattacctagtcaacctcccaaagaaagaggagccgtcctggctaaagatcgccgagatcttaaatattgaccgaggccaactacgcggcaccgccacaatgacggatgatggcgaacgcgccggcgctacgcctccagtacatgacaccaatagaactatcctggattccaaggttaaaccccttgcccactggtgggaaaacgcctcagatgacgaacgcgcggctatgcttaaatcgctgtcaaactcagaggtggaggacttcgactcccctgcaggagcacaggtacaagccttctttgcagatttggatgagaccgaacaagaaaaactagattctcttcaccttcccatgggacgggccgcatacagcgaagacacattaatgcgcctgaccaaccgtatgctcgacgaaaacctagacctttatgaagcacgtctggctgaatttggtatccccaaggattgggctcctcctgctcctcggattggcgaacccgttggcaaccctgccgtagatcgtgtcctcaagggggtagcacgatggttagaagctgccgcagacgaatggggagctcccaaatcagtagtgattgaacacgttcgcgatgggttcgtcagcaaatccaaagcaatcgaaattgaccgcgcaaataacaatcgtcataaacgaaaccgagagctctttcagaaaatgcaagaaaacctcggtatcgaaggaaaggtacgctcttctgatttgtggcgataccagtccgtacaaaggcaaaattgtcaatgcgcttattgcggttctcccattacctatacgacctgcgagatggaccatatcgtcccacgcgcaggcgagggttccaccaatacgagagataacttggttgcaacttgccaccgctgcaaccttgcgaagaagaacatcccctttgcggtgtgggccgaaaagtcgactatcccaggcgtaagtgtcaaagaagcgttagatagaacacggcactggtcagaggactccggaatgtccaaaaaggactttcagaagtttcgcaaaaacgtatgcgaaagactcaatcgcacggttgtcgatgagcccctagatgcccgttccatggaatcagtagcgtggatggcaaatgaactacgcggccgagtggcgcaacgcttccaagaggaaaatacgacggtcaatgtctatcgcggcgctcttactgctgaagctcgcagagccgccggtatcacggacaagctgcggtttattgatggaaccggaaaatcccgtcttgaccgccgccaccacgcagttgatgcggcagttgtcgcattcattcacaactatgtggcagagacactggcgattcgctccaataaaaagcgtgaagctcagctgctacaaggcacttcgcaatggaaagagttcactggctccgatgataagcaccgtgcggtgtggaatgcttggattcccaaaatgcagaagctggctgttctattgcagattgctctggatgaagaccgtatcgtcgttacctctaatttgcgcttgcgcctaggaaacggccgcgcgcacgaagacaccattagcgagttaaagaccattcgggttggtgacgccatatccgttactgatatcgaccgagcctctagcgaagccctatggtgcgcccttacccgcgaaccggacttcgatgaaaaggacggactacctgagaatcccaaccgccggattcgcgtccatgggacatggtacgacgcagaagatgaaatcgaagtattcccagtaggtgcgggagctatcaaagtacgaggcgggtacgccaaactcagccggttccaccatgcgcgcgtttataaaatccccgggaaaaaggcacctatctactgcatgcttcgtgtctacaacaccgatctcgtgcagcaccgccacgaagatctattttctgtggagctcaaaccacaaaccatgtctgtccgccaagcagaaccaaagctgcgaaaggcactagcagaaaacacagcggagtatcttggttggttggtcactgatgacgagctaataattgatacatccaccttccgtactggccttatcgaggaaatgcaaagcgaattcggcctagtccgtcgttggagattggacgggtttgattcaccttcattgctaactcttcgtccactgcatatgagcgccgaaggattgcccgacgattgtgcactaggatctaggaaaattattgataccaagggatggcgtgtatctatcaacaaagtctttaatgcgggcaataccacagttgtcaggcgtgatgcgttgggtagagccagactgactagcaatgcacacttgccaatttcttggaaggaagagtaagaaaatgaatgctggatggcgggtaatagactgtctgaatctccacggttcacttcgctattctcgaggtcaactcgtcatcggcaaagacgattccgccgaggtcgcaataccactatcccaaattgcagtggttctggttggcaccaagagttcaattagcggagctgtacttcaaaagttcggagactatgacattgcattgatcgtctgcgattggcgaggcgttccagtctccggtgcctatccatggaatccgcactcaaggttgggagcacgacaacaagctcaggctcaactttctttacctaagaaaaagcaagcctggacacgaatagtcgccgccaaaatccacggtcaggcatctgtgttggaggctttaggcaaaacgggagcaaacgacttagtcaagctttcgcgaacagtaaagtccggggatcccgagaaccgggaggcccaagctgcacgaaagtattggtcttatctttctcatgaccaagcattttcccgtttacctggtgctggcgatcctggatggaattccgcgctagattatggctacacgctcttgcgtggatacggaattcgtgccatcgtcggcgccgggttgtctggaacgctcggagtatttcaccacggtcgcggaaataactgggcactcgtcgacgatctcatggagccattcaggcccatggtggatcagatcgtattcacgaaaattaattatggcgaggaattagagtctacccaaaagacaactatttccaacgcccttacttgtgtgtttgaagctggtggcaaatccctcagcacggtttttaatgaatttggccaacactacggtctctacgtcgagggagccgttcgcgatttaagtgtgccccgatgggaaggggtcctcgatgccagcgaaggatagcgaaccaatgtggtgtgtggtgatgttcgatctacctgttaaaactaagaagcagactagtgaggcgaacaaattccgaaatcaactcttggatctcggtttttgcagatctcaattgagcgtttacgtccaatacttccctttatcttctcgaatcgcttctaccgttaaacagatcaaagcccatctcccggaaggtggtgacatcaggatcatttcaatcactgataaccagtgggcaaaagccatcaggttttctaaggcggagaccgctgaagtggaagataaaccatctcagctggtaattttttaagacaggatcaccaataaaccccagttaaacggcccattttgggccgcactgaagtctatcaggggtaatgagaactgaaccccagctcatcgtggagccctgcacggtttcggtgaagtctatcaggggtaatgagaactgaaccccagcttcaaggatttcttctcgtgtggggtttgaagtctatcaggggtaatgagaactgaaccccagcacatgaccaccttgcccaggctgcaatggaagtctatcaggggtaatgagaactgaaccccagcggatggtgtttattgcgagaatgccgatgaagtctatcaggggtaatgagaactgaaccccagccggttgacgatgctgattaagtcccgcagaagtctatcaggggtaatgagaactgaaccccagctgaaaattgcccgtttgccgggtatccagaagtctatcaggggtaatgagaactgaaccccagcgccagcaataccgtccaccgcggcggtagaagtctatcaggggtaatgagaactgaaccccagccttcatcagcagtagtgagctctgcgaggaagtctatcaggggtaatgagaactgaaccccagcttgccacggttgaggtcaatggcgcggagaagtctatcaggggtaatgagaactgaaccccagcccacttcgttaagcacgcggagccgcgcgaagtctatcaggggtaatgagaactgaaccccagcggtactcatgatgtccatcatgacggtggaagtctatcaggggtaatgagaactgaaccccagcattagtggcttgctcctcgtgctgttgagaagtctatcaggggtaatgagaactgaaccccagcatctgtgccgacggtacacaaggcgatcgaagtctatcaggggtaatgagaactgaaccccagcagcaatgctcacgctcatgtcgggcgctgaagtctatcaggggtaatgagaactgaaccccagcatgattcagcattccccgcgtactgcttgaagtctatcaggggtaatgagaactgaaccccagcttcacactctgtgggattccagcgctatgaagtctatcaggggtaatgagaactgaaccccagcgacattcttcagtgctgctacctctgcagaagtctatcaggggtaatgagaactgaaccccagcgagttatcccagtgaggttcgatggtgggaagtctatcaggggtaatgagaactgaaccccagcctacggcctcattgatgaggatgatggcgaagtctatcaggggtaatgagaactgaaccccagctctcgtgaaaaggctgaccttgtggtcagaagtctatcaggggtaatgagaactgaaccccagccctgctccggcgcccacgaggtacgcgcgaagtctatcaggggtaatgagaactgaaccccagccaaagaaatctattaaggagtggataaaaacatctttcatccttagaaaccattgaccccagcccccacccagactacgttggttcctacctaccctgaaggaggaaccatgttactggcagaggcattagcagagcgcgcgcaggcgcaggaacggctcaatgagctgcgcgagcgcctgctctccgtcgtgcgcgtgcaggagggcgataccccggacgaggatccggccgagcttttgcgcgagttggagggcattaccgggcgcatcgataagctcgtgcaggccatcaatgccacgaacgtggccaccgattttgatggcgagaaaaacttgatgcaggcgctggcgcttcgcgatggcctcgtgcgcacccgccgcatctaccacgacctcgcccaagccgcgggcgcgcgccaagaccgctcttcccgcgcggaaattaagttcgtggcaacgcttccggtagcagagctgcgtaagcgggtcgatgacctctccaagcagtaccgggagcttgatacccgcatccagcagttgaactggaatacggaactgataactccatagcgaagctttagtcatgccacgccgcgcgcgtggcggtagcctttacgcacttgcagcgagtatgcccccgccttcgaggggaaattcgaggacatctaggcaccctttggcgttaaagggttgaggaagttcgagtcttcccacagtattgatgaccgcgccggcacagggtacacgggtacattgcgggtaacccctcgcagttattgagtatcgattattaccagcatgctgggcagtgcgtagaggtgagggttgggaatggggactaaactttttcgcgcccactatgctgggcgctatgaacgagcagaagaaatacagcaccgaaaatccattccgtgaggaattgtggcgcccggttgaaggctttggggatctcacggacgtcacctaccaccgtctggcggcagacggtcggaagaatggcatcgtgcgcatcgccatcgacaggcccgaggtgcgcaatgccttccggccgcacaccgtggatgagctgtatcgcactttggatcacgcccgccgcacgccagatgtgggcacgatcttgcttaccggcaatgggccctcgcaaaaagatggcggctgggcgttttgttccggcggtgaccagcgcattcgtgggcgctcggggtatcgctatgccaccgagcatgcccacgatgatgccacggcggatgaatccagcgtcgatgaggcccgcgccaaggtagaaggcggccgcctgcacatcctggaggtccagcgccttatccgcaccatgcccaaggtggttatcgccgtggtcaatgggtgggccgccggtggcgggcactcgctgcacgtggtctgcgatatgaccgtggcctcccgccaggaggcgcgctttaagcagacggacgcggatgtcggatccttcgatgcaggctatggctcggcctacctggccaagatggtgggccagaaattcgcccgcgagatcttctttttgggccgcacgtacgatgcccagcgcatgtatgagatgggcgcggtcaatgaggtcgcggaccacggtgagctggaggacgctgccatccgcatgggccaggaaatcaacatgaagtcccccaccgcccagcgcatgctgaaattcgcgttcaacctcaccgatgatggcctgatgggccagcaggtcttcgccggcgaggccacccgcctggcctatatgaccgatgaggccgtcgagggcaagcagtccttcttggacaagcgcgagcccaactgggacgagttcccctattactactaaggagtgccccgcaccgtgctcatcgcattttgtatcctgctcgcggtcctcgccgtcgcgggcgttcttggctcgcgcgtgtggatgctgcgccgcattaaagaggccgaggccaataacgagcggccctttgatcaagaggacagctaccgctgattcccgcatcgactcaccccgaccgcaaccggggtttgtcccgccgtggccttaagatctagtgccgtgactatcctcgcccccttgcccgtcgatccgcacgatcccgcggccatcctgccggacctcgaatccgccattgccggcaggtcctgctttttgccgctgccgcttgccgatgccacccgcgccaccctcctgcgcaattcccagcgcgccggtgagcccatcgccgaggatatcgcgctcgtggtctccacctccgggtccaccggcaccccaaagggcgcgcaattaacgccggccaacctggtcgccagcgccgatgccacccaccaggtcctcggcggccctgggcaatggctcttagcgatgcccgcccaccacatcgccggcatccaggtcctcgtccgctccctagtggccggggtggatccgctctgcctcgatctcagcgaaggctttaatatctctgccttcgcccgcgccgccgcggagctctcccgcaccggcgaccgcacctacaccgcgctcaccccgctgcagctggccaaggccatggatgtggcggagggcatcgatgcgctccagagtttcgatgccatcttggtgggcggtgccgccatccacccgcgcctgcacgccgcggccgcggaccagggcatcactatcaccaccacctacggttcctccgagaccgccggcggctgcgtctacgatggccgcccactgcccggtacgacggcccgcgtccaggacggccgcatcttgctcggcgggcccaccatcgcgcagggctatcgcaatgccccgagccacgaggcgtttcccggaaacgggtggtttgccacttccgatgccggcgtcatcaaagacggcatcctcaccgtcaccggacgcctcgataatgtcatcgactccggcgggttgaagctgcacccagaggtcttggaacgcgaaatcctccgggtgccgggggttgccgaggcgtgcgtcctcggcatcccgcacccgcggctgggccaggccatcgtggccgcctataccggtgatgccgagcttggcgatatcttcgaggccctcgaagacgccgaactcccccgctggcagctacctaaggatttaaagcatctcgcggactttcccaccaccggtcctggcaaggttgaccgccaggccgtcgccgccctctttagcgcctaacctccaccgtgggccccggctccggctccagccccggccccggcttcctgattgctgaacgctgctagcccagtggcacaatggtggctatgacttcatcagccggtaattattccgcgaccgccaaggattggatcaatggtgctcgcccacatacgtgggccaatgccttcgcacccgttgtcgcaggtacgggcgcggccttcggtattagcggcgggcatatcggccgcgcgttgctcgcgctcatcgtggcgtgggcgcttatcatcggcgtgaactatgccaacgactactccgatggcatccgcggcaccgatgatgaccgcaccggcccgcagcggctgaccggcagcgggcttgcgcagcctagccacgtgaaatacgccgcgtttgggtgctttgccgtcgctggcttggccggaatcatcctgtcgctggcggctggtgcctggtggctcatcctcatcggagcgctgtgcatcgccggcgcgtggttttataccggcggcaagaacccctacggttaccgcggcctgggcgaggtcgccgtctttgtattcttcggcctcgtcgccgtgctgggcaccgaatttacccaagccggccgcatttcttggacgggcctagccctggccatcggcatcggcgccatgagctccggggtaaacctagtcaataatatccgcgatattccctccgatgccgaggccggcaagatcaccctcgcggtgcggctgggcaataaaaacgcccgcctgctctttaccggcctgctgctcttgcccttcgtgctcaccattgcggttgccttcggcagctggctcgcgctcgctggcctggtctacttcccgtttgcactccgcgcggtgcgcaccgtcaatcgcggcgccaccggagccgagctcatccccgtgctggggctgaccgggcgcgccatgctcatctgggcagtcatcgaggccatcgccgtcgccctagtgtaggactaggcttgcgcgcctaggcctccgcgcggccttccaattcggcctgcacccactgcttatgcgccttgcgttgcgcggagtattccgccagcgtctgcgtggcctcgatgcgccagtttttaaatatcagcatcgacagcggcagggcaacaaagagcgccaggagcgccgccacgaggacggggatggggaaaccaatcgctaccgccagcagctcgatgaccgcggtgagcgcgataaaaagcaccacgcgcgcgagcccgtatttccatagcgccttgcgggagcgacggcgcagttcggggtccggttttggtggctcagggttgtgcgtcatgggggtcgattgtacgccgtacaggtagaataatctgcatgggtcgactaatcctcctactgctttttgtcctcgccgcctacctggtgtggaaggcctttgggccatcatcctggaagtcccgccaggttgaagaacaaccgcgttccattaagggccccgatgatgacgaggaattcctgtggaacctggaaaaggagcgcttcaagcagcgccgcaagcaggaggccgaggaagaaaaacgccgccagcgccgcactcgcgacgccgacggcaacggtgattcaaagggccaggacgacaaccaggattaatcctttggcacgaaccgcatctcaagtcccagcgcttctgccacggcggtaaccttttcccaccgcacgcctgccccgccgtgttcgatggtgtggagggtggagcgggagacttgggcggcatcggcaagctgctgctggacgatgcccaactcccgccgccgctgcgcaatctgcgcgcccaagcccaagatgagctcgttatcgccggcgggctttccctgtttattgcgcgggctatggttggtggccatttagttcagccccgcataggagtgcaggccggagaccaccatattgatgaagaagaggttgaagatcatcacggccgtagccaaaatgttgatccacggcgcggccttgcggaaagccggggtcgcacgcgcgtgcaggtaggccgcataaaggatccaggtggcaaaggacacggtttccttcgggtcccaaccccaagggcggccccatgcggattcggcccagatggcgcccaagatgatgcccaggcccagggtgggcagggtgataacgcccaagcggtacgctaggcggtcaatcttcgccgcggacggcagcggataagccagcgcgccaaagaagccgcgttcggcgtcctttggctgccacaggcgcaacaggctcaaaagcgaggcaatgccggacacgataccgatagacgcgcccaaggacaccaccgtgacgtggatgggcagccagtgcgattgcagcgccggcaccaccggtgcggagtcagcatagagcttggtggaaccgtaaaacatcagcgccagcaccggggtaaggatccacggccagaccgtgcgccactccttgcgctgcatggcgatatttcccaccagcagcacgccgaagcacaccatcaatacgtattcgtagaggttgccaaacgggaaacggcccgtggccagcccgcgcagcacgatggccgcagcgtgcaaagcaatgcccacccacatcagcgaggtggtcatgccgccgagcttatccagcttgcgttccttctccgcgactttgtcttcgctcacggttgcggccacggaggcggcctcagcctcgtaatcggtgctggcagctgctgcgtccgtgccggttgcagtatcagagccgatggcagcgtctgcgccggtgccagctccggtggcggtcccggccgcggcgccagtctcggctccagcgccgaccaataccttggacgcctccgagcggcccgcgcggcgcgcctcgatgaggctccgaatgcggccgtagtacaacagcgacataaatagcgcgacgcagtacaccacgaatgcggtctgcaccgcgagatccgagaagttcgacagattctgatcgatctgcaagggagtccacctagccttcacacgtgcgggataatgctgaataccttactcatgcacacagcgggatccaactatagttggattaatcatcagtatagagtttgtcttcttccacctcatctggatccggaagctccaagagcgcgcggtgcagctcgtggaattcctcagaccagccagcgcggtcggtgcgggcgagaccacccatctcgatggtggtgccgccggcggaatccggccgcaagcgaatatagacgcggcggcgcttaatcatcaatgaggccaccagggataccaacatgatcagcgcggatgccagcacccacttctggaatgggtcataggagacctggtaattggcaaactcgttggcgccgttaaaggtgatcttggtgccatcgtcaagcgtgacgtcatcaccctggctcaggttcacgcggtcgatcttctgcaactgtcccgagtgcacgaggcttgtgtccagcgagaagagcgactgcggcgtaccggtatcgaggccagcatcgccgcggtagatatcaaccgccagcgccggatcgttgaggcccgggtgggaagactgcaaaagcttgccattctcaccgctccactcggccgtcggggcgaaaaggccctggatggccagctggttttggcggcgctcgaaaagatccgggtacatgcccgcaggcgggtcaaagcgcagcacgcccgaagacaggaagaaggtcgtgtcagtgggctggaactggatggtctgcgtgcgcttttccccatccggccactccaccgtcaccgtcggcgcatagccgtggccctgcaggtagacgcggttttgtgccagacgcagcgggtggttgaccttgagctcgtagtccttccattcggaagaatctttataaatatcgtcgccctccgcataagaaacgttggaggtaaacatctccgcctggccattgggcaggtacttcgcggtgaagtcgtgcgcggtcatgcagaaggggtggagcccggtgccatcgaaaagcggccctgctcggaaggagtcaaagttcgaggtggaggtattacaaaactccgtggactgctccagcgaggtattgccgccctgcgagccggactccgtcaccacgatga

SEQ ID NO: 3979 - DNA, 23288 bp, synthetic construct
  source 1..23288: mol_type = other DNA
  misc_feature 1..23288: note = Synthetic
tactccgacgagtgggacctgaagttcaccgatgaaaagaccatccaggtcgtcgagtggctcaaggaaaccaccgacccagactctggttacgcatacgtgggcaacgacatggccatggagttcggcaccggccgcgctgctgccaccgtgctgtccaccggtgacctggcgggtgttaccgacaccgttgatttcgaactgggtactgcattcctgccaaacccgactggtgaaggtgcgtgcccgactggtggtgctggcctggcaattccggcaggtatcgacaagaaccgtcagctggctgctatcaagctcatcgacttcctcaccaacgaggaaaacacctcctactggtcccaaaacgtcggctacatgccggtgcgttctaccgctgtggagaacgaggaccagaagaagttcatggaagaaaacccgaacttcgctaccgcaatcgagcagcttccagaaacccgtccgcaggacaacgcacgtgtattcctgccgggtgcggaccaggaaatcggtggtgccttcgagaggatcgtcaccaaccgcgacgatgtcaccgaggttctcagcgacctgcagaacaccctgcaaaacatttacgacaaccaggttgagccgattctcaacggctaaaccctgacctaagaaaggtagtcatggcaactgtcactttcgatggcgccagccgcatctactccaaggatgacgagcacccggcagtcgatcgcctcactctggatatcgccgacggcgagttcctcgtcctcgtcggaccttccggctgtggcaagtcgaccagcttgcgcatgctcgctggcctggagccaaccgaccgcggttccatccagatcggtggcgtggacgtcaccggtattagccccgcggatcgtgacgttgccatggtcttccagaactacgcgctgtacccgaacatgaccgtcgcgcagaacatgtctttcgccttggaaaaccgcaaggttgccaagaacgagatcaaacagcgcgtgcaggaagcagccaagattctgcagatggaagaactcctcgaccgcaagcctgcaaacctttctggtggccaacgccagcgcgtcgccatgggccgtgccatcgtgcgcgaacccgctgtgttctgcatggatgagccactgtccaacctggacgccaagctgcgtgtgtctacccgtgcacagatttccgcactgcagcgtcgactcggtaccaccacggtctatgtcacccacgaccagactgaggccatgaccatgggcgatcgcgtcgcagtgcttaacgatggcgtcctgcaacaagtcgcacctacccgcgaaatctacgactaccctgccaacatcttcgtcgcaggtttcatcggttcacctgccatgaatatctacaacctgccgcacgatggccaggagctacacatcggcagcacccggattaatatctccaactacgacttcgatggcgtggagacaattaccgccggtgttcgccccgaggactggcgccttgattccgatagcaacctgcaattcactgctgctcacatcgaggaactcggcaaccagacctacgtctacggtgacctgcgcgaccccaactcgcagaacaccagcgacggtattctgcagtcctcgacccgcatgggcggtcagaccggcattctcgttaatgctcgtgccgacgtcaacgcaggcgataccttcggtatctcccccgacccggagcgagtccacctgtttagcaacatcaccggcaaccgactgaattagctcctacgctattccactctttttcgcggcgtctccctgacgtcgcgtcggtactctggatcttgtccccggttcccaagcccctatctgcctgaaggacaagatatgtctaccgccgactctgcttccctcattgacgaagttcgctcccaccaagacgaaattgaacacgacattcttactctggtggactctgagtcctacagctatgccaaagaggaactcaaccgcaccaagcagctgctgctagatctgtgcaccacccgtcttggcgagccagattccaccgagcatttcgagcaagagtcgtacggcgatgccgtcctgctgcgttacgaaggcacaggcaacaacaccccgaccattaccttccttggccactacgacaccgtatggcccattggcatcttgtccgaatggggcgagcgctacagcaccgatgacaacggcaagcgcactatctctggcccgggcatcttcgatatgaaaaccggcctggtgcaggccatctggattaccaagctgcttcgcgaagaagagcagtaccccaccatccaattcctctttaacggcgatgaagagcttggttctccaagctcccgcccgattatcgaagacgtcgccaaaggctccgatgccgtcttcgtcttcgagtcttccgccaacggcaaaatcaagaccgcgcgtaaaggcattggacttatcaagattgcagccaccggcgtcgaatcccatgctggcctcgaccccgatgccggcgccagcgccatcaaggctctcatgcaggtgggcctgcaggtctccgatcttgccgaccgctccaaaggcaccaccatcaacgtcggtcttatttccggcggcaccggctccaacgtcatcgcgggcaaggctgaagcaaccgtcgacatccgcgtcgaagaccccagcgaaatcgaccgcctcaacgaagccttcaaggaagtccactgggacgacgaccgcgtcgacgtcacggtgaccccgaattggaaccgtccatcgatggtgtttaccgagaaatcccaggagctctacgcccaactagaaagcgccgccaagcgcctgggcaagaccatcgaccaagcccaggtcggcggcgccagcgatgccaactttgtctcacctctcggcatcccagtcctctgcggtgtcggcgccaacggcagcggcgcgcacgcccgccacgagttcatctaccccgacgacatcccgttctatatcgccctactcgtcgaagccctgcgcaactaactaatcccgaactaaaacggacctagatcgcacaatgcctccccatatggggaggcattgtgctttagccttcgcgctcgatagcttcctgagtcatcgactccaggacttctgccacgttcgggttggtaaccggagtttctgccggatcctcatccgccaaatcacccagaatgttgcgtacgtactcaacatccttgtcaccacgacccgacaggttaaccaggatgttgatgcactcatcgccggagtcatcggtagcaaccggctccggattctccgcgagcttaagcgcataagccaacgcatgcgaggactccagtgccggaatgatgccttcgtaacgcgacagcatgcggaaagcctgcagcgcttctgcgtcagtgaccgctacgtactgcgcacgaccggtttccagcaggtaggagtgctccggacccacacccgggtaatccaaaccagcagagaccgagaaggagtgcaggacctcatcgtcttcacccagcagcacataagaacgcgatccatgcaggaagccaatacggcccgcattcaacggcgcaccgtgcttaccggtttccagaccttcaccagctggttccacaccaaccaggctgacattctcattgcccggcttgtcggtcaggtaatcggcgaaagcaccaatcgcattggaaccaccaccaacggctgccacgactgcatcgggcagacgaccagtcagttccagcatctgctcccgcgactcacgcgaaatcaccgcctggaattccttgaccagcttcgggaacgggtgcggaccacacgccgaacccagcagatagtgcgtggtggagaggttctcgcaccagtccatcaaaccgacatcgatagcatcgctcatggcttcgccgtgctcgttatgcaccggaacgaccttcgcacccatcaaacgcatgcggtagacattcggctgctgacgcgccacatccttcgcacccatgtagatggtgcattccatgcccatcagcgctgcgaccatggccgttgccgtaccgtgctgacctgcaccggtttccgcgaccagtcgggtcttgcccaaacgctttgcgatgagcgcctgcgccaacacctgatttcccttatgcgcaccaccgtggcacaggtcttcacgcttgaggaagatacgcgcacgacccttgccctttagcggcaggttcgcacattccgtaatcggagttggacgacccaagtaacgacgacgcagctcatccagctcttcctcaaaactcggatcagccagcgcatccacgtatgcctgctccaactcatcgagcaccggataaagaatctccggcacgtactgtccaccgaattgcccaaagtaggcatcaatcaaagtctcgcggacttcttccggtgcagggttctcaggggtagaagacatagggacgtccctttcgatgacggaaatactcagcaatgcacccaggatgcaagatcccgggtgtttgatactcagtattttagagccacacgcctccgattgtgcctacaaatgaggtcaatttagcccaaacaaggtcatcccggatacgaaaaagcctcccccgagggggaggcttaagacttaaggcttagcggaagaaaccgagaaccttgttggtcaactcgttaagagtgcccggactgaagaaattcagcagaccggtcaggattgcgcccatgccagcggcaccgaggatgccgccaagcagaccggacagccagttcgagctggaggaaccagcagaagaaccggaagagccagaggaaccgttgtcagaggagccgtccgaggatccatcatcggaagaaccgttgtcggaggaaccggactcggtgacctcaacgacgcgggaagcgatggtctggttaccagcggagtcgctgacctcgtaggacacggagtaggtacccggcttggaggtatccacgttgccgataacgcggatgcggtcggtgatgtcgccgtcttcttcgtcggtggcggtaatgccctcaagcaggtcgacggtatcgccagccttcacgcgcagtggctcagtcggcacgttcagggtcggtgccgcggaatcttcctcggatgcttcctgcgcggtgaagtaaccgaactgacgggcgatgccggcagagtcagcatcggcatcagcgtcgcgggaggtggcgtaccaaccgtaggactcaccagcggtcaggccggtccaggtggtggatgcgccccagccagacttagcggtgtcggtgccgatgacctcgccagtatcggtcagtgcaaccatgctggaggtctcgaaagaagtggtgcgggtgttgagctgaatcggcagacgcaattcatcctcgtgaccgttgtagcgctggcggtcgtcgtactcggtggcgttgtggtcatcgagaagcggcgagtaggtgttgatggctacctcggagttctccaggtcgaactgcagcaggcgcaggtaggaagaaccgaagcgcaggccggtgtcgtcgccgtactcgccgatttcggtcagaccgagctcgtcagagccaatctcgtagaactggtagtcagcaagcagctcgatgacatggttgccagtctggccaacgtcgttacgggtcacgatagatacaccgtgctcgtggccagacagcaccagagcgacgttcgggttcttctccacaatctcttcgaagatgatgcggccatcgtgggagaagtcagcgccgcggccatccgggttgttggatggcttgttgtacgcgtgggtcagcacgatggcgttgcggtcggagtactgcttgagaacttcatcagcccaagcagcttcttcgtcggtgacgtcgtagcccaggtgcagagcaatgaagtcgtggccttctgcactgaacaggtcgtagtggttgtcgttgtcgccctcggcatatgggtggtaggacgcatcgtgctcagcccaaccgccctggccctggagtgcctggtaacgctccggaccgaagtattggttgtagaggttatctgctcctacctcgcggccggtgatgttgtcgtggttgcccggcaagacaccgttaacgacgccggcatcatccaaaatggcctgtgcctcagaggcgacctcgaattccttcttggcgttgtccaagtcgttagtctcagaaatccagttttcgatgatatcgcccgtgtgtgcggagtagacgattttgcgctcgtcagcgttgtcggcaacccactgggtggcagcggtgtagccttccttccacttggcgcgctcctcctcggtttcctgctcgacagcaccctcagagaggtactgggtatcggtgtggtgtgcaatggcgaagtcgtagtcttcggcaaattgctcgtcaacaggctcgttcagatcatcggcgaaggtgtcgtaacccagcaccatggtgtggatggactcgccgtcgacgtagtcctggcccagttcagcggtcagagagacctcagcgttggcattgcctgccgatgccgccttctcctcccattcctcttcttctacattccacacgtagagacgaacctcgcgcttcggatccacggtgcccgaccaagcaacgtcgtgggtttcagcggcagcatcttccagctgcaggtcgaaacgctggaaaggcaggtcgcgggtcgaagcgctagcctgtgcttcggtgttgcccggtgccagttcagtctggaagtccgcgccctcttcgtagtcgaaatccaaggactctggaatctcgttcacggtgccctggaaaccaccctgggcagtagcgagattggctttagtgaaagtcgtctcgagatcgccaccgctcggattttctgcgcgagcggagataccaacgccatcttcgccctgctcggtatcggtaccagcagtacccggcaggttgccagaggtaaagttgatggactctgcaatcgggttgccgaagacatcgtggccagaaatttccagcgtgtgctcgccttcttccagaccagcaccgatggtctcgccgagttccacctcttccccatccaggcggatctccaggtcacgagcaaccaggtctgggttattcagctccacatccaggatgaacgggcgggtgatgtggtcaccttcggccggagtagaggatacgatgctggcggattcttcggtggtgagctcggcggcatcgtaaagcgaggcaatatcttcagccgacagcggctcagtccacagacgagcagaagcaaaggtggcatccgagtagaactgcggggtgttatcgctaccggagtcgccaccaatgatgaactgcgtggcaccattttccggcaaagtcatctcgccagtggcctcgaggttttcagcagcctgctcaccattgacgaagagctgcgacttctcaccgtcgaagacgccaaccgcgtggtaccactggcctggctgcatctccatcttggcctgcttgtagctgccatcaacgtgaacggtgaaagtcaggtcattgtcgtagattgccagtgcccagccgccggattccttgttggcgcacaacgacttttcgttgccgtcgaaatcaccgtcgaagcggaaagtgcactcgactgcgaagccatccttgagctcgtcgaacttgtcgccgacctcgaagcccagcgcatcgcgctggccatcaaaagaaataactggcttgcccagaattgggtcctgctggactaccggtgcgccggactggaccgggtcaacgtctgctgcgatatcgctggcggagttatcggccagggacatatcaataacgtctgcgaccggtgcctgctgaccgtgcgctaccgccggcgcaacgaaggtagagcccgccagggacaaaattgccaggaaagaaaccttggaagagaaatgcttgtgcatgagagtctttcgagtagagagaaaagagcacgtcccgccgtccatgccgccgggaacgcacataaggctatgcacatttctttacttagagattgcgcctacatgaacacctgactaagtccatgcgccaaaatttaagcagtagtaaatagcagattaataggtttcacagttctcccaccccgcacaattgccccactggtgaatctaaattcagccagttcgccacttcccgcgcgcccgttttgcacccaaaacttcctccccggcacacacggaagcataaggcgcagcacaaccaaaccacctcactacacccactagccgggaacaagagccacgcccacccagtcaactcatcaactacaggccaaaacatctcccaccctgcacgaacgcgagtcatcaactcgcgttcaccccataaggaagcgcaccacaattggggtacgagataactcgacaagttagccacaatatgatttggaacatatgatgttgggatacgtgatcgacaacactaggaacttttcatgagcactcctgtttccgaccaaccctcttcctcacatgcggtgagcgaagaaaacaccaacgacgaagggaatacacaaggctccggcttcagcatgcgctgggccattacgctgttcggtaccgccattggcgccggtatcctcttccttccactcaatgccggtgcgttcggtttctggccgttggtctttgccacggtctttattttcccgctggtgtatttctcacaccgcacgtatgcgcgcatcgtcagtggtgccccgacgaaagaccatggcaaggacgtgctccagctggttcaccactacatgggttccaaggcgggcattttcattggttcgctgtactggctgaccgtctttccgacggtgctgatttacggtgtcagtatcaccaatgcggtcgatagcttcatcgtgaaccagctcaatggcccggaaatcgaccgctggattctggcgtcggtatccgtgttcatcatgaccatcgccttcgcctttggccgcaagccgatgctgtggctggccaacgtactggtttacccattgattgtcgccctggcggcagtgtctatctacctgattccgcgctgggacttccagtccttcttcaactatgagtacgaagatggcgcctggggtatcgtcaagggcatcttcttagtccttcccgtgctggttttttccttctcgcacatggcagcactgtcgcagttctccctggatatgcagaaggaatacggtgcgaagaccgaaaaggtcgtctcgcgtaccgagtggtacaccgccctgatgctggttgtgttcaccatgttcttcgtgtggtcctccgtgctcgccctgggtgcggacggcatgcaagaagccgctgaactcaacatcccggtgctgtcctactttgcgaacgtcaccggcaccccattcatggcgtacatggccccgatcttcgtcatctgtgccatcgtgtcgtcctacttcggtcacctcctgggtaccgaggaaggcaccgagtacctgctgcgcctggccttcccgaagcaggtcaaaaaacacaagcgcaagaccatgttggcgctgatttacttcatcaccttcgtcggtaccaccctggtggcaatctttaacccatccatcgtcagcatgatctccgtggtcggtggtgtcttcgtcgccttcctggtctacctgctgccggtctacatgttcaaaaagctcgacgtctacaagcacttcaagaacgacaaatggaactacttcgtcttcggcatgggccttgtcatcatgaccgtcgccatcattgatgtggtgggttaaccccgcaaaacacccccatcaaccgataaaacaagaattccacagccaagtgcttcgccaaccttgacacggcactttataattaagaggaactgaacctcagtaatcaccggctcgtttccggtgaagaatgctccagtcggcgcccactgggcgtcgacttttctaaacgcgaaagtgtcctatcccaatgcagaagaactaccgcgtcggtatcgacgtaggcacccactccatcggattcgccgcgattgaggtcgacgatcacgatcgtccgatccacatcctctccgcaatgtccctcatccacgactccggtctggatccggatagtaacaagcgcgctctcactcgactcgccgaatccggtgtcgcacgtcgcacgcgccgcctctaccgccgccgtcgcaagcgcatggttcgcctagagaagttcctgcagcaccagggatgggaaaccaaaccctttgaggattactctgacccctatatcccgtggaacgcacgggttgctttggtcaatggttatatcgaggatgatcaacaacgcggtgagtacctttcaattgctcttcgacacatcgctaaccaccgcggttggcgcaacccctactggaagactcgtagcctttacagtcccgaaggcccaagtgatgcctttgaaaccatccgtaaggatctagaaaagcgtgccggccgcccagtccccaaggacatcaccgttggacaactcattactttcgctcgcatcggtactgaccgaattcgcggcgaagcacaaaataagaagaccggacacaataaccctgcaatcctctctgcccggctgcatcagctagaccacgcacgcgaaattaacgagatcgcaaaggtgcaaaagcttgacgacgatcttcgcaagcacattatcgacctcgtatttgccgctgaatcgcccaaaggagcccaacttggtcgcgtcggtaaagatccccttcaaccaggtaaagatcgtgcactcaaggcaaccgatgccttccagcgctaccgtatcgcagcactgactggaaacctacgcattcgcggcactcaagggaacgaccgacttactcgagaacaacgccaactaatcttcgaccacctggttaatcttccccacaccgaagaaccttcctggctcaacattgctgagattctaggaatcgacaggggtgatctacttggcactgcaaccatgactgacgacggtgaacgggccggcagtaagccaccagtgcacgacactaatcgtgcgatcctcagttccaaggtcaaaccactggttcattggtggaaggctgctaacttcgacgaacaaaaagccatgcttaagtccctttccaacgcagaagtcgatgacttcgactctccagcgggtgccagcgtgcaggctttcttcgccgacctcgatgagaagcagcacgacaagcttgattcactgcacctccccatgggccgtgctgcttacagcgaggacacgttagttcggctcaccgaaaggatgctgaacaacaaccaggatctctacgaagctcgcctggccgaattcaacatcgccaaagactggacaccacccaaaccgcgtatcggcgagcccgtaggaaatcccgctgtcgaccgcgtcctcaaggcaaccgcacgttggctcgaagcagcgcacaaagagtggggtgctccaaagagcatcatcattgagcacgttcgtgacggttttatcagtgaagcgaaggctcgcgaaatcgaccgtgacaacaaccgccgcgctcagcgcaaccgtgaactgttcggaaagatgcaaagcaaactcggtatcgagggcaaaccacgctcagccgatctctggcgcttccagtccgtccagcgacagaactgttgctgtgcttactgtggagacaccatcaccttccagaattgcgagatggaccatatcgtccctcgtgccggcgaaggctcaacgaacacccgcgacaatctggtcgctgtttgccaccgttgcaacctggcaaagaagaacatccccttcgcggtgtgggccaagaatgccaacatccctggtgtcagtttgaaagaagcactgaatcgcacccgccactgggttgaagataccggtatgtcatccaaggatttccaacgctttgtcagcaacgtccgtgcacgtctgaagcgcaccagtgtcgacgaaccactcgataatcgttctatcgaatccgtagcctggatggccaacgagctacgcagccgcgtcgcgcaacactttggtgaatacggaaccaaagtcggcgtttaccgtggtgagctaaccgccgaagcacgaaacgccgctggaattagacgcaagcttcgtttcatcgatggcactggcaaatcacgcctcgaccgtcgccaccatgcagtcgacgctgctgtcatctgctttacccaaaactacgttgctgaagtcctcgccaaacgctctagtatgcgccgcgccgcacagcttaaccgtgagccggagcaatggcgtgagttcaccggcagcaccgatgcgcaccgcgctgcatggaatgcatgggtcaacaagatgcacctccttgctaaccttttgcaaactgcccttgatgaagaccgcatcgtggttacctcaaaccttcgccttcgtctggggaatggtcgtgcccacgaagacaccattggtgagctaaagaaaattcgtgttggcgacgctatctctgtcactgacatcgatcgtgcctccaccgaagcactatggtgcgctctcacccgcgatcccgacttcgatccaaaggaggggctgcctgaaaaccctcaccgccgcatccgcattcatggcacctggtatgacgccgacgaccacatcgaggtattccccgtcggcgccggcgcgatcaaggtacgtggtggttacgccgaactcagccgtttccaccacgccagggtctacaagatcacctcaggcaaaaagccaacctacgcaatgctccgcgtctacaccacagatctcactgcataccgcaatgaagacctcttcagcgtagaaatcaagccccagaccatgtcgatgcgccaagcagaaccaaagctgcgcaaagcaatcgcggaaggacaagccgaataccttggctggattgtcatcgacgacgaactactcatcgacacatcttcatttaactctggacagattgccgagatgcaagctgaatttggcatggtgaggcgttggaggctcgatggcttcgtttctccctcaaagttgagactacgacctctccagatgagtggagaaggactagcccctggggccagcgcgggttcaagaaagattgttgaccagcccggctggcgtcccgccgttaataagctgttaagtgcgggtaacgtcaccataattcgacgaaattccctcggccaggttcgcttgaatagtaatgctcacttacccaccacgtggaaggtggactagggcgcatgcatcccggatggcgtgtagttgatttctctgatttcaatggccagcttcgatattctcgtggtcaactcctcgttgagcctgaaagctcccctaaaactgtgctacctctaagtcaaatcgcagtcgtcttggtagggactaaaacgacgctgagcggcgcgcttctgcaaaaattcagcgagtatgacatagctgtactcgtctgcgattggcggcgcattcctatagccggtgcgcttccctggaataatcactcgagaattggtgctcgtcacaaggcccaagctgaactatcagtacctaagaataaacaagcctgggcccgaatcattaaagccaaaatctacggtcaagctaaggtactacactcaacaaattattcacccaaatctgatgagttatttgagctaagtaggagcgtacgatccggtgacccagacaacaaagaaggcttagcggcaagaaagtactggagtgctattagcggtagcatctcatttcaccgtttacctggtacaggagctgacacctggaattccgctttagactacggatacacgcttctccgcggatacggtatgcgcgcgtgcacctcagctggactttctggtgcgcttggtttgtttcacaaggaacgaagcaatgcttttgctcttgtagacgatctcatggagccgttccgcccaatggtcgatcaaattgtcttcaactcaatcgagcctaatggggattttgatcgtcctgacaaacaactacttagtacaggccttgatggtgccttctccaaagacgggcgcacgctttcaactgtattcaacgattttgctcagcactacgggaattatgttgaaggaagagtaaaagacctgaacgttcctagatgggaaggcagcatcgatgccatcgaaggactctgagcccatgtggtgcgtggtgatgtttgacttgccagtccagtccaaagtccaaactcgtgaagcaaaccgtttccggaaccgtcttctggatctaggtttttgccgcgctcaatttagcgtctatgttcagtatttccctttagcgtcccgtattgccaccactgttaagagcatcaaaggaaatattcccctcggaggagacatccgaattgtgaccattaccgatcaccaatggtcgaaggcacttcgtttttctaactccaaaccttcagatgtcgaagaaaagccctcccagctaacaattttctagcagcgatcatcaagatagacccagtacaacgcccatttttgggcggaactgaagtctatcagggtctttaggaactgaaccccagcgtgtaacggcgctcgttactcgcattctgaagtctatcagggtctttaggaactgaaccccagcaagcctgccaatcgcacccaagatagttgaagtctatcagggtctttaggaactgaaccccagctatcagcgaccctccacgacacagaaccgaagtctatcagggtctttaggaactgaaccccagcgtgtctccccacgtgactgacgggtcccgaagtctatcagggtctttaggaactgaaccccagcagacgactgatttgccgtcgattttcgcgaagtctatcagggtctttaggaactgaaccccagcctatcctgcgtgattaattgtctgtttcgaagtctatcagggtctttaggaactgaaccccagcctggcgcggtgttgtcgttgcccccggtgaagtctatcagggtctttaggaactgaaccccagctgagttttctttgatggttgctgttgctgaagtctatcagggtctttaggaactgaaccccagcgtgccgagttcgctaaatgattccacgcgaagtctatcagggtctttaggaactgaaccccagcctagtgtaagtggcccgttgaagttggtgaagtctatcagggtctttaggaactgaaccccagccctccggcacttccaccacgtggtaagggaagtctatcagggtctttaggaactgaaccccagcccacaccttgccgagcttatgggtgtctgaagtctatcagggtctttaggaactgaaccccagcgtcttcggctttaggtgcgtgaggttaggaagtctatcagggtctttaggaactgaaccccagccacttgaaccgtgacaatggaaacttcggaagtctatcagggtctttaggaactgaaccccagctgtttgttattggttggtggtgtgttgggaagtctatcagggtctttaggaactgaaccccagcccgggtaaataattgggatgccgcgatcgaagtctatcagggtctttaggaactgaaccccagctgccaggtatgagggtgataaaaaacgggaagtctatcagggtctttaggaactgaaccccagcggaccatgctccggacgtggctgtttgtgaagtctatcagggtctttaggaactgaaccccagcttagggtgatgtagttgccgattggtatgaagtctatcagggtctttaggaactgaaccccagcgacaatggtgcggtgccttagcgaatacgaagtctatcagggtctttaggaactgaaccccagccgaggtggcaaccgaggataaggcccaggaagtctatcagggtctttaggaactgaaccccagcagagccagtcccacttatcggaaatccagaagtctatcagggtctttaggaactgaaccccagcgtgaagcctactaccatgattgctttgtgaagtctatcagggtctttaggaactgaaccccagcgtcctcgccgccgggggcgagctggtgcgaagtctatcagggtctttaggaactgaaccccagccgcagtgtgtccgcccgcaggtgactgtgaagtctatcagggtctttaggaactgaaccccagcccgcataagcgaggatgagccacgcggcacattttatcgtcctaacagcttgagcgtgggttcaagacctagatcgaaatcaactcttcgagcctgctcaaactacttacaagaactcactcttctgacttgaacaaatacccaagaaacaacctcaagaaaccgtccagtttctctcccgtgctttctactgcaacttctccggcggtaacggggcgccctcaggtggcaacaccttcgggtacgcgcgagtcttggtggaaacgcctgggcctacagcagctacttctttggagtcgccgttagggtcagcttcgaccccattaccgtcggtttcgccgcggtatggggtgggatcccaatgggtattgacgagtttgacctggctgatccagccgagtgcgagcacggcaaggccgaccagggcgatgaggatgaggccgacgaagccatcggcacgcgaggcgaagccgatgagcatgccgaaccagccgaagtccgcatcaccgaaggtggtgttcgcgctgccgaaggagcccagcacgccgagcaggaatgctgggaggaaggtaatcagcaggccgttggcgaaacctccgaaggcagcaccacgacggccaccggtggcgttgccgtagacaccggcggcgccaccggtaaagaagtgcgggacaaggccaggcagaatgagtgccacgccaaaggccgggttgagccagagcgagaggactgccaggccgaccaagccaccggcaaacgacgtgatgaagccgatgagcacagcgttttgcgcatacgggaacacgattggtgcgtccagggccgggatagcgccaggaacgaccttggcggcgatgccctggaacgcagggacgagctcaccgaggatggtgcgtacaccgaaaagaatcacagcgacggcaacaccgaactgtaggccctgggtaaccgactgcatgatgtaatcgccgacgttgtcagcaccgccttcgaatgcggtgaaggcttcttcagtaccagcacgagcgataaacagaattgccaacacgacgtacatcagcgccatcgacagcgcggtggcaaccatggagtcacgcaagaagcgcagcccctcaggaagtttgaggtcttcagtcgagcgagacatcttatcgcctttgccgccgacgagcttgcccacggcacctgctgccacgtagcctgcggtgccaaagtggccgatagccacggagtcatcgcccgtgacacgccgcgtccacgggtgtgcgattgcgggaagcgaaaccatcaaaatgcctagcagcacagcaccgaagccgaccactatgccggaggcatagcccgcaggagccatgaccatcaccagcatggtcgccataaacagcacgtggtgaccagtaaggaagacgtagctcattggggtaaagcgagccagcagcaacgagaccacgaagcccagaatcatcacccaggcgacctggctgccgaactgttcttgagcaataccgacgattgcctcgttagtcggcaccacaccttgtgcgccggttgcgccctgaatcatcgcacccaacggatccaacgaagccgttaccaggccagcgccggcgttgatgagcaagaagcccagggttgctttgatggcaccgccgagtacctgaccaacgccacgccccagcgctgcgaggccaacggcggtgataataccgatcaaaaatgccggtacagaaagaatttgattaaccaagaaattggctattgcaacaacgatatccatgatgaggtcctttagacgtcgtaaagctcgcgcagagcagcgtcgatttcctgttgattggtgaagtcttcgatgacgtagacggggacgccgacatcgccaagcgtggctgcaatctcacccgaggtgagcaggaagtcagcttcctttgcccggcccttcgcggaaatcgtgtcggtggcctccaccgtcaggtacggaccccaaccccacacgtcgaggacttgctccagggtgttcttcaaaaagagtgacgttcccaggccgttgccgcagacggtgtaaatcttgcccttggatgccacggaatcctcagccacctggtgcgttgaggacgcagtacttaccgatgcccccttcacctcagccttgctatcccctagcgcctcacgcagttcgtcaacgctttcgacagtgtccaagcgctcgcgcttagtcttgttgcccaagatcttggccagctcagacatcgccttggtgtgggccttgtcatcttgggcggcaagcgccaccactagcgtgaccgggtcattggtgccgtggccaaatcgcacgggctcgtcgaggcgcaaccaggaaatagctgtgcgctttactgcctccgaagggcgtgcgtgtgcaaacgcgaagcccggcgcgaccacaatgtagggaccattgtcctcaaccgaggtaatcatcgcttgggtgtaattgccggtaatggcaccggtcttttccaacaagccaccggcggtgcggatggcttctttccagtccacggcgttgccgtgtagctctactgcagagtcttcgagcaattcgctcagtttcgacatacctgctccttatggtttggagccgagtttttcgaccctcttaaccttgttattaccagttgggcatatctatggacaatcccctagttctaagttttcgcgtacaacggatcccatgacttccgttaacaacgaacgcccgaacaagaccgctttcattactggtgcgacccgtggactgggccgtgctattgctaaggaactctcgcgtgaccaccacatcatcgttggtggttccagcgagactgcccgcgatgtagctgctgagctgcctagcgctgagcctttcatcgcggacctgaccgatatcgctggcattgaaaaggcagtcaatgagctcaacattgactcccttgatgtcatcgttcacggtgcgggcatcgtcgcgcacaagccgacgacggagaccagtgctgcggaatggcagcaggcttttgatgtgaacttcttcgctgttgctgagctaactcgcttgctgctgccggcattgcagaagaccaacggcaccctggtagcaatcaactccggtgccggtaaccactccggtgttggctacggtccttatgcctgcaccaagcacgcgctgcgcgcctacaccgatgcgctgcgcgaggaacagcgcaacaagattcgcgtgacctccatccacccgggcaaggctgactcggatatgcagcgccagattcaggcggagcgcggcaacgaatacgacgagtcgcagttcatcaagccggagtccattgcccgctcggtgcgtctcgccgtcgacttgggcgaagattccaccatcgaagagctagttatccgcccctccaacggcaagtaacccggaactagcgccctaaagaaccgatggcaatgacattgacgccatcaggtcggcggtaggacataccaccgccggtaacgactaaaagctcggttggttcctcgacaaaggtagcgaatttctgcaagctagcagcggcctgatcaacaacgtcggggtggtgaccgagcttcacttcgaccaagatggtttggtcgtcgacggtagcgattgcgtctacttcatcgccagaagacatacgagcgtgatacacgggttcattggttaacgctcgcagttcatgaaccaccaatgactcgaaaagctggccaaagaactcccaatcttttagcaggtcatcgggtttctttttcaacgctgccacgacaagcgctgggtccgccaggtgcctctttggagctttacgtaaaggcgtacgtgaacgcaacgactgagaccaagctggttgatcctggttgataaagattcgctgcagggaatccaggtaatcaattactgtgtcacggcttagctgggcatctttcgcaattgtggaagaagacttctcggtgccgacgccgcgagccagggattgaatcgttcgcataacacggcttgggtcccgtcggatgccatcaggggttgctacatcgagctcacacaccgttcgcgcataatcacgtaggttggcctgcgcgtccttcagcgaaagatcgagaaaccccggccaacctccacggacgattctttctgctaagtcattaatagttaactcagaggttggtactgctggcgcctccccctccacgagtcgagacagcgaggcaagccctgtggattcgccactttccgacagggtcatcgtgtgcattgtcagtcgcgaaaagcgccctgctcctgaatgtcgctgcgcagcttcggaaggagccgttgaaccagtaagaataaactggccagtttcgccacgcttatctacttcgtggcgcacgacatcccagagtcggggctgagtttgccactcgtccaagacccgcggtgcagcgccctgcagcactaacgttgggtcgattcccatcgagatcgaaacatcaggatcaatatcgacctggacctcactgttgccatgatgtcgcgctgtctcagtcttgccgcagcccttcgggccttcgatcagaagagccccagcacggcgaagagactgctcgacaaattcatccgccaacctggggatataatctctctttaccatttttaagagctccatccgacactttataatgatttcatcctacattttgtaacgattctatcctacaatttgtaacggtttcactcgacactttgtaaaacgttaggccaggtaaccctcgacgctcatcaaagcaataaataatggttacgagtaagtgtagaaggtatggaaacaaacccagagaagatcatcgccaacatgctcgacgacatggccgaaattggggactggattagtatcgctgatgctacggccaccaacggtaagaactcatttcatgcaactcacgaagacgtaatggcaatcttgactgcagtgaaaggcggccaaaccatcatcccgggaaagattgagggacggtttcaagacttacctagcgactgggatccatcagaaatcacttcagaagtcttcgacagtccagatccaattgccgctgtgatgacagtcttattccggccaacaggtgactggcctgagctcaaagatggaaatagcacaccggcataaccattcgaaggaggcatcaccaccaccgtcgaccgtcgtgcctgcgccgcaccctcggcaccgactacgtcgtcattggcgacgaacccccaaccgctaagtagtgagcagtcactacgacattagacttataccccggcagtatcactacattttcattaagcatatggcctggtcttcttgctcttcgatgagctaaaacatgccgacaggcaaatccttggagtggaaacttctcaacgtttcgactacttcaaaggagagtgtcatggaaggaacgatgaaggcgcaacgcctcaacaccgagaccaaggaaatgcggattgaggaagttccgattccgaagccgggtccgaatgaggtcctcatcaaggttgcatactgcggtatctgccactccgatatttcctgattaacggcaccttcaagatgggctacccgccagagatcacccagggccacgagtgctccggtgagattgtcgagctcggcgacgctgttaccggctgggaggtcggcgacaaggtcatcccgtctgctggtcgctcctgcggcaagtgccgtcagtgccgccgcggcaacccggcacagtgcctgaatactgagcttatggctttccagtatgacgatgcttgggcacagtacaccctgtccggtgcttccggtctggttcgcgtgccagaaggtgtgccgatggaccaggctgcaattcttgccgatgccgtcgctaccccatttggtgccgtcaagcgcaccggtgaggtcaagctcggcaacgcggttgctgtctggggcctgggtggcgttggtacccacatcgtccagctggccaagctggctggtgctgttccggtcatcggtgtcgacatcaacgatgatgtgctcgagcgcgctaagcgcctgggcgctgaccacgtcttccgctccgatgacccggacctgatggacaagatcgaagaggtcacccgcggccgcatgatcgacgtggctttcgatgccgtcggcatccagcccaccatgaagcaggctatcgactccctcgaccgcggcggtcgcgccgtcctggttggtctgtccgaccaggagctcaacgccggcaacatggagcacttcggtctgcaagctctgcaggtacacggccacctcggctacaagccggtggatatctacctgctcaccgagctcgtccaggcaggccgtctcgacctgtccgagtccgtgtctaagattctgcctctcgatgacatcgagaagggcatcgaaatcatggagtctaaggagggcaacccgattcgcgtgctcatcgacccgtgggcagacgaagacaagtaatttccccggcgctaaggttattcagcaccataaccgtgccaaaatggcggcatactaaagcttatctttagtatgccgccattttcttgcgatttttcaataaagccaccagtgacttctaaaatgatctcctcacggacattatgatgcatgacattgacatcgatttcagctagtcactacgcccatactcaatccttacccgcattgcgtaaactaaagttttaaccaacttcccttacccaccgtaacacttctattcgaatgttaacctatacaaaatattcgcttcaaaccaatccagtaacgcaggcttttatacatgactgcgataccataacaccttaagagcagacaggcagtcaaaaatatagctgcagcaatagtcagaactctaacaagcccgcctaaatctatgtaaacccaacactgtggcgattatagccatagatcaaacaaggactacaactcaaggaagtgatttaaaggacctttttattctaacgaatccgcttgtaaagctgtactgcaaaacatcaacaatgctcgattggactaaattgaaaaatactcaaaaccta

SEQ ID NO: 3980 - DNA, 23276 bp, synthetic construct
  misc_feature 1..23276: note = Synthetic
  source 1..23276: mol_type = other DNA
gatattccggtccgtggttgtcgcggccatgccgtcgtcgttaaggcgctgctcaaagcagtggaagcagaaaagccccgcacccgctacacggtgggtaggggtgcgaagctgttggtagtgctgaaggcggtgctgccggatcgggtgtttgatcgggtgatatcgctggggtgaaaagtccagctgcttaatacttgatgtttacactgccgatgccgttgtccaccttgatggtgagcacgtgtccctcgcctgcgttgtgtagtccgggctggcagttggtgtcgccgatgccgttgttgcattcgactcgaaccggcacttcgttgggtagctcgatctgcacgttgccgatgccgttgtccaccttgacggtgcggtcctcgctgagtggttgtaggtcgcgcatattgacggtgaggttgccgatgccgttttcgtagacgcgctgcaggtcagcttcagtgcggacgacagtggtgacatcgcctaggccttctggaggttcggcgttgtgatatgccaggttggcaattccgccgagaccagcgaggactacggcagctgccacccacacccagccgtaggacttcttcttgggtggctctggcgccatggttcccggctccggaaggtgccacagctcaggcacggtgccgagcggatcccacgacggcggggtgggcatttggaagcccggtgcgggggcaataatgctgttatccaccttcggcggctccggttgcctggtgtggaggaagtaccagaacccaaaggcgagggcgagggagatcatcgtgctgccactaacaaagtctccggagccgcttgtggcgctgaagccgaagacgagcagtgcgacgatgagccaccagccggtttccttttccttctggtactggtcgctaaggttcttgagcaccgcctcaattggggagtactgcatggagtaacgcggcatgatcagccatgccacgaggtagacgcctaagccacctcccacaagtcccgcggcgacgaagaggatgcggataagggtgggatcgacttggtatcggacaccgatgccttcgcagacaccggcgatcttggcgttgccgccctgggaggcagggatgcgggcggggcgggtggcccacatcgtgtttaccgtgttcgtgttcatacttttatgttcgcgcactctgacagcaaaaacatcagggtttacaccgatttcaaaagttcagggtcatgccaagatataagacatgatgtacccgaagttttatcggccgcgtaagcgtgtggtgggaggcgtggcctccggactagccgttcatttaaagatggacgtgctgacgattcgcctcgtgctgctcgtctcttgcttgttcggcggtcttggcctggtgttttatatgggtacctggatgatgacgaagccggcgaccgcggagcaagaggcctcgtgcgtgattccggaggggaccgagaccccgaaggggctcaacctgatcttcgttatcggtggtatcgccgctgctgtcttgagtttttccgccttcacgggtttccagggatcgacgctggttccggctgtcattgtgggcgtgggcgcactggtggcgtggcaggcctatgaccaaggcgtggaagcgttgctgcgaccccggaacaccctgaccatcatggtgggcgtgattttggtcttcgcgggtatcttctttgtttcgatcaactgggcggatcccgcggtgttcggcgcgacgtttacagcggtgctgtttacgctggtcggtgcggcggttctcgctgttccattgctgctgcagatgtggcggcgcctcactgaggagcgcgatgagaaagcaaaggccgaagagcgcgccgagatcgcttcccgcattcacgattcggtgttgcagaccctggcgctcatccagaagcgttcggaggaaccgatggaggtcgctcgcctcgcccgcggtcaggagcgtgaactgcgccagtggcttttcgacggcaaaaccgcctcctctaccaccgtttcccaagccttggaactggccgccggggaggtcgaggatctctacggtattcggattgccccggtcacggtaggggataccccgatgacggatgagacacaggccgcggtctttgccgcccgcgaggccatggtgaacgctgcgaaacatgcgcatgtcagctccgtcgacgtgtattccgaggtcttcggggacctggagattttcgtccgcgatcgtggggtgggcttcaacatgtcggacatcgaccctgatcgccacggggtgaaggattcgattctgggtcgtgtggagcgggtcggcggcgtggccacggtgaagtccacgccgggggaaggtaccgaggtgcacattaagttgccagtagactcaaaggcatgattcgtgtcttcctcgttgatgatcattccgtgttccgttccggcgtgcgtgccgagatttcggagcacgtagagatcgtcggtgaggcaggcggcgtagctgacgccattaaggggatcaccgacacccaccccgatgtcgtcctgctggacgtgcacatgccggatggcggtggccaggctgtgatcgcgggcgcgcatttcccgcgctatctggcgctgtcggtctccgacgctgcggaggatgtcatttcggtgatccgcgcgggtgcccgcggatatgtcaccaagtcgatttcgggcccggagcttgtcgacgccatccgccgtgttcacgaaggcgacgccgtcttctcgccgcgcctggcagggttcgtgctggatgcgtttgctgcgccggacgcgcacgctggtgtgggtgtggttgatgagcagccggagcagccggagttggtggatgcgctgacgcgccgggagcttgaggtactgcgcctgctggcccgtggttacacctacaaggaaatcgccgctgagctgtttatttcgatcaagacggtggagacgcactcgtcgaatattctgcgtaagacgcagcagtcgaatcgttatgcgctgacgcgctgggcgcagcgctacgacttggcctagacatcacctaggcacttgaactgagcgggttattccgccatactattccttgtgtcgggaacaagtgttcgaaaggatgtgggggcggatctgtctgggttaagccgggctgatcgcgtcgctgtccttcgcgcgcgcatggatgctgtgggggcaattcccgctccagaagtcctgcctgaagagggcattcctggtccggtgggcttgggagtgaactttccgcgcagggtggtgctgcagtgcagcgatacgcccgcatttgtcattgagatcgttcgaacagcagtgcaagatggcaactttgtagccgtggtgggctggccggacttgctactgacagagattggccaggggctggagaaagtggtggcggtcccggatccgggcgtggaaccgctgaacacggtagctgtgctgtgcgaaggcatggacttagttgtctaccgctctgaggttcagctgagtctttcgccggtgcgggctaggccgctgctaggcaagcttcgcaaggggaacgcggcgttgttgctggtaggccttactgccccgtccccgcatgtggtgatggatgccaaggtgcgcggcttccatggcattggccccggtaccggtaggatccgcgggtttcagatccaggtgcagcttcgcgccaagacaggcgtgagcacacgtgtggtgcaggtcggcgagccggggcataaaaagacgcggctgcgggtggtctaatgcgggtcatggcagtgtggttcccggattggcccacgcatgccgcgggggtcatggcggtatcgcagcagcaccgggtacgggcgtgcagttctttcgcccgcgccaaaggaatcaggcgtgacatgcgggtgcgtgaagcacaagcgctctatccggcgctcacgctggcggagtgggatgcggatcgggatgcccgcgagtttgagccggtggtgcgggaactcgaagagatcgcccccagcgtggaggtgctgcgacctggcctggttgtgatcgatgccggtgccgccggcaggttttacggtagtgaagacaaagccgtgcagctcctcgccgatgccgcctctctcaagggcgtggactgcatgatcggcatcgcagacaccatcaccaccgcgatcatcgccgcgcggcaaggcgcagcggtgccaccgggggagtctctggcgttcctgaaggatcaacccctaggggtactgaaattcgaagaagcactcggctgcgaggcggaaacgctcgatgcgctaggcatgctggggattcggacgctcggcgaactggcgcaactgccaccttcggccgtcgttacgcgctttgggcgggcggggctcacctgccagcgcattgccctggggcgggaggaacggaaggtcgcgccggagctgcccactacggacctgcgggtatcgctcaccccggaggaggcaatcacccgcgttgatgaagcggcgttccttgcgcgcaccctggcagcccaactgcacgagaagctgcagcgcgcaggggtggtatgccaacgtctgaaggtgattgcggaagcggatgtggctattgagcgggtgtggcgcacccgtgagccgctcacggagtctgcgacggcggatcgggtgcgttggcagctcgatggatggctgagcgcgcggcagatcccggggatcgtgacgctagctctcgagccgctggaagtgagctcgcctggggcgggcgccgggctgtggggtgcggtggatgagcgtgctgagcaggttcggcgcgtggtggcgcgggtgcagtccctcttagggacggatgcggtgctgcagccacgtcttgccggtggtcgggggccggccgaacgcacggagctgatcccctacggggaggaggtcacgccgcgtcgcgctccggggacgtggctgggggtgctgccgtcgccgttgcccgcgcgtgcagctagccatcccgccaccaaactgcagcttctcgacgccactggcacggctatccacgtcactgcggacgcgatcctcagcgctacacctgcgtggcttgtgcgaggacaccatcgttgggaggtgacagcgtgggccgggccgtggccggtagatgaccggtggtgggatccagacgtggcgcaaaagtacgcgcggatgcaggtcgtggtggtgcaagaggataccccgcgggccttcttgattgtgtggctcgcggggcagtggcgcgtggaggcgacgtacgactagttctcggtgaagtcgatgactaggcgcttggggtcttcgaggtaggagacggagtaggggcgggggctgcctttcagtccgatgacgaactgggagcggccctcgaacgtgccaccggagatgacttcagccacggcagggccggagccaactgtagctgggaggtcggtggcttcgacaccgatctcgaaagggtaggtggtgccgtcgatgttgacgttgaggaaggtatcgccggaaactttgagctcttggccgctagcttgctgctgtgggagtggaacgtagtcgatgtgccacccaggtttaccttcgccggtgagctcgatgaccacgcggtcaaacccctggtgggtgccggtacgcatggcaacagggaccagcttcgctgggacttcgacaggctgggtcttcatggtggagttagcctggcctagcggggcaatgttcgacgtgctggactgttgggagtcactggtgagggactgcttttggatctgagttggtccgccggacgatgtttcgtcggagtcgcacgcagcgataccgacggcgctcaggccaatcgcagccacgagggcagcggtacggatagggagagaaacagcagtcatggcttcaccgtagctagttgtgagtcaaaattgggacagtcgcaggaaatgttgtgaaacggtaataacaactttcactttagcaacagttagggttgcctttcctgtctgctgggcaaccggctaacctgggagtatgactcccgaagttctctgctcagaccagcgcgtagagcccctgcccggcacggcaaaaaccgggacagttttcattgcctttgaacacgccctcggctggggccacgacatcatggatggcgatgcgttcggccccgaactcacagctcgtgtggcagagtttctccaccgcaccggggctagcttgcaattgatccgcaagcctggccgcgaagggcagcagcgcagcattcgcagtgttttcatcgcttttgtggaacaaggctacgtggaaaaactctctcttcgctcgatcgaagagttgctcgacttggatatcagtgcccccggcacttccggtggcgaaccagtgaaccatccggtcgttctcgtctgcacccacggcaaacgcgaccgctgctgcgccctcaagggtcggccactggctgcttacctggaccagaccttcccgggagagaacatttgggaatcctcccacaccaaggggcaccgcttcgcgccgtcgataatagcgctgccctgggggtactccttcgggcacttagccgagcgccctgccaccgacatggttcgctacctgcagcggggtgagctcttcctcgccggcaatcgcggccgcagctgctacgctgcgcctgatcaggtcgctgagctggctgtggccacgcacctggtcgaatcaggtgagcgcgtgctgctcggctcgctgagcgcgactggcgggctcgtcacacatgccgacggtcgccgttgggaagtcgagctaggacaacggcccgttgaggggatcatttcctcgtgcggggatctacccaaaaatgggaaaactatcgttgccgagggaataaaacaggtactttaaggggcatgaagcagctctttaccctcgatacgtccaaaatcggcaaaccagcaggaaatgaaagagaattcccggaccgagtcccggaagagctggcagcgggtactccggagcagcttaaaagcgctcttattgagctcctcggtgaagaacaagttcactcacgcgctttggacctcgtgcgttatgcctccgacgccggacactaccggctcattccgcaggtggtggtctccccacgcgatatcaaagacatgcagcagttgcttgcctactgccgcgatcacggtcgccacctcaccttccgctccggtggatcctcactcaatgggcaggcacagggcgacgacatcctggtggacgtgcgatcgaactttcgtggcatcgaggtcctcggcgaaaatgtgtatgtccgcccgggtgagaccctgactgcgctgaatgcggtgctggcacgctcggggcgtcgctttgctcccgacccagcttcggccgtcgtcgccacgatcggcggcatcctctccaataactccggcggtatgcgctgcacggtagatcaggattcgtaccactcgatccgcgaagcgaccatcgtgctgccgtcgggaacggtcgtcgatacgcgcgctgccaacgccgacgaagcactcgccaccgctgaaccagagctggtggcgggcctgatggacatccgcgcgcggttgcttgccgacgacgccctggtcgcccgactacgccgcaaattctccatccgcaacaccaacggcatccgcctcgatgcattcctggatgcagatacaccggtcggtattctcctcaagctgatggtgggggccgaaggcacgctgggattcatcgccgacgcagagctggccaccttgccactgccgacggcaaagaccgtgacctgggtgatgctgccgacgctggcctcggcggcggaatacgtgcccaagctcatggctgcgggagctgctgcctgcgaaatcttggtcagcccggtgctgcgcgaatcggtcggcaacttcaagggcgccgacccgcagtggcaggaactcgacgatgatgcctccgcgctgctgctcgaaatcgctggcctggatgaggcagatttgcaagccaagattgacgccgctcgcgctgtgcttgccgacgccccactaaccgagccactcgatttcatgcgcgaccaacgcgacatcgacctcgcctggcagatccgtggtggcctgtacccgctgttcggcaagcagcgtcgggaaggcaccgcgctgatcactgaggacgtgtgtttcccgcctgctgaggtaggcgaggccgccaaagacctcatggcgctactgcgcgagcatggctatccagagatggtcatggggcacgctgccttcggcaacctgcacttctttatgacccccgcctttgacgacgcagaagaagtcgcctcctacgaaaccttcatggatgccctggtagagctggttctcgaccgctacgacggctccctgaaagcagagcacggcacaggttttgccatggcgccatacctggaacgcgaatggggaaccacgctattcgggctgatgtgggaggttaaagaactactcgatccccacggcattctcgccccgaacgtcaagctcacccgcgaccaagacgtgcacatgaagaacttcaagtctttcccgcgcgtcgaagaagaagtcactcactgcgtggaatgcggcttctgcgaaccggtgtgcccgtcccgcaacgcgaccgtcaccccacgccagcgcatcgtgcttcgccgcgaaatggcacgccagccagtgggatctgcactgcttaaggcgctttacgacgactatggctacgatgccatcgacatgtgcgccgccgatggcacctgcgccatctcgtgcccgatctctattgataccggcgcattgatgaagaatttccgtgtggcgcagcaatcggacggggcgaaccagattgccctcaagctggccaagaattgggcagcggtggaaaaggccgcacgtggcggactctctgccgcaggagctgtggaaaaggtgctggggcctactttagggtctaccgtccttggcgcgctaactggcgtagtgcgctctgtcgtttccgacgatctcatgccttccgcgaaagacggcttgccgccagcagcgtcttcacttcctgcgacttctcgtgtcggcgccgctgcgatctacttcccagcctgcatcaaccgcatgtttgggcgctccggagatggcccgtcactgcctgaaaccctcgttgccgtctccgcgcgcgccggtaaaccgctgcacatcccaggagacgtcgctgggacctgttgcggcacgccgtttagctctaagggcttccgcgatgccaagcactatatgtcagtgaaactactcgaagacctgtgggtgtggtccgaatccggttccttgccgatcgtggtggatgccgcttcttgtacccacggcatgctcgaaaatgtgccaggtgagctcaccgctgagcaactgtcgcggtgggagaagatccacgtgatggatgcggttgaatgggctgctacgttgttgcctacgctcgcgaccagccacccagtcggccgcgtggcggtgcacccgaactgctcactgcagcacatggacctggtgggtcagttgatggaggtggcgtcctttgcctcggacgacgctttcatcccgctcggcgccacttgctgcggcactgccggcgaccgtggtttgctccacccagaactgttggaatctgccaccgaggatgagcgaaccggcttggcattggcgttggaagatgggcctatcgacgccttcgtctccgccaaccgcacctgtgaaatgggcatggaacaaaagaccggctacgactacgaacacgtcatctacctgctggaccaggcgacgcgttaggtttgggaaatctcagtaaaaaggtgttgcaacaccttcgctatcgcactatcatttaaaccagagttgaacctcagtaagcgccagcacgtttctggcgttgaatgctccgccggcgtaagccggcttttttaatacctaaggtggctttcgtggaacgcataaactatgcagtaggcattgatgtcggaactcactcagttggatttgctgccattgctttggatgacaatggcgcaccaaccgagatcttgaatctcgtttcacacatccatgattcgggtattgatcccgacagtaacaagaaggccgacacaagactcgcagtgtctggcatcgctcgacgaactcggagaatgttccgacgcaagaagaagcgactccaaaagcttgacaagtatcttgagggccttggttggcctgtgaaggcgttcgaagtgtattcggatccttttctaccgtggaaggtgcgcgcagagctcgcccaaggacgaatcgctgacgcttctgaaatgcaggagaaactctccattgctttgcgacacattgcacgtcaccgaggatggcgtaatccatactcgaaggtcgagtccttaatggcacgaacagagcctagcgcacagctgattgagattcggacaaatatcagcaaggcaattggttatccaatccctgaggatgcaactgtcgggcaaattgttgctgcaagtgcgctgggcaacgcaaggctccgaggtgagggtggtctgctttctgcaagactcatgcagtctgaccacgcaaatgagctgtggacgatcttcgacgcccagggagttgaccacgaaatcgctcgaaagctcgtttcccttgttttttctgccgagtcccccaagggctctgcttcaggacgtgtgggcaaagatcccctccaaccgcatttgccacgagcattgaaggcatcggatgcgtttcagcgataccgcatagctgccctgatcggcaatctccggattagggagggaagcgcaaaagcacccctttcgatcgaacaacgccgagttgtgttcgactacctggtcaaccttgctccgaagatggaaccggaatggatcaacgtagctgaaatcctcgggatcgatcggggcagcttgctcggtaccgccacgatcactgacgatggagagcgggctggtgcgcgtcctccagttcatgacacaaatcggagcattctctcatccaagctcaagccactgtcaagctggtggaagaccgcttccgatgaggatcacagagcaatgctaaaagctttgtcgaacagcgaatcttttgactttgacaccgagtcgggcagttccgtccaagcttttttcgagagtttggaagattccgatcatgagaagctagattcgctacgtctaccgcttgggcgcgcagcttactcagaatccaccctggaacgcctgactgatcgcatgctgaatgatggaatcgacctgtacgaagcacgcaaacttgagtttgatgttccaaacgactgggctccgcctgcacctgatatcgctgagcctgtaggaaatcccgcagtagaccgagtgctcaaagcggttgcgcgttggctcaatgccgcggaatccgagtggggtgctccttctgtaatcaatattgaaaacgtccgtagcggtttcctcagtgaagcgatgtctcgtcagctagatcgagaaatggagaaacgcggcaaaagaaatctagagatcgtttcggaaatgcaggcaaggcttggaatcgaggggcgcccacggagcgctgatctatggcgattccagtcaatccagcgtcaaaatggacagtgtgcatactgtggtcagccgattgatttcaaaacctgcgagatggaccacatcgttcctcgagcaggcatgggttccacaaatacgcgtgagaacttgttggccgtatgtaagagatgcaatcactctaaatccaacacgccgtttgtattgtgggcggagaaaagtgcaattcctggagttagtgttgctgaagcactggaacggctcaatcattggttagttgatccaggattgacgactcgggatttcgcgcagtttaagtcgcgagttgcgcaacgtctcaagcaacggacattcgacgaagagtttgatgctcgctccattgagccggttgcttggatggccaatgagctacgtgctcgagttcaacagaagtttggtggaagctcggcgaattctgcagatactactgtaaacgtgtacaaaggcagcctaactgcagaggctcgtagggcatctgggatctccggaaaccttcgtttcgcggatggcgtaggaaaatctcgtcttgaccgccgtcaccatgccattgatgcagcggtgattgcgatgatgagtcggacagttgctgaagtgttggcgttgcgagtcaacctaaaagaggcacagcgacacaggcgagaggcagagcagtggaaagaattcactggtacgagcactaaccaccagattcgctacaacaagtggcttagttcgatgaagcgcctgggagcaatgctccaagtttacctggaagaagataggattccagtcacgcacaacctgcgactgcgacttggcaacggtgctgtccatgaagacacggtaggcaagctcacgaagaagctagttggtgatgcgatgagtattgcggacatcgacaaagctgctagcgaagccttgtggtgcgcattgactcgatgcccagactttgacaagaaggacggacttccagccaacccagaacgaacaattcgggttgggaaccggtacttgaacgccgacgatgaaatcgaattcttcccggtttctgccggagcgattgcagttcgaggcggatacgttgaactcggaagatcaatgcaccatgcacgtgtctaccgagttccttcagggaagaaaactgcttttgcaatgatgcgtgtctacaccgcagatttggcaagattccgtaatgacgatttgttctccgtggaaattccactacaaacaatgagtgtgcgccaatcggagcctaagctgcgtaaggccttggaagatgggactgcagagtacctaggatggttggtcgttgatgatgaaattcaagtggatatggcgaccttcaatactggacagattggagcagctcaggaacagctcggagagatcacgagctggaacttggatggattctttagcaattcccgacttcgcctgcgaccacgtctttttagtgcagaagggctgaaagatgatgccgttagcgatgtcaggaaagttctcgatactactggttggcttcccgcaatcaacaaagtcttcggtgacggaaaagcggtagtcatcagacgcgattcgcttggccgcgttcgtttggaatccgctgcgcaccttccagtgagttggaaagcctaggcagatgaatcccggctggcaagtcatcgatctttcagggttcgaaggatcaatccgatatgtgcgcggtcatatcaaattggttaaggaatctgaagtgattagtgacttgccattggcacagttggccgtagttctggtcggtattcagacaagtgttagtggggcagtactggccaaactggccgaatatgatgtcgtattgctcgtatgtgattggagaggtataccgatagcgggaacgatgccttgggccgaacacacgagagtcggagcaaggcaccgagcacaggcaggtttaagcctgcctcgaaagaaatcagcttggcagcagaccgttcgagcaaagattttggggcaggcgaatactcttgaaagacttcattgcgaaaactctcaggagttgaatcgaatagccaatgaagtgagatccggcgataccaccaatcgagaagccgtcgctgcaaagctttattgggcatctatcaacttagaggaaggatttcggcgagaaccaggtgctggtgatcaagggctcaattcttgcttggattatgcctacaccgttcttcgaggacatgcggttcgtgcggtaatttcgggtggtctgagcggtccacttggaatttttcaccgaggtcgatcgaacccttttgctctagcagatgacctgatcgagcctttccgacctgcagtggatcatttcgtactttcaaatgtacggcagttcgacccggcagtgagggaaacgaaagctctactagtcgatgcggtaaatcaacagtttaagaaaacgggagagtcaatcccaacaagtttgatcgagctagcacaggaattcgggctatacgtcgaaggaaatcggcagagatttgaagtaactcactggagtatctaatgggtaagcgaacggatgaggatcagccaatgtggtgtcttgtgatgtttgatttgccagtaaagacgaatccccagcggaaagcggcaacagtatttcggaatgcattgctagatcaaggattttcaatggcgcagtttagtgtctatgtgcaatatcttcccatggcgtcaagactctcaagtgtcgttaagaccgtgaaatcttgcttgcctgaaggcggagacattcgcattgttactttgacagacaatcaatgggcgaaagcgattcgattttctaatgcggcaccgaccgagcaggaggaaatgcctgcacagttgatgattttctagcgtgagaaagtagagaaatgccagcttgcatgcccgttttggggcatgctgaagtctatcaggggttttgagagttgaaccccagcggctcgtaggtttcgtgcttgtcggtcggaagtctatcaggggttttgagagttgaaccccagcctttcgacaagatgaagtcatccgttgtgaagtctatcaggggttttgagagttgaaccccagcaacttccgttcacggatcgccccgctcagaagtctatcaggggttttgagagttgaaccccagcttacgcgatgccttatcgcgccaactaggaagtctatcaggggttttgagagttgaaccccagcgtcgcggtcatgcgtacgggctcgagttgaagtctatcaggggttttgagagttgaaccccagctgatcaactcggggtgtctggacttgttggaagtctatcaggggttttgagagttgaaccccagctgaaagacgacgcccgcatcaccacctggaagtctatcaggggttttgagagttgaaccccagcgtcacggatgatttcattcgggatcggagaagtctatcaggggttttgagagttgaaccccagctgagttgtggtggcctggtgacccgcaagaagtctatcaggggttttgagagttgaaccccagcataaggccgagtgggtagttaatgctgtgaagtctatcaggggttttgagagttgaaccccagcgtcagcaactgatcgcggattatgtggtgaagtctatcaggggttttgagagttgaaccccagcaagccagctcatgggtacgcgtgccatcgaagtctatcaggggttttgagagttgaaccccagctctcgctcgtcggtgacaggtcggacaagaagtctatcaggggttttgagagttgaaccccagctagtactccatctcggtaggcttttcgcgaagtctatcaggggttttgagagttgaaccccagccatggaacatagggggcatatggcagcagaagtctatcaggggttttgagagttgaaccccagcagagcgccaacaacgcatccaagacacagaagtctatcaggggttttgagagttgaaccccagctaaattcgcgtggccataaggtgcccccgaagtctatcaggggttttgagagttgaaccccagccaagcaatgggagcgccacaacaagaccgaagtctatcaggggttttgagagttgaaccccagcccttgacggtgctgacccttatgttcctgaagtctatcaggggttttgagagttgaaccccagcctggactgacaactattccaacccgtccagaagtctatcaggggttttgagagttgaaccccagcagcccggttatgcctgtcactctcccacgaagtctatcaggggttttgagagttgaaccccagcatttattttccactgtcctttcgggtgcgaagtctatcaggggttttgagagttgaaccccagctccgacgcgcgtactaagcggaacaagagaagtctatcaggggttttgagagttgaaccccagcttggcagcgagtgacccccagacgtattgaagtctatcaggggttttgagagttgaaccccagccccacacgccacaaccgccccgtcgacagaagtctatcaggggttttgagagttgaaccccagccctgtggccgtggggtgtgggtgcagcagaagtctatcaggggttttgagagttgaaccccagcatcttcagcgggtcgatgttgcggtactgaagtctatcaggggttttgagagttgaaccccagcttctccgagaggttgaccggttccatgagaagtctatcaggggttttgagagttgaaccccagctcatggtgggttccttccctggttcctggaagtctatcaggggttttgagagttgaaccccagccagcgtgaactagtccgtttagggttcggaagtctatcaggggttttgagagttgaaccccagctcgcagcgtcaacgagcaggccgaagaggaagtctatcaggggttttgagagttgaaccccagctggtcagccaagtcaaagccccaccccgcgaagtctatcaggggttttgagagttgaaccccagctctgcctttgtgtcgttgtcgaagcctggaagtctatcaggggttttgagagttgaaccccagccgctcacgacgcttcatgcctcggcgtggaagtctatcaggggttttgagagttgaaccccagcaacaggtcgcggggattgaatacgtcgggaagtctatcaggggttttgagagttgaaccccagctgagcgtgatgatggttttgcccatgccgaagtctatcaggggttttgagagttgaaccccagctttccgcgtcgtcacgcccggcttccgcgaagtctatcaggggttttgagagttgaaccccagcgtgggcatggtgaccgcacgatttcggagaagtctatcaggggttttgagagttgaaccccagcttcgaagtcgatgatgtattccccgacggaagtctatcagggggtttgagagttgaaccccagctggaaatcaagccgagtggtgggcgggagaagtctatcaggggttttgagagttgaaccccagctaacaaacgcttgcaggaacagcgcgccgaagtctatcaggggttttgagagttgaaccccagcaacacgttaaccgcctctggcctgcgtcgaagtctatcaggggttttgagagttgaaccccagcatattgtcggcaagcaacgcgggaacgagaagtctatcagtggttttgagagttgaaccccagcatgaaggtcttctgtagtgcatcgatctgaagtctatcaggggttttgagagttgaaccccagcgccgaggaggaatggcgctggcttcaaagaagtctatcaggggttttgagagttgaaccccagcggtacgtcgcagaccctttgccggagcagaagtctatcaggggttttgagagttgaaccccaggctggaccaggtgacgcgttaattgctcagcggtgccaggtggcgagtttgtccatcagcacccgctccgagtcttgtttggctgcgcggttgccttccacagtcccgccgaacatcttctcccagcttcgtccgaattcggtgatgtcctcggagaacatgtggccagcgtcggggtagacgtgagcttctagtcgtgggttacgctcggcgagcccacgcgctgccacctcgccctgccacatggcgtcctgatcgcctgcgaagaccagcccgttgccttggaagttctcaatcgggatgcgggcctcggcagtgttgtcggcgcgtgcggggatggtggagtatgtttcgcggtaacggatcggcaagcccagcatcatatccaggaacatcttcatcgatgctcctggctctgagttcctaaaagacaggtatgggatcggctgcccgtccttggcgaacgaggacatctcctttttgccataggcgaggccctggtaggtgtactccgtcggggtgtacagcacgatgtgatcgatcttggcgccccgtgccgccagattcgccaccagctcggcacctttggacgtgccgatcacagtgaccggaccttctgggatgagggcagtgacctcgtcaaagaactccagtggaacctcggcaagggattctttctgattcggctgaccgaagaagaacagggcgtagacttcgtagccttcctcccacagttgcttcgcccggccgtaatcaggggagccttcggagcctccgaaagtaaccacaacgcctttgtgtcgcttgtctgtaggggtgaagtggaaaccgttcagatactcgccctgaactggttggatctggtcggatgtttgatattcgccgaggggtggcacagcgtatttgtgccggttgtaggcattaacaccaaacagaatcgctaccagcaaaatcaggattcccagcagcgctccgagtaccttcagaaacttcttcatcgtgatcactcctccccttcatactactcgcaaaagtgcaggtcatccccactcaaaccgaaactccgggaacggcaaattgatggtctccaggtggtagaacgcgttcttgccgtgcttggagtagtggtactcccgcgctcgcagggtggtcaccgagatcaaattcccaaagtccggcaggaaacttgcagcgtgcagtcgcaagaacggcgtgaggtcgaggatccaggcgtcgctaagctcctgcaattgcgcggggtacgcatcgaacgtggccacgtggctcatcttggtgcgctgctcgtcgccgtacaccaccggcgaatcggagagcagctgcactttgatggcgttgccaaggtcgccgccgtttagcgcccaatagcgcttatcgacggccacatgcacgctatcctctggcgacaacgtcacctgtgtcatccgcccatacaggtgggaagagtagaggtccgtggcctgcccgttcacgatgagcttgatcgcgccgggccggaacatctcctgcaggacgtcgtcacgctggatgagggcggggagagaattggctgggtcgaggagctcggggttgaagttcatcaggcgggggacggtgaggtcgtcgtagatgtgtggctgattttgccggatgaaggcatccacttggcggcggctgaattcaggtttcggcgggaagcggtcgggctgcgctttatagagttccttctggagcgcgcacgtgtaggacttgttgccacgggtgttgttgcgctcgatggggcagccggcgtaacacaggtagaaccaggggcattcgcggcattccttggagagtggttcgttggctgcctcgtacttctggatggttttttctccggaagcgaccagctccggcatgcccagctggatgatgttcccgaatttcagatctggctcggcctgaccgcggtggcacgggtacacatcgccgtctttttgagcgaggaaattgttggtgccacagttgatctgattggtgcagtagtcatgggtaaattccttgaaccactcgtagtagatggcgcgctcgaatttggtgcccgtgaagtgctctcgcagcctgttaaggaattcaaccatctcttcctgcgtgagctgtgacttgtagttcgcattagcactgtcataggcgaacatgatgtagaaatcggtgcacatgtcaaagccctgggcgtcgagccattcgatgttctcgatgaattcgtcaatgcgcagtagatgtggcttgccgacgacgcaactaatgcctttcgggtacgggtagtccttgagcaacagaacattgtccagtgtcctttgcaaagtggacttgccctgtttagtggtccgcagttcctcatgcagcgaaaaagggaggtcaaagctaccggaaatggagacctgaaactcttcgtacagtgggcgaaggacgtggaagttgtacaggttcgtcttgatgtggatcgggctgttggtgcgcttgccgagggccttgaactcggacttataccgagcgcggtagtccgtataagcctggaagagctcccggaggaccggctgggggagaagggagatttcggcgccgtggaggaggagcgcgtcgatgagaatgccctggtgctctagatgccgggcgatagcgtgaaactgggagaccacgtcgtcgtaggtatctcggttctcggtgagatcgccgaggtagcagtagctacatcccaagttgcaatactggttcgggacgaaggtcagcttgatcgcttggtgaaataactgcaggtcagccattattgttgttgttattattgttattattattgttgttcgagccgccgtagaaaccgccgccgccaccactgccgtcgccagtccaaccgcgggtgcgcagctcattgccgacgatgtcggtccagccgtcgttgaatccgatggtttcctggaaaacggtgccctgcgctagcgcctgatctagcctgttctgggcgagccaactctcgaaactgttcatcgtttttcctcccttatacttggcaccctaacccacctttggagctttgggaatacggacggcaaccttttcaagggcttccggtaggtacttaacttccaggtaacgcgcctggtgaaggacatccttttggtatgcatctactagcaccgttgcagtggaagggaactggtgcccgtccggggtgaacacgctgagatctaagtgcaaacgttcctttccagggaaaacgaggccgtcactcatttcttgggctatcactgcgcgacccggcagaccgtaatagcccgcattgagagtcaattggtccactctgccggtgcggaggcagtagaagtcataaaacagctgagcgcgttctttcaatgggccatggggaacgtacagctgcttaggctttttggctcggtagaccactggcaggatctgcccctggtgtagcgccgggagccgcctcttgccaactggaacactgagaatgccatcaaacactgcgccgtcttctccctccacctgcatagcgatgcggtagttacgcaccccatttttcagtcctcggtgttcgtatgtttgtacttctcctacaccgaccttgccgtctttccaatacttggcgaggtttgtcgggtacaacgagccgaggaaagaaagagcaaaaatgagggcaaagaagctgataccaaaagctatgcccaaactgttctcggtaaagaatccccctgcgctggtgtcaaccgcaaagacataaaccgaccagcgaatgaaggctgcaaccaccatgagctgcagaaatgctattagaaaccggcgcatagtgaaaaactactggaagttatccaggtcggctactggggtggaattcggacggcaacttcgctggtgtcgtgcggtgcgtacttcgcttccaagtagcgcgcggtccgaatgagttcgtactgggcttccgtggcaagcactcgcgctgagctatgaaattgctggccgtctggagtgaacacctgcagatccaggatccactggatcatcgcgccttcccgataaccgctctggtggattccttgcacagtagctcggcagggcagtccacggtacttggcttccagcgcagtcgggctgataagaccgtcgcgctgtcggacgtattcatagaacagctgcgcccggccgatcaatggcccatggggcacgtggagccgctgtgggaatgcagcttggtagcagactggcattcggactcccggagcgaggtttcgcaggttgcggcgtccgacttgtgggttcatggtgccggtgaacacctggccatcctcgccctccaccagcatgctgatggcgtaggtacggatgtttccgtatcggccagtgtgcctaaaactttggaccgtacccacaccgactctgccgtcggtccatttttcggcctcattcttgcgccgtgacaggtacgcgattccaccgatgaaggcgactggaaaggccataaaactcaccagcagcagaccgccgaggaatgtggtgagcgcttccgtgtatccaaacagtgccaacaggattgcgacgaggaaagcggcggcgaccactgcagcaacccagccgagaaccttcttcatacctcgaccttaagataattcctatactggggcagcatgaaacccgagttccccatcgccgaggccttgcccgagcttgcttacccggctcgcggcgaggatacccccagccccgagctgctcattctcaacgaacctctcgcccgtgatctcggactcgatccttcctggctgcgctccgccgagggcgtgaaatacctcctcgggcaggcgggcgggttcgcgctcgcctacgccggccaccagttcggccagtacaacccgctgcttggcgacggccgtgccctccttctcggcaccttccagggctacgaggtccaagcaaaggggacgggtcgcaccccgttttcccgtggcggcgacggccgcgggccgctggacgcgatgctccgggagtacctgatctctgagtacatgcacgccgtcggcattccgacgacccgcgcgctggcggtgctcaccacgggccgaaaaatccagcgtcgcatggtcgtgccggccggggtagtggtgcgcgtggcgcgttcgcacctgcgggtcggaaccttcgaattggtgcgaaacaacggtacgcccgacatgcaggcccggttggaagaatatgcctggtcgctgttcccgggcggcgtcaacgcggtagcggagcggcagtgccgcacggtggcggaatggatgggcatcggcttcgttcacggcgtgatgaacaccgacaacacgtcgatttctggtgaaaccctcgactatggtccgtgcgcgttcctagatatgcacgatcccgctgcaagctttagctccatcgacacgcagagtcgctacacctatggccgccaacctgcgattttgcagtggaatctcgcgcaattgggctttagtggcgactttgtcagtctcttttccgatgccttgcaacaggtgtttgcccgcaagctaggaactccggatccggcgaagatcaacgagtggttcgcgtccctggcaggcaaggaccacaccctggcgcatgcttccttggaaggggagaacccgcaggtcatcccgcgtaacttcgtggttcagcgcgccctggacgcagcgaacgaaggtgatctgcggccattcgaagag

SEQ ID NO: 3981 - DNA, 23255 bp, synthetic construct
  source 1..23255: mol_type = other DNA
  misc_feature 1..23255: note = Synthetic
gtgcacctgatccgggcggccaacaggtgggtgtcctaccaagaccgcaaacccgtatcaagtgcgctacgggaggtctacaccgcaccgaccgaggacaccgcccgcgccgccctggacgcattcgaggccagtgaactgggccgtaaatacccgcaatcggtcaaagtctggcgcgacgcctgggaccggtttgtgccatttttgcagttcccgcctgcggcacggcgggtactctacaccacgaattcgatcgaatcgctgaatgctgagctgcggaaagccacccgcaaccgcggccagttcccgaacgataccgcggcgctgaaaacgctgtggctgatgatctgcaacatcgaggacaagcgcgctgcccagcgagcgaagaaagcgaagcgcgccatcgaatgcaacggctatattgaaggagcgaaagccaccgggtggaaacaagccatcaaccaactagccgtggcttaccccgaccgattcgcggactacttgtaaaccaagcccccgcacacaaacaatcggacactctcatgcttaatccatcgaactcaagcttgattctatgctcgttatagaagccaacatattcatgaattgctcgctctaactcatcacaatggggccacttatgaccatagaacatctcatttttcattctgccgaacaatccctcgcacgctgaattgtcgggtgaacatcccttcttcgacatcgaacgcgtaaaaccgatgtcctgtgatgcttgaatccaactgttgccccgataatggcaccctcgatcggaatgaattaccaattttgcggggtcaggcggtgcattattgtcaaacgcctgcttcagacaccctctgttgaggtggaaactgatttttggaagcagaacccgccataggaaattgatagaaatcaaggcaaatgcctaggagcaaaacctggggcatttcagatcccttggtcagtgtgcaccatcaacccttcaccatgtttatgccacgtgatcgcattctttaacgaggtgggggtggtgcatactgaagtgatgaacgcactcaaacgcgcatatggtcaagcgcctgcgaccgcggttctttgcgcgctgacgatacttatctatctgcttactgttgtggagtcccgctcgattgaacacaaccttagtgattcgtggattgcagatcactggactctttatggtccgtattctcatggcctagggtggctgcgcatggtggggacggtgtttctccacagcgggcccacacatctggcgttgaacatgtttatgctgttcttctttggtcgcgagattgagcattatttaggcagtggtcgttttactttggcttatattgtgagcgggattggggcctcggcaactgttctgctgatggatccgcttgcgcctacggtgggtgcttctggtgctgtgtatgggcttatggcgatttttgtggcgatgtcgtaccggttgcgtagggatctcacagcaccgttgattcttatcgcagtgaatgtgggctattccttgcttatggatggtgtttccctgtggggacatttgggtggcttgctgacgggttgtgtgctggggattgttttggtgtttgtgcagactactcgaggtggtaagcgggggtgagataaggggtttatctaggggtctctcgtgtttgcatgaggcgcctatttttttgagaaaatccttatcacacaaaccacataaataacatgaaacccaaaagttagctgcagtttcgtgggttgactgttggtggggagcaatgtggttatcggctgtcacaagaggcgacatgaggctactgggatggcccaacgccccagtttttggcggggaatagtgcacagctgttccgagttatccccagatttttgtaagtatccaccaaaatttcacaacttttggtctgtgagcacagcgctgatcgtgtgaaaaagattccacagcagttatccacaatgtggataattacatgtgtgttgttcacagggtgatgatcgaatagctgtgtgttcgaagtacgcgacctgctattttcccacaagatttcgaacaaatccgcaggtggggaagaagtgcacaactttatccacagggtgtggataaagcctggggataacttccatccgtgtaattccacaatttcttccacagcctgtggataacttttggtgatagatgttcacaagtggtggataacttgtgagtaaacctcacatctggtggttctggcctaaaagaggagcgctgtgtcgtgcacgctaggcataagagtgcgggtcaacgccggggacttgtttggcttgaggtgaccatttgtgcagatagatagctacttttgtgcaagaagtggctacggggtgataaaacccatccgccatgccggtaactgagaaaaattaagtttttgcgtggtggtggggagcgttctagataccgcgtgattgaggggctaggtggtggcgtaatacccctaggcgttttactaaaaccgcatgtcgcctcgcgctttaaaagtgttgctaccccatcggagtggggtgtggcggcacaatgttgggtgcgtgttctaggttagtgagtgtcccccgcgggcgcccgagcacgggctgagattgcgctgatgctgtgcaagcaccgtttgaacctgtctggttaacaccagcgaaggaagagaggagcgcgagcctagtgtcggcagcctcagctaattcagtaaccaatccatctgcttgggaaaactccgagatccatccgaagcactcgtattcgccgatcgtttccggtgaccttgaggtaccagaaacggagattcagcttgacgattctcctaccggccccaatgatccagttcggatctatcgcacccgtggccctgagtgtgatcccacggtgggattgaagccactgcgtgcacagtggattgacaatcgtgaggacacggaagaatatgctggtcgtgagcggaatttggctgatgatggccgctccgcgcagcgtcgtggcgcagcgtcgctggagtggaaaggcgtgaaacccacaccgcgacgcgccaagcagggcaagcgcgtgactcagatgcactatgcacgccagggcattattacgaaggaaatggagtttgtggcgctgcgcgagcacatggacccagagtttgtgcgcagcgagatcgcccgtggccgtgcgatcattccgaacaacattaaccacccagaatcggagcccatgattattggtcgaaagtttttgaccaagatcaacgccaatatcggtaactccgcagtgacctccagtattgaggaagaagtatccaagctgcggtgggctacccgctggggtgcagataccgtgatggatttgtccaccggcgatgatattcacaccacccgcgaatggattatccgcaactccccagtaccaatcggtacggtgccgatctatcaagcgttggaaaaggtcaatggtgtagcagaagaccttacgtgggagattttccgcgataccgtcattgagcagtgtgaacaaggtgtggactacatgaccattcacgccggtgtgctgctcgcctacattccgctgaccaccaaacgtgtgaccggaattgtgtcccgtggtggatccatcatggcgggttggtgtctagcacaccacaaggagtctttcctctacgagcattttgatgagctgtgtgagattttcgcacagtacgacgtcgctttctcgctgggtgatggtctgcgccctggttctgttgccgatgcgaatgatgcggcccagtttgcggagctgaaaaccattggtgagctggctcgtcgtgcgtgggaatacgatgtgcaggtcatgatcgaggggccaggtcacgttccgctgaacatggtgcaggaaaacaatgaactggagcaaaagtgggctcacgatgcgcctttctacactcttggcccattggtgactgatattgcgccaggttatgaccacatcacctcggcaattggagctgctcatattgctatgggtggtacggcgatgctgtgttatgtgaccccgaaggagcacttgggtctgcccaaccgcgatgacgtgaaaaccggtgtgattacttataaacttgcagctcacgcggccgatgtggctaaggggcaccctggtgctcgtgcgtgggatgatgcgatgagcaaggcgcgttttgagttccgttggcatgatcagttcgcgttgtcgcttgatccagataccgcgattgcttaccatgacgaaacgcttccggcggaaccggcaaagactgcgcacttttgttccatgtgtggtccgaagttttgctccatgcgcattagccaagatattcgtgacatgttcgcagataagatcgccgacttgggtatcccgcaggttggcggcgacgcagaagcaggcatggcggcaaagtctgaggagtttgtggcccaaggatcgcagctttatagcgaggtgcgtgacaatgctgcccacgtctaggcggggtcgagactttgatccgcggtgctactttgtcaccggtacgggctctgtggatcacattgtcgacgtaacacgccaggcagcgcgcgccggcgctgggatcatccaagtgcgcagcaaacccattgctgcccgtgacctgtacattcttggccgtgaggtagcccgcgcggtggcggaggttaatcctggcacccgtgtgcttatcgacgaccgcgtggatgttgcccttgcgttaatgaataacggcgagcacatccacggggtgcatgttggccaagatgaccttccggtgcgccatgttcgcgccttgttgggtgataacgccatcatcggcctcaccacgggcaccctggagctagttcgtgcatcgcgccaggttgccgaggtgatcgactacatcggtgccggtccatttcgccccaccccaacaaaagattctgggcgggcacctgtaggtcttgcggggtacccgccactggttgctgaatcattggtgccggttgttgccattggggatgtccgccccgaagatgcggctgatcttgctgcaacgggggttgctggtgtggcaattgtgcgcgcattaatgaactcacaggacgtagcagccgatgtgaaactcgtattgaaaggttttgcacaatgaaaatagctgttgtaggtggtggaatcgtagggctaagcaccgcctttgaacttagtacccgcgggcatagcgttcacgtatttgacgccaacccagcaagcggtgcctcacgctttgccggcggaatgcttgcccccgcagccgaagtgcagttccaacaagacccgttgtttccgttgatgaagcgcgctggggagctgtggccagacatggtgcgtcgggtagcgcagcacaccaacctgcctacgggttatcgcaccgacggcaccctcgttgtggcagccgatcgcgccgacgcggaacacctcaaacaattgtgcgcagcccaagaatcggccggaatggacgttcgacccatcgccacccgacaggcccgcggcctcgaaccagcattagggcctcggctatcggcggctgtacacatccccaatgacaaccaagttgcaccacgagtattccttaccgcactactcgacgcactcgatgactgtggggtagaggtaggaaaagaggaaatcaccgaccttgaacccctgtatcaacaattcgatgttgttgtcctcgcagcaggcctcggcgcacaaaacctaagccccatccccctagcactacgccccgtgcgcggcgacatcctacgagtacaaacagaaccaggggcagtcaacatggttgtacgcggttgggtcaacgatcgccccatctacatcattccgcgcgcaggcggtgaaattgccatcggtgccaccagtcgtgaagacgaacgtgacttacctagtgtggaaggaatatacgacctgctccgcgatgccgtacgcgtagtccctggtatcgttgatagctcccttctggaagctaacgttggtgtacgcccaggcacacccgacgacctcccatacctcgggtgggcatcagaccgactcattatctccaccggatacttccgccacggcatcttgctctcagcactcggcgcccacgtcaccgcatgcctcatcgacggcaccgaccccggcatcgacctcacagcatgtgcgccagatagacaccgcaacgaaagaggaacaacccatgaacatctacattaacgacacccccaccaccatagaatcaccccagctcaccaatattattagcaaccactgcaacggaatccgcccagggatcgccgtagccatcaaccaacgcgtgataccccgctcacaatgggacaccaccacagtcaccgcaggcgaccacctcgacattctcaccgcagtgcagggaggataacatgctcaccatcgcagaccgcagcttccaatcccacctcatcatgggaaccggcggcgcaagctcctttgacaccctagaaaaatccctcatcgcctccggaaccgaactcaccaccgtagcgatgcgtcgacacgccgcccacaccggagcacacggcgaatccgtcttcgaactcatgcaacgcctcaacatcaccccactacccaacaccgcaggctgccgcaccgcccgcgacgccatcctcaccgcacaactcgcccgcgaagcactcaacacctcctggatcaaagtagaagtcatcgccgacgacaccaccttgctccccgacgtcctcgaacttatcgacgccaccgaaaccctcaccaatgacggattcaccgtcctcgcctacacttccgacgaccccgtagtcacacaacgactcgaagacgccggcgccgccgcagtcatgcccctaggatcacccatcggaaccggactcggcatcctcaacccccacaacatcgaactcatctgctcacgcgccacagtccccatactcctcgacgccggcatcggaaccgcctccgacgccaccctcgccatggaactcggctgctcaggcgtactcctcgccagcgccatcaaccgatgcatcaaccccatcaccatggccaccgccatgaaacacgccgtcgaagcaggacgactcgcgcgcgaagccgggcgcataccgcgccgggagcatgcggtggcgtcgtcaagctttgaggggctcgcctcctggacggacgaggtgctgtgatgctcgatgagctggaacgccaacgcgtagcccgccaactgcggatacctggttttggtcttgaacagcaagaaaagctcaacaatgggcgagtgctggttatcggtgctgggggactcggtagtcccgcgttgcagtcccttgcggcggctggggtggggtcgatccgactcgtggataacgacaccgtggatgtgtctaacattcaacgccagatcctgtttggtgttggggatgtagggcgctccaaagttcacgtcgccgccgaaagattgcgtgcaattcaacccaggattcgcgtcgacgcctataccgaacgcctcaccgcacacaacgcacacgaactcgccgaaggctgcgatgtgatcctcgacggctctgacacctttgccacaaaattcctctgcggcgacctcgccgaaataacaggcataccgctcgtctggggcagcgtactgcaattcgaagggcacatgggcgtattcacccgcgaggtagggctacgggatctgttccccgaagcccccgcccaaggcctcaactgtgctgacgcaggtgtactcggcgctaccaccgccgtgatcgccaacctcatggccaccgaaaccatcaaaatcctagccggaatcggaaccgtccaaccaggagccgtcgccacctacaatgcgttgaccagcacatttcgcacatacactgtggggcgtgaccccatgaggtccgcagcccgcacactcaacgcgtggacgctacccagcgaatacgaacttatcgacgtccgcgaaccccacgaaatagaacacacccccagcggcgcgcacatcaccttgccacaatccatgtggaatgacaccacggcgatccagcatgcgctcgatcacatcaccacagacaatgtggttgtcgtctgtgcctctggcataagaagcgccgcatttatcgaacaattcgcgcacctcaacccacacctcaccttccacaacgtccccagcggaatcaacgaactaccatgaccccacacatactcaccatcgcaggatccgacccctccggcggggctggcatccaagcagacctcaaatccatcatggcagccgacggctacggcatggcagcaatcaccgccctgaccgcgcaaaacacctgcggagttaccgcaatacacaccccgcccacggagttcctcagccaacaacttcgcaccatatccgacgacatcaccatccacgccatcaaaatcgggatgatcggatccgcagaggccgccaccgccatcgccacatggcttggacagctacaccacacacccatcgtggttctcgaccccgtcatggtagccacctccggatcggtacttggcgaacgtcattattttgaacccctgcttcgccacgccaccgtgatcacccccaacctgccagaactcgcagtcctagcaaacaaccacgaccctgaacaagccgaacatgccgcacgcagcctcgcagaacaatacgactgcgcagtgctgctcaaaggtgggcaccgacacggaaccgacgaccttggcaacacctggattactgccagtggcccccaattccacgcacccagcccccgcatccacaccaccaacacccacggcaccggctgctcgctctcctcagcactcgccacccggcttgccatcgaacccccagaacccgccctccactgggctaccgattggctcaacggggcaatcgcccacggtagtgacctcaacgtaggccacggcaacgggcctatcgaccacagctaccggctaagggaatactcagctaactgcaacacacaccccaagaattcccgcaaggccactttcaacatggcaccccaactctaaaaatggatcaaccacgttcggacaatggggctcttccggttttagagtgcattgattagttcgccggggattcgggcgtggcataagatattagggtccttggctttgtaggaataagggtgcctaaaccatccacccacaaccaaggacctaccgtgcagcctaacggaaatatcatcgtcatcgaagccgagcccatcgagtccatcaatgaatgccccacgtgcgggcagccaggcaagaccatgaacaagtgctgcaaggacatcttcgcctacttcgaccactacatcttgtggtgcctgatccacgccgccaacatccgacacacaatcaatgcaccctaaaaccggaagagccactaaacgggggtatttcgaagcatttttctcaggacttcacaccaaatcgcttccaaaccggccgtttggccagatttggtgtgaagtgccgtcttttcgggggtgatcggggggggtgcgcccaccaacgctcaccaacgccggaacctccggcgaactaatcaatgcactctaaaaccggaagagccgacaatggttgctcgttaatatccgcaacgtgcgaccaccaccgagatcccgcgcatgcaactgctcggaatcaacaccaggtagggaaggaatagtcgagataatggagctcatatgaggtgcaattgtgcgcgtagaaatactcttggcggagctactggggataacagcgttgtaattaatagggtgagttaaggggggtgaaaatagaaaatctgttgcctaacttttgataagtcactaacttaattaaatagaactgaacctcagtaagcattggctcgtttccaatgttgattgctccgccggtgctccttatttttaagggcgccggctttcttaatagaaaggcgtaaaggtgaaataccacgtaggtatagacgtcggtacattttccgtggggctagctgccatcgaagtagatgacgctggaatgcctattaagacgttaagcttggtatcgcatattcacgattcgggattagatcctgacaagatgaaatctgcggtgacgcgattagcatcatcaggtattgcgcgtagaacacggcgcctctaccgacgtaagcgtcgtcgtttacagcagctggataagtttattcagcgccaaggttggccagtaattgaattggaagattattctgatccgctttatccatggaaggttcgtgcagaactcgcggctagctatatagctgatgagaaagagcggggagaaaaactgtcggtagcgttgcggcatattgcgcgtcaccgaggttggcggaatccctatgcaaaagtttcttcgttatatcttcccgatgagcctagtgatgcttttaaatcaatccgagaagaaataaaaagagcatccggccaaccggtgccagaaaccgcaacagtaggccagatggttactctatgcgaactgggtactttaaaacttcgtggtgaaggtggcgtgctatcagcacgactgcagcagtctgatcacgctcgagagatccaagaaatctgccggatgcaagaaattggacaggaactatatcgcaagattatcgacgtagtttttgctgctgagtcacctaaaggttctgcttctagccgagtaggaaaagatcctctgcaacctggtaaaaatcgcgcacttaaagcttctgattcctttcagcgataccgaattgcagcattgatcagcaatctaagggtgcgggttgacggtgaaaaacgaatcttatcggtggaagagaaaaaccttgtgttcgatcacttggtcaatctggcaccaaagaaggaaccagaatgggtgacgattgctgagattctgggaattgatcgtgggcaattaatcggtaccgcaacgatgaccgatgacggagaacgcgcaggggcacgtccgcctacgcacgacacgaatcgcagcattgtgaacagcagaatcgcaccacttgtagattggtggaaaactgcatctgccctagaacaacatgcaatggtaaaagcactcagcaatgctgaggtagatgactttgattccccagaaggagcaaaggtccaagcctttttcgcagaccttgacgatgatgttcacgccaaactagattcgcttcatttgcctgtcggtagagctgcttacagcgaagatacgcttgtgcggcttactcgacgtatgttggctgacggtgtggatctctatactgcaagactgcaagaatttggtattgaaccatcttggacgcctccggcgcctcggattggggaacctgtaggaaatcctgctgtcgaccgtgtactcaaaactgtttctcgttggctagaatccgcaacaaagacatggggtgctccagagcgtgtgattattgagcatgtccgagatggctttgttactgagaaacgggcccgcgaaatggacggtgacatgcggcgacgtgctgcacgaaacgcaaagcttttccaagaaatgcaggaaaaacttaacgttcagggaaaacctagtagggctgacttgtggcgttatcagtctgttcagcgccagaattgtcaatgcgcttattgtggttcgcctattacgttctcaaactcggaaatggatcatatcgttccacgagcagggcaaggatcaacaaacacgcgtgagaatctagtggccgtttgccatagatgtaatcaatccaaaggaaatactccttttgcaatatgggcaaaaaacacttctattgagggtgtaagcgttaaggaagctgtagaacgcacacggcattgggtcaccgatacggggatgcgcagcactgactttaagaaatttaccaaggcagtggtggaacgcttccagcgtgccactatggatgaagaaatcgatgctcggtccatggaatctgtcgcatggatggccaacgagctacgttctcgagttgcgcaacattttgcttctcacggaaccacagtcagagtttatcgaggatctttgaccgcagaagcgcgaagagcttcaggtatttcaggaaaacttgaattccttgacggagtcggaaaatcacgtttggatcgccgacatcatgcaatcgatgctgcggtgattgcatttaccagtgattatgtggcggaaactcttgctgtgcgatcaaatctcaaacagtctcaagcacacagacaggaggcaccacaatggcgtgaatttactgggaaagacgctgaacatagagctgcatggcgagtgtggtgccagaaaatggagaagctatcagctctgctaacagaagatctacgcgatgatcgcgtcgttgtgatgtctaatgtgaggcttcggctaggaaatggctctgcacatgaagaaacaatcggaaagctctctaaagtaaagctaggtagccaattatctgtgtccgatattgataaggcatccagtgaagccctttggtgtgctttgacacgtgaaccagattttgatcccaaagatgggcttccagcaaacccagagcgccatatacgggtaaacggaacacatgtgtatgcaggagataacattggattattccctgtttcggcaggctctatagctctgcgaggaggctatgcagaattgggaagcagcttccaccatgccagggtatataaaatcacttcaggtaaaaagccagcatttgcaatgcttagggtctataccattgatttattgccatatcgcaatcaagacctgttctcggttgaactaaaacctcagaccatgtcgatgcgacaggcagaaaagaaacttcgagatgcacttgctaccggtaacgccgaatatctcggttggctagtcgtagatgatgaacttgttgttgatacctcgaagatcgcaacagaccaagtaaaagctgtagaagctgagctcggaactattcgtagatggcgggtagatgggttctttggtccttctcaacttaggttgcgtcctcttcaaatgagtaaagaagggatcaaaaaagagtcggctcctgagctatcaaagattattgatagacctgggtggcggccggctgtgaataagctgttctctgacggaaacgtcattgtagtgcggcgtgattcgttagggcgtgttcgccttgaaagcactgtgcacctccccgtgacttggaaggtgcagtagacaatgaatcctggatggcgagttgtggatctgatcgattttgatggcaaagtctcatatcagcgtggacagctcgccatcacatcagattctggtgaattacgtgcaacgttgccgttggcacagatcgctgttgtgcttatcggcaataagataatcattagcggtgcagttttggtcaaactttctgagtatgacattgctgtgttggtatgcgattggcgcagggttcctgtcgcagggtctttttcatggaacgaacatacgcgtattgcggcacggcaacgggctcaagcgagtttatcgcttccgcgacaaaaatccgcttgggctcaaatcatcaaggcgaaaatattaggccaagcacggactgttgcccagttaggttttgaggctaccgatttaaagaacttggctagggcggtccgttctggggacgtggataaccgtgaagctatggctgctaagagatactggaaaattatctcaactgaagatgatttccgaagattacctgggcttgctgctacggggtggaacggggctttggattatgcgtatacagtcttgcgtggacatggtatgcgtgcgatttgttctgctggtctagtggggacgttgggcgtttttcatcatggccgaggtaatcagtttgctctggtggatgatctaattgagcctttccgtccggctattgattacgcggttttttcaattgtgtctaattcacaagagctagataaggaaactaaacgccagcttgtggctgctgtggaagagcctttcaattctgcggggcagtcaattccgacggtttttaccgcgttcgctcaacagtatgggcggtatgtggaaggtgatgttgagaaattagtaccgcctatttgggaaggccccttcgatgccgaagaaaggtagcgatccggtgtggtgtgtggtgatgtttgatctgccggtgaagacgaagactcagcgaaagcaagcaacggcgtttcgtcagaatcttttagatcttggattctgtatggcacagctgagtgtatatgtgcagtacctgcctctggctgcaaagttatctaatttggtgaaattaattaaagaaaaattacccccaggtggggatgttcgaatcctttcggtatcggacatccaatggtcgaagatgatccgtttttcttcttctgcagaggtttctggcgaagaaaagcctgatcaactcgcgattttttagacttcaggtagcccaaaaaatcctgtttaacatggttttttgggctacctgaagtctatcagggtttttgagaactgaaccccagcgaatcgctgacaacgccaatggtgtggggaagtctatcagggtttttgagaactgaaccccagcgcgtctgcgatacgctgagcaattgcacgaagtctatcagggtttttgagaactgaaccccagccctgtagtaggcggccggcgggccattggaagtctatcgggtctgctgagggtttggttgacagttttccttctgatttttaggccgcaagggatgcggctggttccatgattgtttcgtattcgattggtgtcaatttacccagtgctcgttgccgtcttttcctgtgatatgtccgttcaatccagtgagtgatcgcggcagatagttcacggcgcctgttccaaaagccacgatcaagaacgttcttttgtacaagagcgaagaaagattccatcgcagcgttatccccacacgctccaactctgcccatagatcccttcgcgccgtaagatttcagcgcggcacggaattttctagaacgaaattgcgagccacgatcagagtgaatgattacgccatggggattgcctcgtttcctcatcgcatcatcgagcgccgccaccacgaggcgtgatttcatccgcccaccggtcgcatagcccacgattcttcgcgagcacaggtctttgatcgcacacagatacagcttgccctctttggtccaatgctccgtaatatctgtaacccacgcaacgttgagcgcatcagcgtggaagtgacgctgtaacaggtcatcatgtactggagcacccgacttcttcccacgcgacttacgcctagcgatcaccgagaacacctgagcatgagaacacaaacgccatactcgacgctcagaaatctctatcccttgatcatggagctcgtctgctatcaggcggtaaccaaattcaggatcgtcactgtgaatctagcgaatcttgtctataagttctacttcttgggcttgcctgtccgaaactggcttagcagcccatttataaaacgcttggcgggaaaaccccagtacccgagccgctaccgtcaaggtcgccttacctgccttgatcagcttttccacggtcgggaagacccttttgggcgaatcacctcttgagacaggtacgccgccgctgcacgtagcacttcgttttccatctccaactcgcgaatccgtttcaaagcctggcgcatctctttagccactaccggatcagcacacggttgcatcccctgagcctgcaacctcgcatcagtaatctatttttgcaacgaggaacgcgagatccctaaatcagcacacacctgacggcgagcaaccccagactccaccaacgccacggcatcagctttgaactgctctgaatacaacttcgacataatcaatatccttccctgccctgccccagcgaaacaagctagacgtcaaccaaaccctcagcagaccccgccgtccccgtgcttgaggccaatggggattaggcatagggcttgtttgttccgctgtgatgttatggacaacctacgtgtggaagacaagaggtgtgtttacgtagtgcacaagaaaaacgactgacgatgcctctaactagggtgatgtcagtcgtttcgttattgagactaggaagcgcctaacgccatcccatggtcataagcaggccgatgatgaagagtccgaagccgatgccatagttccatggtccgagttcggtcatgaaggagatgtcttggcctgctaggtagttaacgatcagccagagtagtccggcgaggatgaggccgaacatgatgattttgtaccacagcggggtgccagtggagttgattttcactggggtgcggtttgcagtggaaccagcggtgtaagtggtggagctgtggttgatctttgactttggcatcgtggggtgtccttgttggtttgtaagtttctaagagtttatcaatctatcaggttagcgccagctgccgcacgagcagcactggtaccactggcagcaccagcagtggttaactgctagtgctgtgctggtggcacgagtgccgcaaggttgaattcgtagaggcggatttcaatgggtgcatctttgcgcagtgctgttcctggggttggtagttgtgaggcgatcaggttttggtcggtcacagctacggtgggcaccttcgctgcttggatgagccgggaggcgttgccgttccagcctgcgtcgtgcaggatgcgaactgcgtcgccaattgttttgtgggtgatgtctggaacagtgaacattgctccgttggagatctgcacggtgactctagaacccttgggtacttcggcgccttcgtctggtacggcgaccacggttccggctggttcgacggaatcaacgcggacgacttcgggtttgaaacctagggaggtcaggttaccttcggcttggtcccatttcatgccggtgatcacgggaacgcggactgtttctacaccggtggagacagtaatggataccttggatccacgggatacttgggatccggctgcgggggagacttcgatgatttcgcccttggggacggtgtcggaggagtcttcacgcacggtggggtcgagaagcagacctgcggcttcgaggatcttaaccgcgtcggcggtgttcttaccgctgaggtcgggaacctcagtgatctctttaccggaggagatggtaagacgcacagtggagttgcgctgcacgttggaaccgtcggtggggttggtgcgaataaccttgccgcgaggaatatcggggttgggttcttcgatcacattgacctgtaatcctagcttttccagttggctcacagcattttgctgcgtggagttttgcagcttagggatggtcacggtggatcgctgagaaaatggcccgccaccgaaatggtcaatggcaaatccggcacctacggccaaaacgagcactgccaaaatagcggcgagaatccgcaggccacggttggatgatcgtggtgcagcatgcgcaccaccggcaccggccaccgcagccgaaccagctacggcaccagcagggaccgcaccagcaccaatgccagcaccagcctcggcgtaatccaactcagtcgtcacctgggttactggaaccacggtggtagacgctgggtcttgggtagcaaagctggttggggtgacatagtggcgtgccgcgtcggtgaccgcattgcgctcaaggcgctcaagatccgcacacatttcttgtgcggtctggtaacgatccccagggtgcttagccatagcagtaagcacaacagcatcgacgttaattgccgcggtaggcgagagatcagcgatgtattcgctgggctttacagggtcttcttgtacgtgttggtatgcaacagcgaagggggtttcaccctcgaaaggtggtttaccagtgagggtttcataaagcacacagcctagggcgtagacatcggagcgggcgtcggcaagctttccgcgtgcctgctctggtgagaggtactgggcggtgccgatcactgcggaggtctgcgtcatggcgctggtggcgtcgtcaagcgcgcgtgcgataccaaagtccatgattttgaccgcgccggtgtttgtgatcatcacgttcgcgggtttgatgtcgcggtggataatgccagcatcgtggctgacctgcagcgcatggcacacagggatcaaagtatgtgccgcctggctaggtgtcagtgggccatcctcgcgaacaatgtcacgcagagtgcggccgttgaccagctccatcacaatgtaaggagtgttcaacccagcccgtggagtttcaccagtgtcgtacaccgcgacgatcgcagggtggttgagcttgccggagttttgggcctccctgcggaagcgctcgcggaagttcacatcccgtgccaagtcggcacgcagcatttttaccgcgaccttgcggccgagaagaacatcggtggcctcatacacctcagacatgccacccgtaccgatgacgttgccaaggcgatagcggtcggcgagaacgatatcggtcactgggcacctccttggttgagcttgtttagatcatggatcaaagaatcgagcgtatcgggagcgggtgattcggtaggctggtcagcatcctgcgtaggtgcatgtggcgcatgtggcgcatgcgagctggggcgaccattatgtgacggacgcaccgaaggcaactggtgatccgacgttgggtccgactcgtcaggagtacgctccgtttcactcggagttggctccgggcgcgacgtaggcaacggctctgggaccacagtggtgatctgcggtgttggagtctccgtcacggtagccgttacaggtggtggcggaaccgaggactccgagctttgcggcgttttatcaaaaagatcatcaaacatgccctgacttgcagcccacgcggcagtacccaacaacaatgcggccaacgcgccaaccacaatgccggccccccaaccactagattgtttctccggctcctggcgtggcgtgccagcaggaatcaccgtcgatgccggatacgcagcggcagcgggagcagcaggcacctggccggtagccggaataaccgtcgtaggttgcgcagtagcccccaacgcataggtggattccgtgggagccggctgcggtgcaatgtgctgcaatggtgccgatttaggctgtggcgggcgctgccccatgcgggtagcagaaaccgccaacgccagctcgttgccatcggcataacggtgtactggatccttgcgcagcgcaatgccgatcagctcgcgcgccggggcggacacactagtggggatagccggtggggcttggttgatgtgggcgatagccacggaaaccgaggagtcgccgttgaaagggcgctgacccaccagcatttcgtatcccacaacgcctagggagtagacgtcggtagctgcggtaacatcgcggccctgcgcctgctctggggagacatactgggcggtgcccaccaccatgcccgttcgcgtcagtggcaccgctgcggctgctttggcgataccgaagtcagtaatttttacctggccgttttgggtgatcaaaaggttgccaggtttgatgtcgcggtggaccatgcccatgcgatggatgatggatagcccgtgggctgcctgctcgagaacatcgagagcaaggtcttcttcgaggcgacctttgcgtgccagcatatcggcgagggattcaccgcggacgtattccatcacgatgaagcacagggtgcggcccatgtcgtcggtgacttcgcggtagtcgtaagtgcgtaccacgttgtcggagtcgatgtgctcgctggcgagtgcctcgttgcggaagcgtgagaggaattcttcgttgtcggagaattctgggcgcaacaccttgatggccacttcgcgctggttacggaggtcgtcggcgagccaaaccgtggacattccgccgttgcccaccacccattgcaaggcgtagtcggaaccgacgagcgcctgcagtgccggatcaggtgactgtgattgtgtcatgatgtctcccctctatcctcgtgctgctagggctgcttgtgctgctgcgatgacggcgcgaccaataggcgcggccacggaaccaccggtggcggcttggccggcatcgccgccgtttttcaccaccacggccacggcaacgtcggccttggcggaaggtccgaaagcgatgtaccaggcgtgcgggttggagttacgggaatcttcaccgtgctcggcggtacctgtcttagaggcaatgtcggcgccggtgtagccagccgtgtggcgttccgatagtcgcattaggtccgtcaacgtggcggctacctcgggggtgacggcttcattgatctggtgcggcttagtctccttaatcaccttgaggtcttggccgacgatccggctcacaaggtgtggttccatgcgcttgccaccattggccacggtggcggccacgacggcgttgtggagcacggacatggcaacgtcgcgctggccgatcgacgactgcccgcgtgccgacggatccgacacgtcaccgatggtgccaggggccatatcgacgccaagatcgtagcgatcattcacgccgaaagcatgggcggcctcatcgaacttttcttggccaacatcaatacccatctgcacgaatgcggtgttgcacgagtactggaatgcggtagccaaggtgacattttgggaaccagcacaggtttgtcccgcatagttttccaaggtggtgatgccgtcgggaagcgtaatgcggtcttgtcccgtgagcatcgagcccgggccgtaaccagcgttaagaccagccgccgtggtaatcaccttgaaggtagaacctggtggcagtgtttcttgggtggcatggttgagcagcgggttgccagggtcagcgttcaacgcagcccatgtttgctcagcagtatcggggttaacaatcgccgaggggtcgtagctaggggtcgatgccatagcaaggatttcgcctgtcgacggcttgatcgccacaactgcgccctcatagccagcattggccatctggttgtatgccacctcttgcacctgtggcagcaaggtgagctcaacgttggctccgctgtgtttgcgccccaaaagctcatctgtccagcggcgcaccgcaacggaagaatccgtgccactgagcacaccgttgaggttggactccatgcctgaagccccataaatgtcagacaggtagccttcgatcggaccatagatcgcagggttagtcacgtaacgacgctggtagaacccctcctcatcctgataggactcggcaagtatctgacccccagtggagatctggccgcgagcttgcgacttcaactcaataaagccgcgacgattaagcgcattatgcgcgtatttttctttgctaaaaccctgaatgatcgtcaagttgaccaacaaaatcaagatcagcagcagcgcgaacacgctggtgaatcggatagatcggttcatcggtgagcctcctgacctcgtgcggcctgctcgtccatagacaccacgtcgttggcggcggcttgtgtggagtgggagatcctaaggatcagtccgagaagaatgtagttagccatcaaactagacccgccctgagacataaacggcgtggtcagacccgtcatcggtatgagggcggtgattccagcggtgaccacaaagacctggatggccaaggtcagcgagagaccagcagccatgagcttgccgtaggaatcacgtgcccgcagcgcggtgcgcagaccgcgggtgataaagatggcaaagagaaccagcacggcagcaagtccaataaagccgagttcctcgccaacggcggcgaggatgaagtcggactcagcaactgggatcagctctgggtgacctaaaccgagcccagcgccggccacgccaccagaagacagcccgaagagtgactgcgagagctggtagcccgtgccgttgaagttatctagtgggttaataaagttggttacgcgcgattggatcttgctggagagctggtacagcgcggtaccaccaacggccacaagtgctgcaccaatgatcagccacgatacgcggttggtggctagatacagcatgccgagtacggtgctaaacagcagcagtgctgggccgaagtcgttctcgccggccatgaccaaaatggcgaaggcccacacaccgaggataggtcctagatcgcggaggcgcgggaactcgagtccgaggaatcggtagccggccacgttaaatagtgcacgtttgttgaccaaaagctgcgcgaagaaaatcagcagcaagatcttggaaaactcacctggctgaacggagaatggtccgatggagatccaaatgttggcgtcggcattcatctttgtgggccacaccatgggtagtgcgagcaggatcagaccaagcaagcccagcacataggagtagtgcgacaacatccggtggtcgcggataaacaccaagacggcgatcatgaggaggatacccacaagagtccagatcacctgtcggctagcaagggcggtgtcgcgtgcgaggtcgatgcggtacaccatgaccagccctagtccgttgagcacgctggctaccggcagcatgacttggtcggcatgcggggcggtaaagcatagtgcgaggtgggcgatggtaaagaccccgataaagccgccaatcacccagagtgtttcggaggtgaccgacagcccttgggccatgttgaggttaatcagggtgaccgcgatgagcagggttgccatcacgagcagcccgaattccacggggcgtgcggtaatgcgtcgcaggaatgtcatttatttgacctccctgcaggtttcaccaggcgtggagagatcatcgggggagccggtactgcttggcgacgccgccttcgtggtcgtaggagctgcactcgacggtgccgctggtttcttgttatccttatcctttggctgtgcagcctgacgagtaatacatgctggcaaggtttgttctgccaagcgttgcagctgctgctgcacttcgtcgtagctgccgtcgggaagcgtggacacctgtccgcgtgccgactccttcagatcgctcaaccggaaccgatggcaagaattttctgcgtcggcagaatccacaaacgtgag

SEQ ID NO: 3982 - DNA, 23255 bp, synthetic construct
  misc_feature 1..23255: note = Synthetic
  source 1..23255: mol_type = other DNA
ctcagcacatggctggcggtggcgagctagaagcgctgagccacgagctgcgtcgataacgtagcctgccgcacgtaaacgcgtggcaggctatgaatctgatgggttagtcgtcgttcttttcgctgtttttgagctgctcttcgagggagctgagtagttcctcgtcgcgctcagggattccctcttctggggtttgtgtggagtagaccaggcgggattcttcggtgttgacggtatcggcaccgaagtcctcaacgcgtggtggttcatcggatacaccggagccggagaacttatcccacaggaagtaggctgcggcgccgagtgctgcgagtactacggtgtagagggagcagcgcacagcttgggcgccggcgctgcgcttcttcttggtgaggccagctttttgagcttgtttgcgtgcttgcttgcgggctttcttggagagtttctttgaggtcttagcgacgtcttttttggtgctctcggcggtgttttgtgcatccgcgagggctgcgtcgagacgcttgcgggcttggcctgctagcgaggttacgttttctacggcgctgtcgcggacatcttcggcggtatccgctgcggacaggagagcgtcgtacgcctcactggccttgcggtcgcggtagtccgcgtacttgttgtatgccgcctttgttagtacaactgcgccacggatggtggttgggttcatcctctatcgtccttcccagttgtggttacttatccatcaagcgtagcgaggttgcgggtttcatgcttatgatgaatggcatgactttgaagaccgctactgcgattctgcacaccaaccgtggtgacgtttccatcgagttgtttggcaaccatgcgccaaagaccgtcgaaaactttgtcaccttggcaaacggtaccgctgagtacaagaccgaaaacgcttccggcaccaacgagggccctttctacgatggcgcagtgttccaccgcgttatcgacggcttcatgatccagggtggcgacccaaccggcactggccgtggcggcccaggctacatgtttgctgatgagttccaccctgagctccagttcgatcgcccattcctgctggctatggcgaatgccggcccaggaaccaatggctcccagttctttatcactgtggtaccaaccccacacctgaacaaccaccacaccatctttggtgaggtcaccgatgcagcttctcagaaggttgttcttgacatcgctcagactgcaactgatcgtatggatcgcccagttgagccagtggttatcgagtccgtcgaaatcaccgaataaaaagcttacgctgagcgctttaacacttaacgacgcccctgctagcacttttactgtgcttcggggcgtttatgcatatagtcgtcgggtgcgagggtgggggtggtgcatactgaagtgatgaacgctctcaaacgcgcatatggtcaagcgcctgcgaccgcggttctttgcgcgctgacgatacttatctatctgtttactgttgtggagtcccgttcgattgaacacaaccttagtgattcgtggattgcagatcactggactctttatggtccgtattctcatggcctagggtggctacgcatggtggggacggtgtttctccacaacggacccacacatctggcgttgaacatgtttatgctgttcttctttggtcgcgagattgagcattatttaggcagtggtcgttttactttggcttatattgtgagcgggattggggcctcggcaactgttctgctgatggatccgcttgcgcctacggtgggtgcttctggtgctgtgtatgggcttatggcgatttttgtggcgatgtcgtaccggttgcgtagggatctcacagcaccgttgattcttatcgcagtgaatgtgggctattccttgcttatggatggtgtttccctgtggggacatctgggtggcttgctgacgggttgtgttctggggattgttttggtgtttgtgcagactactcgaggtggtaagcgggggtgagataaggggtttatctaggggcgtctcgtgtttgcatgaggcgcctattttttttgagaaaatccttatcacacaaaccacataaataacatgaggcccagcagttagctgcagtttcgtgggttgttgccggtgggagcaatgtagttatcggctgtcacaagaggcaacacgacgctactgggatggcccaaagccccagtttttggtggggaatagtgcgcagctgttccgagttatccccagatttttgtaattatccaccaaaatttcacaacttttggagtgtgaacacagcgctgatcgtgtgaaaaagattccacagcagttatccacaatgtggataattacatgtgtgttgttcacagggtgatgatcgaatagctgtgtgttcgaagtgcgcgacctgctattttcccacaagatttcgaacaaatccgcaggtggggaagaagtgcacaactttatccacagggtgtggataaagtctggggataacttccacccgtgtaattccacaatttcttccacagcctgtggataacttttggtgatagatgttcacaagtggtggataacttgtgagtaaacctcacattggatggtggcaacctggagggtggatgttggcttgggtgatatgcaaacgtgtgcatgggtcaacgccggggacttgtttggcttgagttgactatttgtgcagatagatagctacttttgtgcaagaagtggctacggggtgataaaaacccatccaccatgccggtaactgagaaaaattaaggttttgcgtggtggtggggagcgttctatatatcgcgtgattgaggggctaggtggtggcgtaataccccctaggcgttttactaaaaccgcatgtcgcctcgcgctttaaaagtgttgttacccccatcggagtggggtgtggcggcacaatgttgggtgcgtgttctaggttagtgagtgtcccccgcgggcgcccgagcacgggctgagattgcgctgatgctgtgcaagcaccgtttgaacctgtctggttaacaccagcgaaggaagagaggagcgcgagcctagtgtcggcagcctcagctaattcagtaaccaatccatctgcttgggaaaactccgagatccatccgaagcactcgtattcgccgatcgtttccggtgaccttgaggtcccagaaacagagattcagcttgacgattctcctaccggccccaatgatccagttcggatctatcgcacccgtggccctgagtgtgatcccacggtgggattgaagccactgcgtgcacagtggattgatagtcgtgaggacacggaagaatatgctggccgtgagcggaatttggctgacgatggccgctccgcgcagcgtcgtggcgcagcctcgctggagtggaagggcgtgaaacccacgccgcgacgcgccaagcagggcaagcgcgtgactcagatgcactatgcgcgccaaggcattattacgaaggaaatggagttcgtggcgctgcgcgagcacatggacccagagtttgtgcgcagtgagatcgcccgtggccgtgcgattattccgaacaacattaaccacccagaatcggagcccatgattattggtcgaaagtttttgaccaagatcaacgccaatatcggtaactccgctgtgacctccagtattgaggaagaagtatccaagctgcggtgggcaacccgctggggtgcagataccgtgatggatttgtccaccggcgatgatattcacacaacccgcgaatggattatccgcaactccccagtaccaatcggtacggtgccgatctatcaagcgttggaaaaggtcaatggtgtagcagaagaccttacgtgggagattttccgcgataccgtcattgagcagtgtgaacaaggtgtggactacatgaccattcacgccggtgtgctgctcgcctacattccgctgaccaccaaacgtgtgaccggaattgtgtcccgtggtggatccatcatggcgggttggtgccttgcacaccataaggagtccttcctttacaagcactttgatgagctgtgcgagattttcgcgcagtacgatgtcgccttctcgctgggtgatggtctgcgccctggttctgttgccgatgcgaatgatgcggcccagtttgcggagctgaaaaccattggtgagctggctcgtcgtgcgtgggaatacgatgtgcaggtcatgatcgaggggccaggtcacgttccactgaacatggtgcaggaaaacaatgagctggagcaaaagtgggctcacgatgcgcctttctacactcttggcccattggtgactgatattgcgccaggttatgaccacatcacctcggcaattggagctgctcatatcgctatgggtggtacggcgatgctgtgttatgtgaccccgaaggagcacttgggtctgcccaaccgtgatgacgtaaaaaccggtgtgattacttataaacttgcagctcacgcggccgatgtggctaaggggcaccctggtgctcgtgcgtgggatgacgcgatgagcaaggcgcgttttgagtttcgttggcatgatcagttcgcgttgtcgcttgatccagataccgcgattgcttaccatgacgaaacgcttccggcggagccggcaaagactgcgcacttttgttccatgtgtggtccgaagttctgctccatgcgcattagccaagatattcgtgacatgttcgcagataagatcgccgacttgggtatcccgcaggttggcggcgacgcagaagctggtatggtggcaaagtctgaggagtttgtggcccaaggatcgcagctttatagcgaggtgcgtgacaatgctgcccatgcctaggtggggtcgagactttgatccgcggtgctactttgtcaccggcacgggctctgtggatcacattgtcgacgtagcgcgccaagcagcgcgcgccggcgctgggctcatccaagtgcgcagcaaacccattgccgcccgtgacctgtacattcttggccgtgaggtagcccgcgcggtggcggaggttaattctcgcacccgtgtgcttatcgacgaccgcgtggatgttgcccttgcgttaatgaataacggcgagcacatccacgggatacatgttggtcaagatgaccttccggtgcgccatgttcgcgccttgttgggtgataacgccatcatcggcctcaccacgggcaccctggagctagttcgcgcatcgcgccaggttgccgaggtgatcgactacatcggtgccggtccatttcgacccaccccaacaaaagattcggggcgtgcccccgtgggcttagctggctatccgccactggttgctgaatcattggtgccagttattgccattggggatgttcgccccgaagatgcggctgatcttgccgcaacgggggttgctggtgtggcaattgtgcgcgcattaatgaactcacaggacgtagcagccgatgtgaaactcgtattgaaaggttttgcacaatgaaaatagctgttgtgggtggtggaattgtagggctaagcaccgcctttgagcttagtacccgcgggtataacgttcacgtatttgaccccaacccggcaagcggtgcctcacactttgccggcggaatgctcgcccccgccgccgaagtgcagttccaacaagacccattgtttccgttgatgaggcacgccggtaagctgtggccagacatggtgcgtcgggtagcgcagcacaccaacctgcctacgggttatcgcaccgaaggcaccctcgttgtggcagccgatcgtgccgacgcggaacacctgaaacaattgcacgcaacccaagaagcagccggaatggatgttcgccccattactacccgacaggcccgcggcctcgaaccggcactaggacctcggctatccgcggccgtacacatccccaacgacacccaagtcgcaccacgcgtattcctcaccgcactactcgacgcactcgatgactgtggagtagaggtaataaaagagaaaatcaccgacctcgaacccctctaccaacaattcgatgttgttgtcctcgcagcaggcctcggtgcacaacacctaagccccataccgttagcactacgacccgtgcgcggcgacatcctacgagtacaaacagaaccaggggcagtcaacatggttgtgcgcggctgggtcaacgaccgccccatctacatcatcccgcgcgcaaacggcgaaatcgccatcggagccaccagccgcgaagacgaacgcgatttgcccagcgtagaaggaatatacgatctgctccgcgatgccgtacgcgtagtacccggtatcgtcgatagttcccttatagaagccaacgttggtgtacgccccggcacacccgacgacctcccatacctcgggtgggcatcagaccgactcattatctccaccggatacttccgccacggcatcttgctctcagcactcggcgcccacgtcaccgcatgcctcatcgacggcaccgaccccggcatcgacctcacagcatgcgcaccagatcgacaccacaacgaaagaggcacaacccatgaacatctacattaacgacacccccaccaccatagaatcaccccagctcaccgacattatcagcaaccactgcaacggaatccgcccagggattgccgtagccatcaaccaacgcgtgataccccgctcacaatgggacaccaccacagtcaccgcaggcgaccacctcgacattctcaccgcagtgcagggaggataacatgctcaccatcgcagaccgcaacttccaatcccacctcatcatgggaaccggcggcgcgagctcctttgacaccctagaaaaatccctcatcgcctccggaaccgaactcaccaccgtagcgatgcgtcgacacgccgcccacaccggagcccacggcgaatccgtcttcgaactcatgcagcgcctcaacatcacccccctgcccaacaccgcaggctgccgcaccgcccgcgacgccatcctcaccgcacaactcgcccgcgaagcactcaacacctcctggatcaaagtggaagtcatcgccgacgacaccaccttgctccccgacgtcctcgaacttatcgacgccaccgaaaccctcaccaacgacggattcaccgtcctcgcctacacctccgacgaccccgtagtcgcacaacgactcgaagacgccggcgccgccgcagtcatgcccctaggatcacccatcggaaccggactcggcatcctcaacccccacaacatcgaactcatctgctcacgcgccacagtccccgtactcctcgacgccggcatcggaaccgcctccgacgccaccctcgccatggaactcggctgctcaggcgtactcctcgccagcgccatcaaccgatgcatcaaccccatcaccatggccaccgccatgaaacacgccgtcgaagcaggacgcctcgcgcgcgaagctgggcgcataccgcgccgggagcatgcggtggcgtcgtcaagctttgaagggctcgcctcctgggcggacgaggtgctgtgatgctcgacgagctggaacgccaacgcgtagcccgccaactgcggctacctcgttttgggattgagcagcaagaacggctcaacaaagcgcgagtgctggtgatcggtgctgggggactgggcagtcctgccttgcagtcccttgcggcggctggggtggggtcgatccgactcgtggataacgacaccgtggatgtgtccaacattcaacgccagatcctgtttggtgttggggatgtagggcgctccaaagttcacgtcgccgccgaaagattgcgtacaattcaacccgggattcgtatcgacgcccacaccgaacgcctcaccgcacacaacgcacacgaactcgccgaaggctgcgacgtgatcctcgacggctccgacacctttgccaccaaattcctctgcggcgacctcgccgaaataacaggcataccgctcgtctggggcagcgtactgcaattcgacgggcacatgggcgtattcacccgcgaggtagggctacgggacttgttcgccgaagcccccacccaaggactcaactgtgccgacgcaggtgtactcggcgctaccaccgccgtgatcgccaacctcatggccaccgaaaccatcaaaatcctcgccggaatcggaaccatccaaccaggggccatcaccacctacaatgcattaaccagcacatttcgcacatacactgtggggcgtgacccccttcgacctgcagcccgcacacttcacacgtggacgctacccaacgaatacgaacttatcgacgtccgcgaaccccacgaaatagaacacacacccagcggcgcgcacatcaccctgccacaatccatgtggaatgacaccacggcgatccaacatgcgctcgaccacatcaccacagatgatgtggttgtcgtctgtgcctctggcataagaagtgccgcatttatcgaacaattcgcacaccttaacccacacctcaccttccacaacgtccccagcggaatcaacgaactatcatgaccccacacatactcaccatcgcaggatccgacccctccggcggggccggaatccaagcagacctcaaatccatcatggcggccggcggctacggcatggcagcaatcaccgccctgaccgcgcaaaacacctgcggagttaccgcaatacacaccccgcccacggagttcctcagcgaacaactccgcgcaatatccgacgacatcaccatccatgccatcaaaatcggcatgatcggatccgcagaggccgccaccgccatcgccacatggcttgaccagctgcaccacacgcccatcgtggttctcgaccccgtcatggtagccacctccggatcggtacttggccaacgtcattattttgaacccctgctccaccacgccaccgtgatcacccccaacctgccagaactcgcagtcctaacaaacaaccacgaccctgaacaagccgaacatgccgcacgcagcctcgcagaacaatacgactgtgcagtgctgctcaaaggtggacaccgacacggaaccgacgaccttggcaacacctggattactgccagcggcccccaattccacgcacccagcccccgcatccacaccaccaacacccacggcaccggctgctcgctctcctcagcactcgccgcccggcttgccatcgaacccccagaacccgctctccactgggctaccacctggctcaacggggcaatcgcccacggcagcgacctcaacataggccacggcaacgggtctatcgaccacagctaccggctaggggaatactcagctaactgcaacacaatcgatgcactctaaaaccggaagcgccaccaaacgggggtatttcgaaggatttttctccgaacttcacaccaaatcgcttccaaaccggccgtttgggcatatttggtgtgaagttccgtctttttcgggggtgagtgggggtggcgcgcccaccagcgccagccaacatccgacgcacaatcaatgcactctaaaaccggaagagccgacaatggtcgctagttaatatccgcaacgtgcgaccaccactgagatcccgcgcatgcaactgctcggaatcaacactaggtagggaagggatagtcgagataatggagttcatatgaggtgcgattgtgcgcgtagaaatactcttggcggagctactgggataacagcgttgtaattaatagggtgggttaagggggggtgaaaatagaaaatctgttgcctaacttttgataaatcactaacttaattaaatagaactgaacctcagtaagcattggctcgtttccaatgttgattgctccgccggtgctccttatttttaagggcgccggctttcttaatagaaaggcgtaagggtgaaataccacgtaggtatagacgtcggtacattttccgtggggctagctgccattgaagtagatgacgctggaatgcctattaagacgttaagcttggtatcgcatattcacgattcgggattagatcctgacaagattaaatctgcggtgacccgattagcatcatcaggtattgcgcgtagaacacggcgcctctaccggcgtaagcgtcgtcgtttacagcagctggataagtttattcagcgccaaggttggccagtaattgaattggaagattattctgatccgctttatccatggaaggttcgtgcagaactcgcggctagttatatagctgatgagaaagaacggggagaaaaactgtcggtagcgttgcggcatattgcgcgtcaccgaggttggcggaatccctatgcaaaagtttcttcgttatatcttcccgatgagcctagtgatgcttttaaagcaatccgagaagaaataaaaagagcatccggccaaccggtgccagaaaccgcaacagtaggccagatggttactctatgcgaactgggtactttaaaacttcgtggtgaaggtggcgtgctgtcagcacgactgcagcagtctgatcacgctcgagagatccaagaaatctgccggatgcaagaaattggacaggaactatatcgcaagattatcgacgtagtttttgctgctgagtcccctaaaggttctgcttctagccgagtaggaaaagatcctctgcaacctggtaaaaatcgcgcacttaaagcttctgatgcctttcagcgataccgaattgcagcattgatcggcaatctaagggtgcgggttgacggtgaaaaacgaatcttatcggtggaagagaaaaaccttgtgttcgatcacttggtcaatctggtaccaaagaaggaaccagaatgggtgacgattgctgagattctgggaattgatcgtgggcaattaatcggtaccgcaataatgaccgatgacggagaacgcgcaggggcgcgtccgcctacacacgacacgaatcgcagcattgtagctagcagaatcgcaccacttgtagattggtggaaaactgcatctgccctagaacaacatgcaatggtaaaaacactcagcaatgctgaggtagatgactttgattccccagaaggagcaaaggtccaagcctttttcgcagaccttgacgatgatgttcacgccaaactagattcgcttcatttgcctgtcggtagagctgcttacagcgaggatacgcttgtgcggcttactcgacgtatgttggctgacggtgtggatctctatactgcaagactgcaagaatttggtattgaaccatcttggacgcctccggcgcctcggattggggaacctgtaggaaatcctgctgtcgaccgtgtactcaaaactgtttctcgttggctagaatccgcaacaaagacatggggtgctccagagcgtgtgattattgagcatgtccgagatggctttgttactgagaaacgggcccgtgaaatggacggcgacatgcgacgacgtgctgcacgaaacgtaaagattttccaagaaatgcaggaaaaactcaacgttcaaggaaaacctagtagggctgatttgtggcgttatcagtctgttcagcgccagaattgtcaatgcgcttattgtggttcgcctattacgttctcaaactcggaaatggatcatatcgttccacgagcagggcaaggatcaacaaacacgcgtgagaatctagtggcagtttgccatagatgtaatcaatccaaaggaaatactccttttgcaatatgggcaaaaaacacttctattgagggtgtaagcgttaaggaagctgtagaacgcacgcggcattgggtcaccgatacggggatgcgcagcactgactttaagaaatttaccaaggcagtggtggaacgcttccagcgtgccactatggatgaagaaatcgatgctcggtccatggaatctgtcgcatggatggccaacgagctacgttctcgagttgcgcaacattttgcttctcacggaaccacagtcagagtttatcgaggagctttgaccgcagaagcgcgaagagcttcaggtatttcaggaaaacttgaattccttgacggagtcggaaaatcacgtttggatcgccgacatcatgcaatcgatgctgcggtgattgcatttaccagtgattatgtggcggagacccttgctgtgcgatcaaatctcaaagaaactcaagcacatagacaggaagcaccacaatggcgtgagtttactgggaaagatactgaacatagagctgcatggcgagtgtggtgtcagaaaatggagaagctatcagctctgctaacagaagatctacgtgatgatcgcgtcgttgtgatgtctaatgtgaggcttcggctaggaaatggctctgcacatgaagaaacaatcggaaagctctctaaagtaaagctaggtagtcaattatctgtgtccgatattgataaggcgtccagtgaagccctttggtgtgctttgacacgtgaaccagattttgatcccaaagatgggcttccagcaaacccagagcgccatatacgggtaaacggaacacatgtgtatgcaggagataacattgaattattccctgtttcggcaggctctatagctcttcgaggtggctatgcagaattgggaagcagtttccaccatgccagggtatataaaattacttcaggtaaaaagccagcatttgcaatgcttagggtctataccattgatttattgccataccgtaatcaagacctgttctcggtggaactaagacctcaggccatgtcgatgcgacaggcagaaaagaaacttcgagatgcacttgctaccggtaacgccgaatatctcggttggctagtcgtagacgatgaacttgttgttgatacctcgaagattgcaacagaccaagtaaaagctgtagaagctgagctcggaactattcgtagatggcgggtagatgggttctttagtccttctagacttaggttgcgtcctcttcaaatgagcaaagaagggatcaaaaaagagtcggctcctgagctatcaaagattatcgatagccctggatggcgtccggctgtgaataagctgttctctgaaggaaatgtcactgtagtgcggcgtgattcgttagggtgtgttcgccttaaaagcactgcgcatctccccgtgacttggaaggtgcagtagacaatgaatcctggatggcgagttgtggatctgatcgattttgatggcaaagtctcatatcagcgtgggcagctcgccatcacatcagattttggtgaattacgtgcaacattgccgttggcgcagatcgctgttgttctcattggcaataagacaatcatcagcggtgcagttttggtcaaactttctgagtatgacattgctgtattggtatgcgattggcgccgtgttcctatcgcagggtccttttcgtggaacgaacatacgcgtattgcggcacggcaacgtgctcaagcgagtttatcgcttccgcgacaaaaatccgcttgggctcaaatcattaaggcgaaaatattaggccaagcacggactgctgcccagttaggttttgatgctaccgatttaaagaacttggctagggcggtccgttctggggatgtggataaccgtgaagctatggctgctaagagatactgggaaattatctcaacaggagatgatttccgaagattacctgggcttgctgctacggggtggaacggggcgttggattatgcgtatacagtcttgcgtggacatggcatgcgtgcgatttgttctgctggtctagtcggaacgttgggcgtgtttcatcatggtcgaggtaatcagtttgctctggtggatgatctaattgagccttttcgtccggctattgattacgcggttttctcgattgtttctaactcgcaagagctagataaggaaaccaaacgccagcttgtggttgctgtggaagagcctttcaattctgcggggcagtcaattccgacggtttttaccgcgttcgctcaacagtatgggcggtatgtggaaggtgatgtcgagaaattagtaccgcctatttgggaaggtcccttcgatgccgaagaaaggtagcgatccggtgtggtgcgtggtgatgtttgatcttccggtgaaaacaaagacgcagcgaaagcaagcaacggcatttcgtcagaatctgctagatcttggattctgtatggcgcagctgagcgtatacgtgcagtacctgcctctggctgcaaagttatctaatttggtgaaattaattaaagaaaaattacccccaggtggggatgttcgaatcctttcggtatcggacattcaatggtcgaagatgatccgtttttcttcttccacagaggtttctggagaagaaaagccttatcaacttgcgattttttagacttcaggtagcccaaaaaaccatgttaaataggattttttgggctacctgaagtctaacagggtttttgagaactgaaccccagcttacgacgatggattgtttggaggcgatgaagtctaacagggtttttgagaactgaaccccagcctcgagtacatgtttgcccggcgcgctgcgaagtctaacagggtttttgagaactgaaccccagcgtacccgcgtaggaaagcccagctcttgggaagcctaactgaagtgtcccagattttcccatctactcaaacggaacaaaacctgggacacttcatacagtggttcatctacccaaagtaataaacaacagctaaagatgcgtcaaactattttcccaacttagcgtttgcacttactacgctgcccgtctccaaacaacccatgctcaacactgtgttgacgcgtggggttcaccatgtcctccaaggtgaaaacatcttcaaagaacggacttttactcgccgtcgccgtgcttgaggtcaatggcgattatgcatagggcttgtttgttccgctgtgatgttatggacaatctacgcgcggaagacaagaggtgtgtttacgtagtgcataagaaaaacgactgacgatgtctctaactaagggtgatggcagtcgttttgttattgagactaagaagcgcttaacgccatcccatggtcataagcaggccgatgatgaagagcccgaagccgatgccatagttccatggtccgagttcggtcatgaaggagatgtcttggcctgctaggtagttaacgatcagccagagtagtccggcgaggatgaggccgaacatgatgattttgtaccacagtggggtgcccgtggagttgattttcactggggtgcggtttgcggtggaaccagcggtgtaagcggtggagctgtggttgatctttgactttggcatcgtggggtgtccttgttggtttgtaagtttctaagagtttatcaatctatcaggttagcgccagccgccgcacgagcagcactggtgccactggcagcaccagcagcggttaactgctagtgctgtgctggtggcacgagtgccgcaaggttgaattcgtagaggcgaatttcaatgggtgcgtctttgcgcagtgctgtgcctggggttggtagttgtgaggcgatcaggttctggtcggtcacagctacggtgggcactttcgctgcttggatgagtcgggaggcgttgccgttccagcctgcgtcgtgcaggatgcgcactgcgtcgctaattgtgtggcgggtgatctctgggacggtgaacattgcaccgttggagatctgcacggtgacgctagaacccttgggtacttcggcgccttcgtctggtacggcgaccacggttccggctggttcgacggaatcaacgcggacgacttcgggtttgaaacctagggaggtcaggttgccttcggcttggtcccatttcatgccggtgatcacgggaacgcggactgtttctacaccggtggagacaataatggataccttggacccacgggatacttgggatccggctgcgggggagacttcgatgatttcgcccttgggcacggtgtcggaggagtcttcacgcacggtggggtcgagaagcagacctgcggcttcgaggatcttaaccgcgtcggcggtgttcttaccgctgaggtcgggaacctcagtgatctctttaccggaggagatggtaaggcgcacagtggagttgcgttgcacgttggaaccatcggtggggttggtgcgaataaccttaccgcgaggaatatcagggttgggttcttcgatcacattgacctgtaaccctagcttttccagctggctcacagcatcttgctgcgtggagttttgcagcttagggatggtcacggtggatcgctgagaaaacggtccgccaccaaaatagtcaatggcaaatccggcacctacagccaaaacgagtactgccaaaatagcggcgagaatccgcaggccacggttggatgatcgtggtgcagcatgcgcaccaccggcaccggccaccgcagccgaaccagctacggcaccagcaggaaccacaccagcaccaatgccagcaccagcctcggcgtgatccaactcagtcacctgagttactggaaccacggtggtagacgctgggtcttgggtagcaaagctggtcggggtgacatagtggcgtgccgcgtcagtgaccgcattgcgcccaaggcgttcaagatccgcacacatttcttgtgcggtctggtagcgatccccagggtgcttagacatagcagtaagcacaacagcatcgacgttaatcgccgcggtaggcgagagatcagcgatgtattcgctgggctttaccgggtcttcttgtacgtgttggtacgcaacagcgaagggggtttcgccctcgaaaggtggtttaccagtgagggtttcataaagcacacagcctagggcgtagacatcggagcgggcgtcggcaagctttccgcgtgcctgctctggtgagaggtactgggcggtgccgatcactgcggaggtctgtgtcatggcgctggtggcgtcgtcaagcgcgcgtgcgataccaaagtccatgattttgaccgcgccggtgttggtgatcatcacgttagcgggtttgatgtcgcggtggataatgccagcatcgtggctgacctgcagcgcatggcacacagggatcaaagtatgtgccgcctggctaggtgttagcggaccatcctcacgaacaatgtcacgcagggtacggccgttgaccagctccatcacaatataaggagtgttcaacccagcccgtggagtttcaccggtgtcgtacactgcgacgatcgcagggtggttgagcttgccggagttttgggcctccctgcggaagcgctcgcggaagttcacatcccgtgccaagtcggcacgcagcatttttaccgcgaccttgcggccgagaagaacatcggtggcctcatacacctcagacatgccaccagtaccgatgacgtcgccaaggcgatagcggtcggcgagaacgatatcggtcactgggcacctccttggttgagcttgttcagattctcgatcaaagaatcgagagtatcgggagcaggtgattcggcaggctgatcagcatcctgcgtaggcgcatgtggcgcttgcgagctggggcgaccattatgcgacggacgcaccgaaggcaactggtgatccgacgatgggtgcgactcgtcaggcgtacgcttcgtttcactcggagttggctccgggcgcgacgtaggcaacggctctgggaccacagtagtgatctgcggtgtgggggtctccgtcacggtagccgtcacaggtggcggcggaaccgaggactccgagctttgcgacgtcttatcaaaaagatcatcaaacatgccctgacttgcagcccacgcagcagtacccaacaacaatgcggccaacgcgccgaccacaatgccggcaccccaaccactagactgcttctccggctcctggcgtggcgtgccagcaggaatcaccgtcgatgctggatacgcggcagcagcagcgggagcagcaggcacctggccggtagccggaataaccgtcgtcggttgcgcagtagcccccaacgcataggtggattccgtgggagccggctgcggcgcaatatgctgcaatggtgccgacttcggctgtggcgggcgctgccccatacgggtagcagaaaccgccaacgccagctcgttgccatcggcataacggtgtgccggatccttgcgcagcgcaatgccgatcagctcgcgcgccggggcggacacactagttggcatagccggtggggcttggttgatgtgggcgatagccacggaaaccgaggagtcgccggtgaaggggcgctgacccaccagcatctcgtatcccacaacgccgagggagtagacgtcagtagctgcggtaacatcgcggccctgtgcctgctctggggagacatactgggcggtgcccaccaccatgcccgttcgcgtcagtggtactgctgcggctgctttggcgataccgaagtcggtaatttttacctggccgttttgggtgatcaaaaggttgccaggtttgatgtcgcggtggaccatgcccatgcgatggatgatggatagcccgtgggctgcctgctcgagaacgtcgagagcaaggtcttcttcgaggcgacctttgcgtgccagcatgtcggcgagggattcgccgcggacgtattccatcacgatgaagcacagggtgcggcccatgtcgtcggtgacttcgcggtagtcgtaagtgcgcaccacgttgtcggagtcgatgtgctcgctggcgagtgcttcgttgcggaagcgtgagaggaattcttcgttgtcggagaattctgggcgcaacaccttgatggccacttcgcgctggttgcggaggtcgtcggcaagccaaaccgtggacattccaccgttgcccaccacccattgcagggcgtagtcggaaccgacgagtgcctgcagtgccggatcaggtgactgtgattgtgtcatgatgtctcccctctatcctcgtgctgctagggctgcttgtgctgctgcgatgacggcgcggccaatgggtgcggccacggaaccaccggtggcggcttgaccggcatcgccaccgttttttaccaccacggccacggcaacgtcggcattggcggaaggaccgaacgcgatgtaccaggcgtgcgggttggagttacgggaatcctcaccgtgctcggcggtaccggtcttggaggcaatgtcggcaccggtatagccagctgtgtggcgttccgatagtcgcatcaggtcggtcagcgtggcggctacctcgggggtaacagcctcgttgatctggtgcggcttagtctccttaatcaccttgaggtcttggccgacgatccggctcacaaggtgcggttccatgcgcttgccaccattggccacggtggcggccacgacagcgttgtggagcacggacatggcaacgtcgcgctggccgatcgacgactgcccgcgtgccgacggatccgacacgtcaccgatggtgccaggggccatgtcgacgccaagatcgtagcgatcattcacgccgaaagcatgggcggcctcatcgaacttttctttgccaacatcaatacccatctgcacgaatgcggtgttgcacgagtactggaatgcggtagccaaggtgacattttgggaaccggcgcaggtttgtcccgcatagttttccaaggtggtgatgccgtcgggaagcgtaatgcggtcttgccccgtgagcatcgagcccggaccgtaaccagcgttaaggccagccgctgtggtaatcaccttgaaggtagaacctggtggcagcgtttcttgggtggcgtggttgagcagcgggttgccggggttggcgttcaacgcagcccatgtttgctcagcggtatcggggttaacgatcgccgaggggtcgtagctaggggttgatgccatagcaaggatttcgcctgtcgacggcttgatcgccacaactgcgccctcatagccagcattggccatctggttgtatgccacctcttgcacctgtggcagcaaggtgagctcaacgttggctccgctgtgtttgcggcccaaaagctcatctgtccagcggcgcactgacacggaagaatccgtgccgctgagcacaccgttgaggttggattccatgcccgaagccccataaatgtcagacaggtagccttcgatcggaccatagatcgcagggttggtcacgtaacgacgctggtagaacccttcctcatcctggtaggactcggctagtacctgcccaccagtggagatctggccgcgggcctgcgacttcaactcaataaagccgcgtcgattaagcgcattatgcgcgtatttttcctgactaaaaccctgaatgatcgtcaagttgaccaacaaaatcaggatcagcagcagcgcgaacacgctggtgaatcggatagatcggttcatcggtgggcctcctgacctcgtgcggcctgctcgtccatagacaccacgtcgttggcggcggcttgtgtggagtgggagatcctaaggatcagtccgagaagaatatagttagccatcaagctagacccgccttgagacataaacggcgtggtcagacccgtcatcggcatgagggcggtaattccagcggtgaccacaaagacctggatggccaaggtcagcgagagaccagcagccatgagcttgccgtaggaatcacgtgcccgcagcgcagtgcgcagaccgcgggtgataaagatggcaaacagaaccagcacggcagcaagtccaataaagccgagttcctcgccaacggcggcgaggatgaagtcggactcagcaactgggatcagctctgggtggcctaaaccaagcccagcgccggccacgccaccagaagacagcccgaagagtgactgcgagagctggtagcccgtgccgttgaagttatccagtgggttaataaagttggttacgcgcgactggatcttgctggagatctggtacagcgcggtaccaccaacggccacaagtgctgcaccaatgatcagccacgatacgcggttggtggctaggtacagcatgccgagcacggtgctaaacagcagcagtgcggggccgaagtcgttctcgccggccatgaccaaaatggcgaaggcccacacgccgaggatggggcctaggtcgcggaggcgcgggaactcgagtccgaggaatcggtagccggccacgttaaatagggcgcgtttgttgaccaaaagctgcgcgaagaaaatcagcagcaagatcttggaaaactcacctggctgcacggagaacggtccgatggagatccaaatgttggcgtcggcattcatcttggtaggccacaccatgggcagtgcgagcaagatcagaccaagcaagcccagcacataggagtagcgcgacaacatccggtggtcgcgaataaacaccaagacggcgatcatgaggaggatacccacaagggtccagatcacctggcggctagcaagggcggtgtcacgtgcgaggtcgatgcggtacaccatgaccagccctagcccgttgagcacgctggctaccggcagcatgacttggtcggcatgcggggcggtaaaacatagcgcgaggtgggcgatggtgaacacgccgatgaagccgccgatcacccagagtgtttcggaggtgaccgacagcccttgggccatgttgaggttaattagggtgactgcgatgagcagggttgccatcacgagtagcccgaattccacggggcgtgcggtaatgcgtcgtaggaaggtcatttatttgacctccctgcaggtttcgccaggtgtggagagatcatcgggggagccggtactgcttggcgacgccgcctttgtagtcgtaggggctgcactcgacggtgccgctggcttctttttatccttatcctttggatgcgcagcctgacgagtaatacatgctggcagggtttgttctgccaagcgctgcagctgctgctgcacttcgtcgtagctgccgtcgggaagcgtggacacctgtccgcgtgccgactccttcagatcgctcaaccggaaccgatggcaagaattttctgcgtcggcagaatccacaaacgtgagatccccctcggggctcaaacaagcgaactggtacgtgctgtgcaaggatttgcccagcaaggagacgtcgataccgttttcgatgaccaacgtgccctgcgcagaatccgaatccgcggtggtgacatagtagttgttcttcaccatcgaagaaccccaccaaccagcactgatcagcacagccaataccaccagcgcactaatcacgcccaccatgcggcgtcgtgggctcggcgtagcctccttgacaggctccggatccggaaggatcacctggggctgacgctgtgcaatcgccatcgcagcccgtcccgccgccgtatctgggcggggatcctccggcatacccgaattaagggcacccactgtcagcggtgtgaccggcaacgatgtggcagcagcggacttatccgagccatctgcctctacaacatctgccaccacaaccgtgacgttatcggggccacccgaacgaagcgccaaatcaaccaaccggcgagcagcctcttggggcgtgccctgctgcagagtcgtctcaatcgtcgaatgcgtgaccggatcagacaatccatccgagcacaacaagaaacgatcgccagggcgaatatcgatcatcttcaacgtgggctcaactgggcgaccagtataagccttcaaaatcattgagcgctgcgggtgcgtggacacatcctcaggggccagctgccccttatccacgagggactgcacataggtgtcatccaccgtgatctgttccaacgcgccatcgcggagacgataaccacgggaatcacccacatgacacatcgccaaatcggcaccgttaaacatcagcgccgttagcgtggtgcccatgccgtcggtttccggaacatcgcggacaccttgagcgatggcacggttggcgtcgtcagctaccgatgccaacaacgccaacatgtcgttgtcgtcggcgtcggcgtcgagacgcatcaaatgattaatcatcaactgcgaagcaacctcgccagccgcatgaccacccatgccgtcgg

SEQ ID NO: 3983 - DNA, 22439 bp, synthetic construct
  variation 14689..14825: note = note, n is a, c, g, or t
  source 1..22439: mol_type = other DNA
  misc_feature 1..22439: note = Synthetic
gcgagcgcctgactgcgtacaaggttccgcgcaccttctatcacttcgaggagttggctactgaccagatcggtaagctgcgccgccgcgaagttcaggccgacttgctggatatgctgggcctggtgccgaaggaaaaggacgaggctgctgccgacgacgacacagacggctccgaggattccgatacttccggtaaggcgaagccgctcgatgaacagccggaccaccaagaatccgacgttgagggtgtcgaggtagaagatcttgccgacgcccagccggacgaggctgcagagaaataagccggagcacctgactacccggagcatctagcaccctggtgagcccctaaaagggacttgtcggggcgttttgctatgtcagtgacctgttcctgaatccgcagacatggtttctgaaacaaaatcatgagaatttactcacatttgccgcgagttatccacgtgagataactcgcatgcactacggtgagcaaagacaacatgaacgtttcctcatattttctgtaaaggatgccactgcatgtctttgacaccgcttgattccatgcgcgcccccgccatcatctttgctggtcaagcctcggaatgggaaaagcagctgcgcaatgccgctgccagccaccacgccgtcggccgcctggacaattacctgacccaagcccgtagcctggtcagcccttacgcccgcaccattgcttccactatcccaggagccatggagcgcttggaagcgctcgtgcacgcggactcccaagacaccggcgcatccaaccacacgaccagcccgaacaattccactagttccaatgacgtattccccgctgtcagcatcccgggcatcgtgctcagccagctggctgccattgatcaattgcgtgacctggggatgaaccttgcaggttgcgacctagaacagggctcaacacagaacaacccaaccaccgccttcggccactcccagggcagcctcggcatcgccgccatcaaacatccagtacacgcactggccctggccatcctgatgggcacagcagcaagcgtcgcccacggttccaccgattcccgctcgcacatgctgttgatccgcgacctcccgcgcgatgtcgtcgagcagtccctgaatgggaccaccactggctcagccgccatctccgtggtcaatggcacccgcgctttcgttgtctcgggcaccccggatgaactcgcagcggtagaaaataacgtcgccgcccacgccagcgcctataacgacgccctggaggcacgcgaattcggcggctcagaactcactccaaacttcacctacttaccggtcgcgctgcctttccaccacgacagcctcaccgaagccgcagagttgaccatcgagtgggcccaggcctgccagctggatctcggcgacaccgatatcgccaccgtcgtccgcgacatcctgatccgcccgttcgactggaccgcacagactgcccagatggtcgaccagcacatcagccacgctctggtgcttgacgacggcctcgcaaaactcaccaccccgctcgtggcgggcaccggtctatccgtcgttccggcttggacgtcgtcgcaacgcgataacctcgcaacccccggcgcgcaattgcctactgcgcgcgactggtctgagttcgccccacggctggtcacactgccggatggcaagacgtacacgcagacgaagttctctgcactgaccggcttgtccccgatcatgctcggcggcatgacgccaaccaccgtcgacccagccatcgtggccgctgccgccaacgctggtttctggacggagatggccggcggcggaatgtattccgaagaactgtttaccgaactgaagaattcgctgatccgccagctgcagcctggacgcaccgtggcgtttaacaccatgttcttcgatcgcttcatgtggaacttgcagtttggccaagcgcgcatcgtcccgaaggcccgcgcgaacggcgctccaattaccggtgtcaccatttccgctggcgtgccggaagccgacgaggccacagaactgctcgcccagctgcgtgccgacggtttcccatatatttccttcaaaccgggcaccaccaagcagatccgcgacatcctagccatcgctgccgccaacccggagcaccagttaattctgcagatcgaggacggccacgccggcggccaccactcgtggctggatttggatgagatgctcatcgacacttacgccgctgcccgcgagcacgataacgtcaccatcaccgtcggcggtggcatttactcagcagaacgtgccgcggaatacctgaccggtacgtggtcacagaaatattctctgccccgcatgccggtcgacggcgtgttcgtcggcacggtcgccatggccaccaaagaagccactacctctccgcaggtcaaacagctgctcgtcgacaccccaggtatcagcccggagaccaacggcggttgggtcggccgcggccgcgctaacggtggtgtggcctctggtcagtcgcatctactggcggatctccacgaaatcgataactctttcgccgctgccgcccggctgatcacctcgctggatccagctgattaccaggaccaccgcgaagaaatcatcgccgcattggccaagacctccaagccgtatttcggtgacgtcgagaccatgacctaccagcagtggctggagcgtttcgtcgacctagccttcccgttcatggacccgacctggcaggatcgctggttcgacctgttgcaccgcatcgaggcgcgcctgcacccgtcggatcacggcgaaatcgacaccctgttcccggacctggattccgtcgccgatgccccggccaacctgcgcaccttgctcgaggccttcccgcaggctgccaccactaccgtcgcagcgcgcgatgccgcctggtttgtttcgctgaatcataagcacaacaagccgatgccatggaccacggccatcgatggtgacctgaaaaagtggttctccaaagacaccctgtggcaggcgcaggaggatcgttacgacgccgatgccgtacgcatcatcccgggcccggtctcggtagcaggcattaccaaggtcgacgagcccgtcgccgagttgctggcccggtttgaaaccggcaccaccgaggccttacaacaagctggcgtggagccagccaagcagtactcacgcctgggcaacgccaccactgcagaagaattcttgcgccaggccccaagcttggaatggcacgggcacaccatcgccaacccagccgtggagctgccaactgaagcctttgacatcatcaacgacggcaccgaggctgccccgcagtattccatccggatcaacactgattcctactgggatgacctgccagaagagcagcgcccgttctatgtgaagtccgtgtccatccccgtcgatctttccgacgccgtcgccactggtgccagcccggttgtggaccacgaccgtctgccacaagcagtctttgagctgttggcaggcctggctggtgtgggttcgacctccgaatctggcgatgagatcaccgcgctgcccaccatcgtggaaggttcggtcgacgagcaatatccattcggctatgccgaagattccttcaccttgcctaccacgctgttgcaggcacacaccgcagtcaccggcgctggtttgggcgacaagctcaccaccgccccgggcaccccggacgtgctggtgggcccagcctggcctgcgatttataccgctctaggctctggccgcattggcgaggagcacggcgagcctgctggtaccgactacccagtcatcgagggtcttctcaacgccgtgcacctgaaccacgttattgacctgcgggtgccactccacgaactcgcccgcggcaacaaaggcgaaagcaatgcgcgccgcatcgacgtcaaatcctggtgctctgcgatcgatgagtccaacgccggacgcatcgtcaccgtggaactggaattgcgcgatcacgaatccggcgagttggtggccacccagatgcagcgcttcgctatccgcggccgcgccactggtgccagcgtcccggcacctgccccggaatggggcggtgctgccctagctgctgaggtcgagccgaccccacgttccttcgtcgaccgcgcaaccgtcacggcgccgcaggatatgaccccattcgcgctggtctcgggcgactataacccgatccacacctccactaatgctgctcgcctggtcaatcttgacaacgccctagtgcacggaatgtggctctcggccaccgcccagcacttggctaatacccacggcacggtcaccagctggacatattccatgttcggcatggtgcaactcagcgacaaggtggaaatcaccgcagaacgcgtcggacgcgccggaatccacagtgctttagaagtcacctgccgcatcgatggtgaagtcgtctccgtcggccaggcgctgttggcacaaccggccaccgcctacgtctacccaggccagggtgtgcaggcagaaggcatgggccgcggcgatcgcaacgcatcccctgctgcacgcgaggcctggcgtcgcgcggatcaccacacccgcacccagcatggtttttccatccggcagatcatcgacgacaacccaacggagctcaaggtgcgcggtactaccttccgccacccgcagggcgtgctgcacctgacgcagttcacccaggtcgcgttggccgttgtcgcctatgggcagaccgagcgtttgcgcgaaaacaatgcgctggctactggcgccatgtatgccgggcactcgttgggtgaatacaccgcgctggcttcgctggcgaatatcttcgatttggaagctgtcatcgacatcgtctactcgcgtggttccgcgatgggcacgttggtcgagcgcgacgagcacggcaattccaattacggcatgggtgcgctgcgcccgaacatgatcggtgtcagtgccgatgatgtgcaggattatgttgcccaggtggcgcaggaaaccggcgagttcttggagatcgtcaactacaacatctccggccagcagtattccatcgctggcaccaaggctggcctggcggaattgggtaagcgcgcgaagtccatcgccccgcgtgcgttcgtgaccgtcccgggcatcgatgtgccgttccactcccgcgtgctgcgcgacggcgtgcctgcattcgcggacaaactcgacgagctgctaccggagaccttggacctggatgccttggtcggacgctatgtgccgaacctagtggcccgcccgttcgaactcacccaggatttcgtggacgccaccgcggctttggctccgtctggccgtctcgacaacatcgacgccgccaccatggagccgcaaaagctggcccgcctgttgctgatcgagttgttgtcctggcagtttgcttcaccggtgcgctggatcgaaacccaggaattgctgtttgctcgcgtcgaccagatcatcgaggtcggcttggcgtcgtcgccaacgttgaccaacttggcgcagcgttccatggccgtggctggcgtcagcttgccggtgtacaacgtcgagcgtgaccaggatgtggtcatgctcgccgacgtcaccgaggcgccaatcgaggtggatgacgaagatactgcaagtaactctgctgccgccgccgaccaagccagccaggcgccggaggtcggcgccgatgctgcacgtcctacggaaaacccggcaccgatgtcggaggcgggtcctgactccacaaacactgcagccaccgcaaacactgccaccgaggcagccccagcaaacgcgtcggcaagcgccagcgctaaccccaacgctagtaccgctgctggagccaacactggaggcggcgccccggccggcgagctcagcttcaccgccgccgaggccatcatgacgctgttcgcgttttccaataagatccgcctagagcagatcaacgattccgataccgtcgaagaactcaccaacggtgtgtcctcgcgtcgtaaccagctgctcatggatatgtccgctgaactaggggttccagccatcgacggggccgctgatgctgatgtcgccaccctgcgtggccgcgtcaccaccgcagctccgggctacagcccgtttggtgcggtgctcagcgaagccatcggagcgcgcctgcgtcagctcaccggtgccgccggtgccaagcctgctgctgtcggcgagcgggtaaccggcacctgggcactcccacaatcctggatcgcccacgtggaagccgaaatcctgctgggctcgcgcgaagaagattcggtgcgtggcggatcgctagcaacgatcccaacttcggccagctccaaggcagaagtcaacgaactagttgacgccgccgtgcagcaagtggctgctcgccacggggtggcggtctcgcaagcaaccggtggctcgggtgccggtggtggttccgtcgtggattccgctgcgctcaacgaattcgccgagcaagtcaccggcgaaaacggtgtgctggctactgccgcacgtaccgtactggcgcagctgggcttatccgagcctgcaccagagaccccggaaaccgataacacgctgtttgaaaccgtcgaggcagagctgggttccggctgggtcaagaccgtcaccccggtcttcgatgcccgcaaagctgtgcttttcgacgaccgctgggccagcgcccgggaagatctcgcccgctacgcgctggggcaagcagatatcgccctggagcgtttccgcggcaccggcacgaccgtcgccaagcaagcccgctggtgggcagccaacggtgggcagggcgagctggaagagatcgcgcaactggcagaatctgagctgcagggtgcctacgccgaggatattgcgctggtcaccggtgctgctccgggctcgattgccactgcgctgatcgcgcgcctgttggaaggtggcgcgaccgtcgtcatgactgcttcgcgcgtgagccaagcgcgtaaggagtttgcccgcaagctgtatgccgagcacgccgtcccgggtgctgcgctgtggctggtaccggcgaacttgtcgtcctaccgcgacgtcgatgcggtcatcgactggatcggcactgagcaggtggaatccgtcggcaatgaggtgaagctgctcaagccagctctgatcccaaccctggccttcccattcgccgccccaccggtgacagggtcgctggccgacgccggcccgcaggcagaaaaccaaacgcgtttgctgttgtggtccgtcgaacgcaccatcgcgggattggccggtttggcgcaagctggcgtcgacaagcgctgccatgtggtgcttccgggttcaccaaaccgcggtgtattcggtggcgacggcgcttatggcgaggtcaaggccgcgctggatgcgattatgaacaagtggaaggttgaggctggctggtccgacggtgtcaccctggcgcaggttctgatcggttgggtggccggtacgcacctgatggccggcaacgacggactggttccggctgtggaggctgcgggtatccgggtctggaacccagcagagatttcccacgagctgatgggcttggcttctgccgaatcccgcgcgcaggctgccaaggctccgctgcacctggatctgaccggtggtttgggtgacacgttgaacatggctgagctgactgcccaggcggcagcgaatgcggaacaagccgccgcggccgcagcagaggcagcagccaacgcccccgctgccccggcgaccataacggccctgccaaatatcgcagtgccagcccagccggagcgtgtggaaaccggtgagatcaccacagatctggatgacatgatcgtcatcgctggtgtcggtgaggtctcgtcctggggctcgggccgcacccgtttcgaggcagaatacggtattcagcgcgacggctcggtggaactaaccgccgccggtgttctggagctggcctggatgacgggcctggtcaactgggccgaagacccaaccccgggctggtacgacgccaatggggcagaaatcgccgaagaggaaatctatgctcgcttccgcgatgaggtcgtcgcccgcgctggcgtgcgcaccttgtcggataagtatcacctgcaggatcagggttcgattgacttggcgacggtcttcttggaccgcgacatcaccttcaccgtgccgtccgaggcccaggcccgcgatatcgaagctgctgacccatcctttacccgtgtggccgaggccgacggcgagtggcaggtcactcgcttgcagggcgctaccgcgaaggtgccgcgcaaggcgacgctgacacgcacggtggcgggccagatgccggataacttcgaccccacgcgatggggtattccggagcacatggtcgacgccctggaccgcatggctgtgtggaacctggtcaccgccgtcgacgcgttcattagcgccgggttcagccccgcggaactgctgcaatcgatccacccgggcgatattgcctctactcagggcaccggtattggtggcatggaatcgctgcataaggtcttcgtctcgcgcttcttggacgaggagcgcccgtcggacatcctgcaggaagccctaccaaacgtgattgctgcgcacacgatgcagtcgttggtcggtggctacggttccatgattcacccgatcggtgcgtgtgcgacctctgcggtctccatcgaggaaggctgcgacaagatcaagctgggcaaggccgatgtggtggtggccggtggtatcgatgacgtgcaggtggaatcgctggccggcttcggtgacatgaacgcaaccgcggagacgaagaagatgaccgaccagggcatcgacgagcgcttcatctcccgtgccaacgaccgccgtcgcggcggcttcctggaggccgaaggtggcggaaccgtgctgctggtgcgcggttccttggcccgcgagctgggcttgccggtctatgcggtggttgcacacgcggcgtcctatgccgatggtgcgcacacctcgatccctgccccgggcctgggtgctttgggcgctggacggggccgcgaaaactcgcgcctggcaaagtcgctgcgtgggctgggcttgcacccgaacgacgttacggtgctgtccaagcacgatacctccaccaacgccaacgacccgaacgaatccgagctgcactccatgctgtggccagccgtcggccgcgatgccgatgctccgctgtttgtgatttcgcagaagtcgctgacgggccactccaaggctggtgccgcgctgttccagaccggtgggttgatcgatgtcttccgcaccggccgggtgccgcacaacgcggcgttggattgcgtggatccgctgatcgagccgaaggcgaagaacctggtgtggctgcgcgacggcgtttcgcttgccgacgccgggcgtccggtgaaagcggctgtgttgacctcgctcggcttcggtcacgttggtgccgtggtggtctacggccacccgggtgtcttcgaagctgcggtggccgcgcagttcggtgaggacgctgccggtgcttggcgcgagcaggcgaatgctcgtctggctgctggtaccgcgcaccgcgaggctggcatgattggccgccgcgcgttgttcagtgtgattgagggccgtcgcttgccggagcggggttcgaaggaagcggagatcgcactgctgctggacgaggatgctcgtttgggcgctgacggcacctacccgctgcctggtgagtctggtgaatctggccggaaagactagacgtacgccaatttgctgggtaagatcaagtatgagaattgaacctcagtaagcgccggctcgtttccggtggcgaatgctccaaccgggccttcgggcccggtttttttcatacccgaaagacttttgtcctatgcctgttaactacggccttaactaccgcgttggatttgatgtcggcacacactcacttggatgtgctgctatcgaagtagatgacaatgatcaaccgatccaaattctcagtgctgtttctctgattcatgattctggaatcgatcctgatcagaatgaacacgccattactcggctagctacctcgggtatagcccgtcggacgcgtcgcttgtaccggcgtcgccgccaccgcataatcaagctggagaaattcctacggtctcagggatggaaaaccgtgaatttcgagtactactccgactcctatctaccgtggaaaacacgcgttgctttagtgaacggtttcatcacggatgaaaagcagcgcggtgagtacttgtccattgcacttcggcatatcgccaatcaccggggctggcggaacccatattggaaagtttctagtctatattctcctgacgcacccagcgatgcgtttgaacagatacggaaagagcttgaagcaaaaacaaagcggaaaatcccgcacgatgtcaccgtcggacagctcatctcttttgcccaatttggccaggatcggctgcgcggtggcggaaaaaagaaagacaagaataaatctgcgagcgaagttaaacaagccgtcatctctgctcgactgcaccaaattgaccacgctcgcgaaatcaacgaaatctgccgtgtccaaaaaattgatgacgcactgcgcaaacaaattctggatttagtttttgccgccgaatctccaaaagctgcgcggcccggcaaagattcactgcaagaagacaaatacagggcgttgaaggcttccgatgctttccagcgttatcgcatcgctgcacttatcggaaatcttcggatacttcacgcaggggccactcgtcggttgaatggcgatgagagacacatcgtattcgaatacctcgtcaacttagcaccgaaaacagagccatcatggctcaaagttgctgaactactaagcattgatcgcggccagttgcgaggtaccgcgacaatgactgacgacggtgagcgtgccggggcaaaaccacctgtacatgacacaaaccgaaccattcttgggtgcaaggttaaaccgttagctaagtggtggcaaaacgcatcagaacccgagcgcgcagcaatgctgaaggcgctgtctaatgccgaagccgatgatttcgattctcctgctggtgcgcaagtacaagccttcttcgcggaattggacgaaaaagaacacgaaaaattagattcgcttcacctgccgatggggcgcgcggcttatagcgaggacacgctggtgcgtttgactaagcgcatgaaccaggaaaatttggatctttatgacgcccgccgcgctgaattcggaatcgccgaagactggacaccgccggctccgcggattggtgagcccgtaggaaacccagcagtggaccgcgtgctcaaaggggttgctcgttggttagaagctgccgccgacgagtggggcgcacctaaatcagtagttattgagcatgttcgggacggcttcatcagtaagtccaaagcacgcgaaatcgaccgcgaaaacaataaacgccacaaacataacgaaaagttgttccgagaaatggaagaacatctcggtattgaaggtaagcctcgcagcgctgatctctggcgtttccagtcggtacagaggcaggattatcagtgtgcatattgtggctcaccgatcacgtatgccaatagcgaaatggaccatatcgttccgcgcgccggtgaaggctctaccaacacgcgggataacctggttgcggtttgccaccgctgcaatctttccaaatccaatattcctttcgcggtctgggcacagaaagtcagtatcccgggtgtcagcgtaaaagaagccttggaccgcacaaagcgctggtccgtagactctggtctgaacaaaactgagttcaataatttccgtgccaaagtccgtgcccggttccaacgcactgctcatgatgaaccacttgatgcgcgctccatggaatctgtcgcgtggatggctaatgaactacgcgcacgcgttgcgcaacggttccaccaagaaaacaccagtgttagcgtataccgcggtgcaattactgcagaagcacgccgtgctgcagatatcaccaaaaaatgcgcttcattggtggtcccggcaaaacgcgacttgaccgtcgccatcacgctgtggatgcagcagttgtcgcattcacccgtcaatacgtcgctgaaaccttggctatccgttccaataagaagcgtgcagccgaacttctccgtgatgctccaaggtggaaagagttcactggtgcggatgaaaaacgacgtgcagcatggaatgcgtggctgccgaaagtccagaaactcgcttcattgctgcaagttgccttagatgaagatcgcatcgttgttacccagaacatccgtcttcgcgtcggtaatggccgcgcgcataaagaaaccattggcaagttgaagacaatccgcgttggtgatgctatttcggccaccgacattgatagagcatcctctgaagctctgtggtgcgctcttactcgggacaaagatttcgatgcgaaagccggtttgccagagaatcccgagcgcaagattaggatccacggcacctggtatggagctgacgatgaaatcgaagttttccctgtgggagccggtgcaatcaaagtacgcggtggctacgccgaactcagccgtttccatcacgcgcgaatctataaggttccgaagaaaacaggttatgactactgcatgctgcgtgtttacaacaccgaccttgtacggcaccgaaacgaagatctattttctgttgagctaaagccgcaaaccatctctgtacgtcaagcagagcaaaaattgcgtacagctctagccaatggcacagccgaatacctcggctgggtggttattgacgatgagcttgttattgatacagctaagtttaataccggacaaatcgcagaaatgcagtctgaattcggccaaatccggcggtggcgactagatgggttttattcggataccaagtttcggctccgtcctctacagatgagtgcagaaggcctaccagaggactccacagacggggctaaaaaagttatcgacaaaccaggatggcttcctgcagtcaacaaacttctggctttaggaaatgtcactgttgtccggcgcgatgcattgggccgtgttcgacttattagcgctgcgcacctgcccatttcttggaaggtcgattagatatgaatccaggatggcgggttatcgactgcactaacttagagggttcgctgcgatattcacgtggtcagctcgtcatccagaaagctgaaaatccagaaatcgcaatccccttggcgcaaattgcggtcgtgctgctcggtactcaaggttcgatcagtggtgccgtgctgcaaaaattcagcgattatgatattgcgttgcttgtttgcgactggcgaggagttccagtctccggcgcttatccctggaaccaacattcgcgcacaggggctcggcaacaagcacaagcgcagcttccggtcccgaaaaagaaacaagcgtggacacggattatcgcagctaagattcacggacaatcatcagtactccgtgcactagataaacctggcgcagaggaattgctcaagctttcccgcacagtaaaatctggcgatccagaaaacaaagaagcacaagccgctcgacggtactggtctcacctttcacacgaggaatcttttgctcgtctgcctggcacaggagaacctggctggaattcatcattggattacggctatacacttctacgtggctatggaattcgtgcactagcaggcgccggattgtccggaacccttggagtgtttcaccgtggccgtggtaattcttgggcgctcgtagatgacctcatggagcctttccgtccaatggtcgaccaaattgtgttttcgcaaattgaatacggcgaaactctcgatgcggagcagaagacacaaatttctacaggcctcaatacagcttttgctagtggcggcaagagtttgagcactgtcttcaacgaattcgctcaacactatgggcaatacgttgaaggtaggtttccggacctcagtgttcctaggtgggaaggattcctccgtgcccacgaaggatagcgaaccaatgtggtgtgtagtcatgtttgacttaccagtcaagaccaaaaagcaaaccagggaagctaatcgcttccgcaatcatttattggaccttggcttttgccgctcgcaactgagtgtttatgtgcagtattttcctctcgcctcacggattgcaaaaacagtcaaagagataaaaactaatttgccagacggcggtgaagtgagaatagtctcagtcaccgataaccaatgggcaaaagccatcagattttcgaaacaccaggaagccgcagttgaggaaaaaccaacacaactactaattttttaatgaggaatcgccaaataaccccagtaaaacggcccttttcgggccgcactgaagtatatcaggggtaatgagaactgaaccccagcgccagctcacagaaaagcacggcaccccgaagtatatcaggggtaatgagaactgaaccccagccgtggcnnnnnnnnnnnnnnnnnnnnnnnnnnnnnnnnnnnnnnnnnnnnnnnnnnnnnnnnnnnnnnnnnnnnnnnnnnnnnnnnnnnnnnnnnnnnnnnnnnnnnnnnnnnnnnnnnnnnnnnnnnnnnnnnnnnnnnnnnatatcaggggtaatgagaactgaaccccagctaccagtcattaatccggtcctgggtgtgaagtatatcaggggtaatgagaactgaaccccagcggaaattgtttctcataccgcaggtcgcggcatgtcaaggttgtaaatcccgctcatcacgaaaattttaaaaatacaattcggccccgcttcaaaacccaaaagtcagatctaccgactatttacatctaaaacttcttgaatgcaccactagtgagtttctttcacttctataacttccgcaacttgttatagtcggttcaccaaccactcccatattttccggaaggcaccagacttgaagaaactcgccgtaattttcggctcgtgcaccatcattgcgagcttgctttcgtctccgatcgaagcacacgctaatcctgcgagttccagcaattcggcgcgctctggcgccgtagtgaatcttgcttcttccgcacctgctcttcccggtagctcgattgggccacgctgggatcagttccagttgggatcacagatcctggagtttttccataactccaccgacgaggcctaccgtgcgtttttcgcttccttgcctaaggaagtccagcagctttcttccacaccgcagccacgcagcaaaccgaccccaccaaacttgcagcctggttatcaaccaccagctcctgttactccagccggtgattgctcgaattgcgtagctttaactttcgacgacggcccgcagccgccgaccaaccgaattctggatactctcgactccaaacacgcaaaagctacgtttttcgtgcagaccccgatggtgcatgccttgccagatacggcgcgtcgcatcgtcaattcgggccacaccatcggcaatcatggaacaacgcacgtgaacttcgccctgagcagcccaactcgtgtgcatactgagatttctcaaaacaccaaggccgtgcaggcagtcaccggtgcgacaccacgctggttgcgcccgccgtacggcgctcacaatgacaacgtcgtgcaggcagcccgtgcgcacgggatgggggtcgcgctgtgggatgtcatcgttttcgactggcgcgatcgtgacgccaacacagtctgcgaacgcacggtcaaccaagccaacggcggtgaggtcgtgctgctgcacgatattcacaacaccaccgctgacgcgaccacgtgcatcatcgacgggctgcgcgccaaaggcctagaaccagtgactttggatcgcctgcacggctcgccggaacctggacgggtctacggtacccgctagggctacgcatcgcgttgagccgcgttattcaaccgcttcacaaactgctgtggccggtccaccgtcacgcggtaggttttgccatctttcatctccagcgccaagttggccgcgcccgcgtgcatagacaatgcacctccgatgaagtgcacgccgaaggtattacgttccaatggcaaagggtcccgtgggatagcagcttccttgatatctgcaagattgcaggtttttacagggacccacaaaactttgatttttagagtctgctgctcctggtccaactgagtatcgatgtgaaacaacacgacgattgccggcacgatgaccaagagaaacgccacccaactcatcatgagcaaaaaccagatggtgatagctactgtcactgcgatccaaacccagcgagcagcattgtatccaaaaacttgtgaatgtagacgagattgttgattcgccataggggattacacctccggggttaaagcgtcacataaacctagagtacccagatactcgcgaaagcttttgggattctacatttctcggcgcccccatttatgatgtctccaaagctcatcggctcgcactccacgtagccgcgagatctcccccactcgacttatccttttggagccagcccatgtcatcctcgttattccagcgcgcagctgcccttgctctgactgcggcattcagcctgcctgcagccgctgctgtctcgtctgccgtggccaccccacaagcacacgcgcaacagttttccagcgaaaccagctcccggatcgctttcgatggttcttccgcgccaatggcggaatggtccaaagacccagctgtgcagggacatgtgctaaatgttcttcaatttttccagaaccacaccccttggcatcaactgccgatgtggaacctatggggcgagcaaaccccctacaccatcgacaaggagcaggattttgcacagccgcgcctgatccaccgcgaagcagacgagcgtttcgacgtcgaacgtctctacgtggagtccccggcaatgcgccgcgtcgtccaggtgcaagtgcagtacccgaaggaccgcaacgcagccgcaccgatgttgtatcttctcgacggcgtgtcagccccgcgtcagtccggatggctgcgaaaaggcgacgtgcaaggaaccatggcgaatgaacacgtcaccacgatcatgcctgtcgaggctggtggcaccaactacacggattggaacgccaccgacccgtatttgggccgcgcgaagtgggaaactttcctgacccaggaactgcctggcgtcatggaacaacaaaccggtatcccttttaacggtgagcgctatatcggcggcttgtccatgggcggttcggctgccgtccgtctggccaatctgtacccacagctgtattccggtactttctcggtttcgggctgctattcgtcgatcagcactgctggtcgtgcttatttcgacctggcagcgcttgtcatgggtggcaacccagagctgatgtggggcccgggcaacaccccggagcgcctgcgtagcgacgtcgtctcggacccaaagggtatcgccagcatgccggtttatatctattccgccaatggctacgccactgaacatgatattgagctggcccgccccgagggcattccgacgttcttcggcaatatcacgctggaaaaactcacgaaccaatgcaccgcggaattggagcactcattgcaggaaaagggcctgatgcacgagcgcattgagttcgaccacgcaccaaccggcatccacgactggccgtattacaagcaacagctccccgtggcctgggccagcgtaacccaaggcaaatacacctacccgaccccgggagaatagtaacaaccctgctagacgcgtgagctgcagttagactaggcgggcatgaaactttcacgtactttcactgccctggccgcgacctccatgcttaccgtggcagcatgctcgaacgccgcggacagcgccgatgagactgttaatagcgctagtgagcaagcctcgagcacggttaaatccgctactgacgccgcaggcagcatggccgacaaggcgaaagacgatgcaaaagatgctgcttcagacacagccgaccagaaatacccggacattctggaagccgaattatccggttccgatggcgaataccgcatctccgtgacggtgtcctcgccctatgattccccggagcgctacgccgacggctggcgcgtgctcgacgaagacggcaccgtgttagccgaacacgaactcggccacgaccacgccaacgagcagccatttactcgctcccgcggccccttcgagatcccggacaacgtcaacgaggtcaccgtcgaaggccacgaccaagaacacggctacggcggcaaaaccgtcaccatcgaagtcccgcgctagcccgtttcgcgcagtctttcgccacgatggtggctagatttccagcccgatccacagcggttcgggctcaagctgtaccccaaatttttcctgcaccccggcgcgcacatcacgggctagcttgacgacgtccgcagcccgcgccgcgccccggttggtcagggccagggtgtgcttcgtcgacaagcgcgctggggcatccgcacccgggtagcctttggcaaaaccggcgcgatcaatcagccaggcggcagacagcttcaccagtgcttctgcggctccatttccagccccaccggaagcccctgcggcaccaccggaaacctcagtgccagacccctcagtgtcggaaacctcagtgccagaacccccagtatcagacccctcagtggccatactgcctgcagccaccgggaaacggggcatgcccgctgcttcgtcggcacccagctcagcggcaaccacctgggtgatctcgtcggcaagcgtctccggcactactgggttggtaaaaaacgaacccgccgaccacgtgtcatgatctgctggatcatgcaccattcccttggaacgacgcaggcccagcacctcctcacgcacctccgctggatcgcgacgctggcccggctcgcccgccagctggccaaaacgcaacggcgctgacaaaccatcagtgcgcagctggaactccacggccaacaccaccccgcgcgaggtgaatttcaaattggaatagcgatacgccaaatccagcgcactggcaggcacccattcgacggtaccggtcgcacgatctaacaactgcacacgagtgagtacatccgcgatctccgcgccataggcgccgacgttttgcaccggggtggcaccggcagaacccggaatgcccgataagcactccaagccaccaagccccgcatcgatgctggcagcgacgacctcatcccagatagcgcccgcgcccgcgcgcaacacaccggtgctggcgtcgatctccaggtggtcatcgcccataattaccgcaaccacatccagcggctcgtcggtcaccagcaaattggatccaccaccgacaatcagcagctccaccccggcagcatccagggcgcgaaccaccgccgcggcggcctcaccagtcgcggctcgcacggcagcccgcggggcaccacccaggtgaaacgtcgtcaattgagaaaattccacgccatcgaggcgttcgagcactccggcgtcggcaagcgtttgcaactccggggtatccaaggccgtatttgcttgagtcataaaatcattcatcactatcacagggtagtctgtagggcatgtctacccgtagcgaaaacacagtgaccatcaatcactccgccgaaaaagtccaccaggcgttgaccaacgagaagtactgggcttatatcgccgaaaacctttcgccagaaccaggcgagctcaacgagttctccaacaacgaagccaccctgttcgagctgcttcccgtcaccatcctgccggaggccgtacgcgctatggtctcgcagtcgctgaaggttaagcgcaccgtcaaagttggcgcgcttgccgacgacaaagcagaactttcctacaacgccgacgtcaaaggcaccccggtcgatttcaaaggcaccgttcagctagcaggccaaggtgaaaccaccaccctgagctacaccaacgacgtttccgtcaacatcccaatgatgggtgccgctatcgagcccaaggttggcgaagcactagaagagctcttcgacaacgaaggccagctgaccgaaaagtggattaacgaaaacctctaatcccggccgtctcacgctagactgtgcctatgccttctagctctcaagccccagtcagctctaaagcacaagcatccgccgcaactgcctggaaaatcatcgtcgccgtcttggtggcggtactgatcctggtgttgttggcggaatttggcgcgcgttatttcattggtcaacaactgcgcgcgagcttccgtgaagacatcgaggcccaaggcattgagatgaccgaagacccagaagtctccttcggttccagcccagtgttgttcggcctggtcggtgggaagctcagcgaagtcaacatcgataccccatccacgctgcagcaggatgccgagggcaactacaagggaatgcccgcctcacacgtacacatggaatccatggcgcttgaatctggggaagcagaattcctgcgcacccgctcggagcttcccgacgagtacctcactcacaccatccaagaggggctgcgggaacaactcggtggcgccgcatttttgggtgagctcgtggtctcagacatctcaacggatcacgaagccggtaccatcaccgtgaagtttctgtccggcgctgcgaatctgacgctgcgcccactggtgggggacaacggaaatgtctctttcgatgcttctgaagcaaaaatcctgggcttttcactcccggagggcgccgctgacggtatcgcgaattccttgaaccaaaacctgcgcgaggctaccggtgggcagttggatatcactgcaattgaattcaatgaccacggtttggtaatcaccttggagggtcgcaacgtgaatccttcggatatgagcaaagagcttaacgcaacgccgggggccaatcctggtggttcgggcaaggacgctgaacaggatgccggagcaaattcgacggcaccagtccgtaaaagttaggtagatgcactgttaacctagctttggctagctaagagtttttatttttacgagtagccccaacgggtacaggaattaccgccaagatttgcttggcggtttctgttttttccaaggcctttttgttggctgcaaggtctgcggattccgcaaccagccactccactaatgaagaatcagcagccggggattcagctagctttgtacccgctcccatgtccaaaactattggaatgcgatcaggcaactgctgcgccgttgtccattgtgccgggtacttcgtttgggaagttactacgagttgatccaccttcgcgaaatcacaagtagataccaattcgccacgccgggtttccggcttccacgtttcctcccctgccagctgccccgactgctgctctaacagctgccccgactgctgtcccgctgctgatgcagactgctgctttggcgctgatgcagactgctgctctggcgcggaataatccggcaccaccacgccgagttgtgccggggcgggtacggcttcccgaaggctaatcatgtcgctgagaagggcattagcgtcagtattactcgtgtccacacaagcccagacacgatgcgctccttgcgaaaccgccagccgcgcctcagatgcttttaccaaaatatggtggcgccccgtcgggaaaccaactgccgtgatgatcgttaacacggaggattcatccgcatcgtcgtcgtaatgatctccaccgtgttgccgcacgtatctgtccagcgtttttgccgctgtcgctacgtgattcgggctcacaacaaccgccccaacccctgcagcaatagcggcggccacaccattgcgcacttcagctaagccgacgtgcggggcgcgaaaatcccacgcaagaaactgatgtaaccagttttcttccatcttttagttccacatcatctgctgctatagggcgaagcgcacaggcctaatcccagcgatattcgccgttgatcaaggctttgagcgaagggcgaacgtcaaaccagtaaataccgataaccaccatgccgacccacggcaaaatcggaatcggcatcggcacgataaatgcggaggcagccaacatcgcaacccacaccatctttgattggcgggaatccg

SEQ ID NO: 3984 - DNA, 21224 bp, synthetic construct
  misc_feature 1..21224: note = Synthetic
  source 1..21224: mol_type = other DNA
cggctgccacaccgaggatttcccgtcgggggctagatatatgcttccggagcatatactttccggaaacctacaggtcaatccgtgaaaatccgcgattccggacacactttttgacccttaacccattatttttaaccaaggttggccttagttggctggtccctccccgttcaggatccgctgcgcgtccgtggcgctcagctcgtacccgtagaacgttgagtaaaattgctgggtttccgcgaccaggtcgacgtcctcgaacttttcggggtggaacagcttcgcggcccacagcagctgcaacgcctcctccgccgagtagcggtcccaattcgacgtccccaccgggttcttcaccacgttgccctgcttcaccgcgggcacgttcgccagcgcagggtcctgcaccagcttatcgacgctctgctgcgcctccgtaccgcccacaatgatgaagtccggagcggcgtcgacaatgtcttgcgcggtgacggttgtgacgtccacaacgtcctccaccacattgcgagcccccgtcgccacaatccactccccagccagagagtccggcccgctggcctgcgtcacgtcctctccgccgacgatgtgcagcactttcggcttcttctctcccgacatcccgcccaggcggtccgcgacgatcttcaggttgcgctccatgtaggtcacgtactcggtggccttctggtcggcctcctcagtgcccagcgcgttcgccgtaatacgtaccgacttcatcagctgttcaaagtcgtcaaagtcgactcgtgccgccgggatcccctgcgcccgcgccgcctcaacctgctccttcgaggaggtcaggagcatttccgggttgatctctttcagctcttccacgttgagccgggttcccgacgccggcgtcggcaactcggtgacgtgtgggtagatcttcgtcagccacggcagctgcttcgcttcctcggtggtggccaccagggtgtccccgccgccgagcatcagcacgaactgattgttcacgtcccatgtgtccgccatgcgcgtcacctgcttcggcacccgcacgtccgtgccgtcgatgtccgtgagcaagcgggtggtctcctcttgggtggtgtgggtcgtttgctcggttgtattgtcagctgagttgtctgctgagttttcggcggtgcacccggtgaccagcagtgttgcggtcaacaacgttgcggctacggcgtggtgacgcataggaaaggactccttcttcaaggttgtgattacgccagcagtgtacctatcgacgcccccatccccgaacccgcccctccccaaaaccaggaatttggtgctcgtctcctggggtgagtgacaaaagacgcaaccactaacatctagtacatttatgacctgcgggaatgtggagcgcggaatttaaacatgcgtcctttgtcactggagccccaaagagaaaaagaaaggagtgaacctcctgcgctctcgcactcgaaaatgggggggtgttgagtgctcaaccggactcggggggaatccgtgggcaggaggctcaactcttattatagcgaagttttcactcttgtaaagtctgcgcgaaaaactcaccaacactgcaggtcagcagctattttagaacggcagttttactggcaggtcgaagggcaataggtccttgagtggccctgctacgacggcggcaatggcaccgagtgctgcaaggacgccgagggcgatgcctgcggccttgagtttgtcttcggtgtcgatgttgaggcgggagctcagatcggccttgccgaaggtcaggtcgaggttcgcgttggcgtcagttggggtgtcgccgactttcaacccgagtggtgtgatgccgatgccgtaggtgacagggcggtccttgatggagaagctgggctgtgcggggtcgatcgccttgtcgagctggaaggtgccaaggacgacgtcgttgtgttcccgctcaaggagggtgccggtttcgatatcgccggtgatggtggcgttggtgcctgcgatggtgattttgatgtcgtcgatgtcgaccttggggggaacggtgccgtgcagtttcagttcgccgtcgaagtggaggacgccgttgccgttggcgtcgaggcgggtgtcggcaacgtcgagggggaaggtgaccaggttggtggttgggttgaaggtggcttggtccttggcgtagacgccggctccggtgacgaggttggcgttcttgttcagttcttgcagcagggactgcttgatcggccaggtgaaggtaccgctggcgacctgggtggtgccgagtggcagggaggagccgtcttcgatagcggtggcttgtggggcgatgagcgcggaggcggcgatggcaattgcgacgccgttggcaagtgcagtgttcttaatactgggcgtatcgccctgagccacctgttctgttacacggcttccgccaccgccttcgcgacggccggcgccacccgcgggtcgagcgcctctgggacgatgttgtgggcggtgggggcgtcgataagtgaggcgatggcttcggaggcggcgagcagcatggggcgggtgatgtgggtggcgccggcgtcgatggcgccgcggaagatgccggggaacgcgaggacgttgttgatctggttgggcatgtctgagcgccccgttgcgacgacccctccatgcctccgcgcgacttccggttcgatttccggggtggggttggccagcgagaacaggatggggtcgggtgccatgaggaggacttgctcttcggtgatgtggccgcgggacagtccgatgaaggtgtcggcgtcgcggagggcgtcgtcgacgctggtggtgatgttgcgggggttggtgcgcgcggccagcgattgcttgacgggggtgaggccggcgcggtcggcgtggatggggccctgggaatcgaggacgatgatgtcgcggatgccggcgtcgagaagcatgtcgacgcatgcgatgcccgcggccccggcgccggagatgaccacgcgcaggtcggcgagggtgcggttgaggacgcgcgcggcgttgcgcagtgccgcatagatgacgacggcggtgccgtgctggtcgtcgtgcatgacggggatggagaggcgttcgtcgaggcggcgttcgatctcgaagcagcgtggcgcggcgatatcttcgaggttgatggctgcgaacgagggcgcgatacgcgcgacggtgtcgacgatttcctcaacatcgtgggtgtcgaggacgatcgggaaggagttcagcccggcgaattgttggaagagctgggctttgccctccatgacgggcagggatgcttgggggccgatgtcaccgagcccgaggaccgctgtgccgtcggtgatgacggcgacggtgttcccggcgcccgtgtagcggcgcgccttggcggggtcctgggcgatggcttcgcagacttccgctacccccggcgtgtagcagatggcaagatcgcgcatgctgctcacttccatccgggattggatggcaagctttccactctcgtgagctgcgaatatttcctcagtggtcggctgttcctgcatggtcgtcctctcatcaatcaaaagttggaccctatagtacagctccagggtgtcaggggtagtccgcttagccccgtgaatgtttcacgtgaaacagatgtcgaaaaagtacgcactaggataaggtggcttcaatacaaggtgtccctaaacaagctaggagcgcaggtgcaacgcgcaacaagactcggagttgtcacgctggccaccacgttggcgctggcgggtatggcggcacccagcaacgcgacgaccctcagctccgtgcgcttcacccctagcattgtggtgaaccagggcgatgttgttgaggtgggcatcgcgaagtgccaggtaggatacgttgatgcggtgtcgaaaaccgcctacgtcgcgcgccattgcttcacgcagggcccgggggaacttctgtacaagaacagtcaagcggtgggcttcagcactcgcgccgggcttatcgacgcccgcttcaaaaacgacgacgtcatggccgtcaggctctacgcggatgtcaccgcaggccagaaccctttttcgggcgacacgattgccgattatgactccctcgagtccggcatgaaggtctgtgcgaactcggtgaggcaacgcaaggtggtctgcgggcatacccagggcgcgggcgacggcgtgatcaaagtggaggccgacgagaccctcatccggggcgactccggcggtcccgcctggctcgtcgatgccgctggcaattctcttgggttcgtcggcgtcatttcgcaaacaagcaccgtcgaagccccgccgagtaagacctggtacgagtggaaggtcacgtcggtgacgaacaagtcctgcaaagccagcacggaggtgccgacgtaccttacagccaagccaggatcgtgcggcattcacgacgacgccccgggccgactctctcccctcacccaaatgcgtcctcccggccagccctggacgcggcgggtggccgacgagtttgaggtgctgtcctcgaagatcaagagtggtgacccgctgagccgacagcaggaggacatggtcttggggctcacgctgtcgatcgtgatcggcctggcagggctcggagtctacggcgcgtacctgctgggtgagcccgtgatcgcgcggttcgtggatgggctcaagcgtttacccgtcactgagcaattcggttggaaggaggactgaatatgcatagtccgctgtgggatgacttctgtgaaaaccaggggctcaccgagttcgaagatattacagacctgagtgcttctggcgtgctgagaagcctcatgatgcacaacacctcgacagaggtgacgttcgattgcatgaaatacagcggaggtaccacggacgccgagggcccgttcactgatttcacggtgtaccgtgtgcactcctatcccgctcagtctgagcacatctacttttgcgacggcgagaaaatcgaccacactggtccggaagttcgcaacaatcaactgatccaccgagcccaacacacgtcaggctgtgggtggcccactgtgctgttgtactaccagggataccctgagttttggggacacagttttaagacaccaccgtacgtgcactacccacgctcgtttacccgagcaggaaaaccactggaacaaggccgttacatcagagttgtgagctactccgacgaggagatgcaggagcttcaaatgtggaaggaagccgtcatcgatacggaattttcgatggcggtcctcttcgctcgccactacggatccgacatcgacgacgtgtggaccatgcttcacatcgacgagcggcacgaccgccggtggccagaacacaaaatagctgattatcactggtctttctagaatcgtcaccaatgtcgactcaaccgttcggttgacgtcacattcaacctgctgtgcgattactttctgtgcccgctccagcaccattgatggtgtcaatggatttcccgccggtgttggcggttgttgaaggagtgtgcaaggtgcagaagttgtacagggcagcagtgttgtatttggtgcttgggctgggcgcggggttgttctaccgcgagttcacccgcgcgaatgatttcccggagggccagttcacgcagcttggtgtgacgcacacgcacttgttggtgctcgggttcgtcatgtcgttgatcttcttggtgttggagaagctgttccgggtgtcgcggtccggcaagatgttcacctggttcttctgggtgtataacgtcggcgtgctcacgacgacgggcatgatggtctggcacggcattctcacggtgcagggcaaggagtccacggcgatgatcgcgggtatcgcgggcctgggccacattgcgatcacgattgcgttgggcttgttcatggcggcgcttggtcgctcgctgaagtctgttgagccagaatcagtaaggcgttagtgatgagcgaagtagaggtcaccacgccaacgcgtcgcgattggatcagtctcgccgttctttcggtggggctcggggttatcgttctcgacggcacgatcgttggcgtggcgttgccgtcgataattactgacctcggcctggacctcacccaggcacagtgggtgaacagtctgtacgcggtgctgctcgccgcgttgttgctgtccacgggcaagattgcggactcgtggggccgcaagcgcgccttcctcgcgggcctcggggtgttcgtcgcgggcagcgtcctcgccggcttttcgacgtccgcctcgaccctcatttccgcccgtgcagtgcaagccgtcggcgccgccctcatcatgccgtcaaccctgtcgacggtaaacgcagtgttccgcgggaagtaccgcgcggccgccttcggcgtgtggggcgccgtgatctcgggagccgccgcggtcggtcccctggccggcggtgcgctgacgcagtgggtgtcctggcactggattttcctggtcaacgtgcccattggcgtgatcgtcgccatcggcgcggtgctcaccgtccgcgagacccgcagccccgacaaactccccggcatcgacgtcgacggcgcccaactcagcgccatcgccttcggcaccctcgtcttcgccatcatcgaggcacccgacctcggctggtggacccccaaggaacccctcaccgtgttcggctggacctggcccaccaccgccccggtctcccccatccccgtggcacttgcgatctccgccgtggccttcttcctcttcatccgctgggagcagcaccgcaaacgcgtggaacgctccgcgctcctcgacttgggcctgttctcctactccaccttctcctggggcaacatcaccgccggcgccgtcgccatcggcgagttcgccatcatcttcattttgccgctctaccttattaatgcgctgggcctgtccgtcatgtccgccggcctggtcctggccgcgatggccgtcggcgcattcctctccggggccgccgcccgccacgtcgccgcccgcttcggcgcgccgggcaccgtcctgatcggcctcgccctcgaggttgtgggcgtcatcatcctcgcccttgtcatgggcgccgacaccagcggctggctcatcgccgccccactcaccctctacggcctcggcctgggcctggcatcggcgcagctcaccggcaccgtgctccaggatattccggtgcagcgctccggccaaggctccgccacccaaagcaccgtccgccagatcggctccgccctgggcaccgcggtctccggctccgtcttctcgatggccctcgccatcgccctccccaagaccctcacggccgccggcatcaccggcccccttgccgacgccacctccaccgccacccgccaatccgcgggctccgccattacccaactccgcatggagggcacagccagcgcattcggcgaccaaaccgccgccgtcgtgcaggcgctcagcgagggcatggccgacgccgcccgctggtccctcctcgccgccaccgccttccttgccctcgggttcgtcggcgcgctgcaggtgcggagggcggcaaagtgaaagcatgcttggtttcttaaatcggcggaaacgttttgggcgcttctccgctatacacggctcataaaacgtgtcagtaatcgcgcatgatgagtatgagctccgtctcattatgtacgttgtgtgtaattcagccaaataatctggtatcttgaaagggaactgaacctcagtaaaataccgactcgctttcggtattgaatgctccagccggtcgtccatcggacgcccggctttttctttcaaaggaacatattgtgaagaaatacaatatcggtatcgacgttggtactcactctgttggctttgctgcaattgaactcgatgaacaaggtatcccttgcaacattttgagtgcaatgtctctcattcatgactccggggttgatccggattccaacaagtcaggcattacaaggcttgctgtttccggtgtagctcgacgcactcgtcgcctctatcatcgccgaaagaagcgttcgattcgcctggataagttcctagcatcgcttgggtggccagttgtaccgtttgaggagtacacggacccattcttgccttggacagcccgagctcaactcgcaacgcgctacatcgagaccaaggaggtgcgtgaggaaaaactctctattgcgattcggcatattgcaaatcatcgcggatggcggaatccgtattcgaaagtgtcggcgctctatgcgccaaaagggccgagcgacaactttgaagaaattcgcgcacaactctctaaaaagctgcacgttgatattccaagcgatctaactgtcggccagttgatctcctttgccaaggtcggtgaagatcgtttgcgtggcggaggaaagcgcaaggacaaaaagaaggcgcctgaggacgtcaagcaaacagtaatctctgctcgtctccaccaaagtgatcttgcccgtgagatcaacaaaatctgcgaggtgcagcgtatcgacgactccctccggaaagaattgatcgaccatgttttcgcagcagagtcaccaaaaggggctcaggctggaagggctggcaaagatccccttcaacctcatcttgtcagagctctcaaagcttctgatgcattccagcgctaccgaattgctgcgctgatcgggaatctcagaatccggacagaagaagaaaaacacccgcttgacgtgccacagcgtcagctcgtgtttgactatcttctcaatcttccgtcgtcgactgttccttcttgggtgtccgtcgcggaagtgctcaatattgaccgcgggagactcgttggtactgcaacaatgactgatgatggtgaacgtgctggggcacggccaccagtacatgacacggaccgcctcttatcctccaccacagtgaagccgctgaagctttggtggaaatcggccacctcagatcaacgagttgccatgatcaaggcgctttcaaatgctgaagttgatgattgggattctgaagcaggtgcctccgtacaagcgtttttcaccacgctctcagaagaggatcaggaaaagcttgacagtgttcacctgccgattggtcgcgcagcctacagcgaagatacgctgcgccgccttaccgagcgcatgctacaagacggagtggacctatacgaagcgcggcgagtggaattcaatgtccctgctgactggaccccaccagcgcctgaagtgggtgaacctgttggcaatccggctgtagaccgagtgcttaaagccgtggcacggtggactgcagctgccgagcgcgagtggggtgcccctcagcgaatcgttattgagcacgtgcgaagcggcttcatgagcgtagctaaagccagagagctagagcgcgagaacgaaaagcgttacaagcagaatcaaaaaatcgtccagaaaatgcacgagaagctcggcattgagaacgctgtacgccgtgaggatatctggcggtttcagtccgtacagcgtcaaaacggctgctgcgcctactgcggtaaaacaatcacatatttcaccgccgagatggaccacatcgttccgcaggctgggcctggttcgtcgaatatacgggagaaccttgtcgcagtttgccaccaatgcaatttggcaaaggggaacattccttttgcaacgtgggcgagcaagtgcggtatctcgggtgtgagccttaaagaggcactagatagaacccgtgattggaatgaggactcaggtctttccagacctcagttcaaaaaattcgtatccgctgttcaaacgcgtcttcgccgaacaagctttgacgaacccttagataaccggtcgttggagtctgttgcatggatggcgaatgaattacgggcgcggctcgcacaagaaatgaagaagcatggcacgcgtgtcaatgtttataggggtgaattgacacacgaagcgcgtctcgcatctggtatctctggcaaattgcagtttatcgacggccctggcaaatcccgtctcgatcgtcgtcaccatgcgattgatgccgcggtgatcagcatgacaaccccgtacgtcgcagaggtgttggcattgcgcagaaacaagaagcgtgctcagtacttggctaagcaacctcctcagtggaaagagtacgagggcgatgatactgcgcaccagattgagtggcggaagtggaaaactcgcatgtataagctttccgaacttctggagtcagcgcttctgaaggaccaaattccggttacttccaatcttcgtctccgcccaggaaacggtcgagctcacgaggacaccattggtgcactggacaagttacgggtgggtgatgcgctcacaccggagcagattgaccgagcagcgacagaagcactttggtgcgcactgacgtatcaccctgattacgatgagaaagaggggcttccagccgatcaaaacagaaggattcgagttcatgggacgcacctcgatgcaagtgacaccatcgagttcttccctggtaagcctggtaaggacggcgcgggtgcggtcaaggttcgtggcggttttgccaaactgactcgtttccaccatgctcgtatataccgaattacgacaggtaagaaaccggtgtacgcaatgttgcgtgtgtatgaccacgatctggtccgccatcgaaacaccgatgttttttcggtagaactaccgccacagaccatctcgatgaggcaagctgaaccgaaacttcggaaagcgctgcaggaaggtacggcggaataccttggctggttaaccgaaaatgatgagctcgtgatcgatgtatcagggttcaacaccggccagatcagcacactccgacacacatacggtgacatctcacgctggcgtgtcgatggatttaaccatcgggcgaaaattcgccttcgcccattaatgatgtcagcggaaggtttgtgcgatgatgcgccaagtgatgtcaagaagcttatcgatagtactggatggcgagcggcagtgaatgtggtgttttcttctggcgaggtttccgtcatccgaagaaacacccttgggcaagagcgttggttctccaagggtcatctcccaatttgctggaaagtcgagaatgacaaatgaatcccggctggagagtgattgactgcacacagctggtcggttctctgcggtatgaacgcggtcaattggttgtaattaacagtcaaaccgatacaactacgaagcttccgatagctcagctggcggtagttctcgtaggagtgcaggtgtcagtctccggagcagtcctagccaaactaggagaatacgatgttgccatgctggtctgtgactggcggaacgtgccggtctcgggcgcctatccttggtcgacacatactcgtattggtgcccggaccaatgcgcaagcgagtatgtcgaaaccagcaaggaagcgagcgtgggctgcaattattaaggccaaaatcgctggccagatagtcactgcacatgcattgaccggacaggtcgatgccagacttgctggttatccagcattagttctttctggtgataccacgaacatagaagcgcaagctgcacgtcattactgggcttccatctcagggcaagagttttcgcgactaccgggttccggcatagacttttctaattctgcattggactacggctataccgtgttgcgtggaatcggaattcgtgccgtctgtgcggctggccttagtggtgctttaggtgttttccatcgtggtagaagtaactgcttcgctctcgtcgatgacctgatggaaccattccgtcctttcgttgactatgcggtgttcggcgaactagatactgcaaaggattttggtactttgcacaagcaacacctcgtcgagtacatcaagacagcgccattcatggccaacggtgagactgtttccactgtatttgagtcgttcgcgcagtcatttggcctttacgcggagggaaacatcactaatcttgctgtcccacagtggaaaggaccagctgatgccagcgacggggagtgagcccatgtggtgtgtagtgatgtttgatcttccagtaaagactgccaatcagcgacgtgaggcgaccaggtttcgaaatgacttgcttgacttaggcttctgcagagcacaatacagcgtctacgtgcagtattttccgttagcttcaaggatttcgtctactgtcaaagctttaaagctgggtcttcctgttggtggcgacattaggatcatgtcagtgacggatcaccagtggtcgaaaactattcgtttttctaatgctaaggagagcacccccgaggaacagccgtctcaactgacaattttttaacgcgggcacgctgaaaacaccctgtttggacgccatttttcgagggacctgaagtctatcagggtgtttgggaactgaaccccagcttaataatgagcggggggaaaacttgcagaagtctatcagtgtgtttgggaactgaaccccagcgtctcgtcataccgtcgtgtgctccttgggaagtctatcagggtgtttgggaactgaaccccagcacttggcttcgtctccctcgtcgttttcgaagtctatcagggtgtttgggaactgaaccccagctgggtgcgatccattcgctgcgacggatgaagtctatcagggtgtttgggaactgaaccccagcggagagagtttaggacgtttctcgaatagaagtctatcagggtgtttgggaactgaaccccagcctgaccaggacttgcaaacctgctcggggaagtctatcagggtgtttgggaactgaaccccagctattgtccgggtcgatcgtgcgcgattcgaagtctatcagggtgtttgggaactgaaccccagctcggtagcggtgtgtgtttgctcagtgtgaagtctatcagggtgtttgggaactgaaccccagcactgcccaacggtgcttcactcaagctggaagtctatcagggtgtttgggaactgaaccccagctatttcgggccctttcttttcaagatttgaagtctatcagggtgtttgggaactgaaccccagcctgtccagcctggtgagtcgtagatcaggaagtctatcagggtgtttgggaactgaaccccagctggcatcaacctggtggaagccgtgagtgaagtctatcagggtgtttgggaactgaaccccagcagtcaaacccgatatccgcgaccgtctggaagtctatcagggtgtttgggaactgaaccccagctgccgacaacatcatcagctgcaaggtggaagtctatcagggtgtttgggaactgaaccccagcgcttcgcgccccattcggtcgtgatttcgaagtctatcagggtgtttgggaactgaaccccagctgcgcgctggcatgtggctgcctggtgagaagtctatcagggtgtttgggaactgaaccccagccacctgacgcgccgaacgtaggcgcggagaagtctatcagggtgtttgggaactgaaccccagcggcgggaagaattcgacccgtccactccgaagtctatcagggtgtttgggaactgaaccccagcccgcgcccgcggggatgagcctgatgagggccagattagcaggctttacatacaaaatgtccctaaagcccttaagcccaaaaacacacccccaaccaaaacagcccgcgccgtaccgtagtaccgcgcgggctgccccaccatgggccccaccaggccctttaggttcgggccccaccagacccgaaaggaggtcgtcacgctgttgctgtcgtcagagactagcaatgagacagacaatggtgactgaccgtgttccatcgtacccggttggtgtggagggggcgaagtgggcgtcgaaacgagtggtacgagtcacaaaagatgcaattctgttcacgaatttccgagcaagcttttcatcactacccgctcctctcaaagcccgcttcaacaacgacgcctacaatcaaactttccacttccacaatctgaaaaggaccgttcatggaccttctaaggctcctcagtcggcatgcgcgcccgtaccgtggtgcgatgctcgcggtggtgttgctgcaggcaatcacgactgcggtgacgctctacctgcccagcctgaatgcaaaaattatcgacgaaggcgtctcccaaggtgacgtccccttcatttggcgtaccggcggcgtgatgctggccgtggcgtttgtgcaggtaatcgcggcgtgtgcggcggtctggttcgggtcgagggccgcgatgggcacgggtcgcgatatccgcgaggaggtgtttggccgggtgtcgcgcttctcggcggaggacatgtcgcacttcggttcggcgacgctgattacgcgcgggacgaatgatgtgcagcaggtccagcaggtgttcttgatgttcctgaactttatggttgcggtgccgatcatgatggttggtggcgtggtcatggcggttcgggaggatccggggatgagctggctggtcgctgtctctgtgcttgtgttggcggtggtcgtggcggcgctgatcggtctgctgcttccgttgttccgttcgatgcagtcgaagattgaccgtattaatggtgtgctgcgtgagcagatcgcgggcgtgcgtgtggtgcgcgcgtttacgcgggaggagttcgagtccgagcgtttcgacgccgccaatgccgacctcacgcggttgagtctgcggatcggcaatttgtttgtgatgatgttcccgctgatcatgctggttttgaacctggcgacggcagcggtcctctggtttggcggccaccgcgtggatgcgggtgaggtgcaggtcgggtcgttgacggcgttcttgcagtacctgctgcagatcctcgcggcggtgatgatgggcgcgttcatggcgatgatgctcccgcgcgccctggtgtgcgcttcccgtattacggaggtgttgaagcacgagccgtcgctgatcgagccaccggccagcgcagccagcgcagccgccccgacaaacagcaccaacagcaccgtcacgttcgaggacgtgaccttcacgtacccgggcgcggaggagccggtgttggacggcatttcctttcaggccaatcctggcgaaacaaccgcgattatcggttcgacgggttcgggcaagtcgacgttgttggggttgattccgcgcctgtatgcgccgacgggcggtcgggtgctgcttggtggtcgggatgtggcgtcgttaagccgtgctcaattggtggatgcggtggcgatggtgccgcagaagccgtatttgttttcggggacggtggcgtcgaatttgcgtgtggccagcccggatgcgacggatgagcagctgtggcgggcgctcgagatcgcgcaggccaccttcgtggatgacctcgagatgccgatttcccagggcggcacgaacgtgtccggcgggcagcgtcagcgcctctgtattgcgcgcgcgatcgtggagcagcgcggtgtcctcctcttcgatgattctttctcggccctcgatatgaccacggatgcacggttgcggaagacgctcgccgagcacgtcgccgacgcgacggtgatcgtagtggcgcagcgtgtcagctcgatccaaaacgcggaccagatcctggttctcgacgccggccgtatcgtggcccgcggcacccacgatgagctgctggagtcttcgccgacgtatcaggaaattgttcgttcccagcagactgtggaggcgaactaatggccgtgcaccaaagtaaggaccacgtcgaactcaccgacgaggaaatccaacagcttgagggctccatgggcggccatcacggtggcgccccgcgctccgcgaagaacttctggccgtcggcgaagcggctggtcgggttgctggccccgcacaaggcgatgtttgcgctggtggtggcgctggtgtgcgtgtccgtcgggctgaatgtgtacgctccgcgcgtgatgggccacgccatggacgtcatcttttcgggcgcgatcggcgcccacctgccggccggtgcgacccaggagcaggtgattgaggggttgcgcgcgggcggccaggacacgttcgcggacatgctttccgggatggatgtgacccctggtgtgggcgtcgatttctcgcgcctcggcgagctgatcctggcggtgctggcgctctacgtcggcgcgagcctgctgatgtggctgcagggtttcttgctgaaccgcatggtcatgcgcgagatttaccgcctgcgtgcccgggtggaggcgaagctgaaccgggtgccgctgagctacttcgaccgcggccagcgcggtgacatcctgtcgcgcactacgaacgacgtcgataatgtgcagcagacgttgcagcaggcgctgtcgcaggcgttgcagtcggtgttgatggtgctgggcatcatggcgatgatgtttacggtgtcgtggcagctcaccctgcttgccctcgtctcgattccgctgacggcgctggtggttggggtgatcggtaagcggtcgcagcggcacttcaagcagcagtggcgcgcaacgggccagctcaacgggcacatcgaggagtcgttctccggccacgaggtgatcacgctcttcggccgccaggactcctctcaagaaattttcgacgcccgcaaccacgacctctacaccgcctccgcctccgcgcagttcctctctgggctgatgatgccggtcatgcagttcatctcctacctgtcctacgtcctcatcgcggttttcggcggcctgaaggtggcgaatggttcgctgacgctcggcgcggcgacggcgttcatccagtattcgcgccagttcaaccagccgctcggggagctcggcggcatggcccagatggtgcaaagcggcgtcgcctccgccgagcgcgtcttcgaattcctcgacgcccccgaggaaccccgcgagtcacaccccacccccaagcgcgcctccgggcacgtccaatttatcgccgtccacttctcctacaccgacactcccctcatccaggacctcaacctggaggtgcagccgggccagaaggtcgccatcgtcgggccgaccggcgccggcaaaaccaccctggtcaacctgttaatgcgcttctacgacatcgactcgggccagattctccttgatggcgtcgatacgcagtcgatgtctcgccaggacttgcgcagccaggtcggcatggtgcttcaggacgccaccctcttcgaaggcaccatcctggaaaacatccgctacggccgcctcgacgccaccgacgaggacgtcagcgccgctgccaaagccacccttgtcgaccgtttcgtgcacaccctccccgacggctaccacaccgtcatcgaccaggacggcggcgccctctccgccggcgaacgccagctcatcacgatcgcgcgcgccttcgtgtcgaagccgtccctgctcatcctcgatgaagccacctccagcgtggacacccgcaccgagctgatggtgcagcacgccatggccgccctccaggccgaccgcaccagcttcgttatcgcccataggctctccaccatccgcgacgccgacctcatcctggtcatgcaggacggccacatcgtcgagcaaggcgatcacgcctccctcctcgcccgtcgcggcgcctactgggagctcaaccaggccggtttcgccgaggactagcctgcctggccccctggtcccagtgacaaaagacgcaaccctaaatcatctagccattcaaacgtgcaggtagaaaaagggctatgtgttaatgagtgcgtcttttgtcactcagcccacccgacgagacaccaaagcccctaccctgcccgggtgcaccacattttggcggggtcgaggtggatgtggacttcgtcgccgggggcggtgtaggcgagtggggcgtcggggtcgcagtggaggacgattctcccgtaggacgtttcaatgccaacttcttgatattcccccatgtagacgctgcgggtgatttggccgatgttgtcggtgaggtggcgggcttgttggccggtgggtgtggcggttgcgctggtggggtagccgatggcgacgagggtgtcgttggtggtgagggtgggttcggctgggatggtgtggtgttggccgaggagggtgacgtgtgcggttgctgtgccgtagtgggtgtgggtgatggtgccggtggtggggatgaagatggtggcgccgaggtgacgggcgatttcgacggtggcgggttgttcgcggaggtcttggggtgcggcgtcttgggtgatgtggctgttggtgaggtagatgatgcggtcggcgatggagaaggcttcgtcgatgtcgtgggtgacgtagagggtggtgctgccgagtcgttggtgggtgcggaggatttgttgtttgagttgttcggatgagtatgtgtcgacgtgggcgaggggttcgtcgaagagcatgagggtgggttgttggacgagggcgcgtgcgagggcgactttttgttgttggcctgtggagagttggtgggggtagcggtgtgcgaggtcgtcgatgccgaggctgagcatggcgacgttgacggcgtcgtggttggcgccggtgaatcggatgttgtcggtgatggtgaggtgtgggaagagggcggggtggtccatcatcatggtgatggggcgtttgtggggtgggaggtggtggatgggttggccgtcgatggtgatgtgtccgggggcgttggtgagtccggcgagggctttgagcatggtggttttgcctgctccggagcgtccgaggatgacgatgagttcgcaggggtcggcgtcgaggttgatggtgttgaggaggttgcggatggttattgctgccatggttggtggtcctttcgccagtgcgtgtcgacgcctcttcggttcccgacgccaccgatgccacccacgccgccgactccgactccgacgatggctgcgatgccgacgatgaagagggagacggtgatgctgatggagagggctgcggggtagtttgcggcgtcgagaagcatgaagagtcggaggatgagcagtggtgtgtcgggtgtgctgacccagagaagtgggacggcgaggacggtggtgttggagaagacggcgaggaatccgaggatgagcaggtgtgcggagcgtggtaggacgatgctggtggtggcgcggatggggccgacgccttggaggagcgcggtgaggtattcgccttgggacatgagggggccgatgtagacgaggaggaagtaggtgatggcgagggagctggggaggcaggcgaggacgacggcggcgaaggatgctgccgggttggctgggttgtccagggcgggttgggtggcgatgatgcggagtccgcatccgatggttgctccgggggcggtggcgatgagggcgaaggtggcgtcgataagtcggcggccgatccagccgaggtgggtgccgctggtggcgcgggcggcgagtgctgtggcgctgagggcgagtgagcagatgaggacgatgaagctgaggccgacggtgttcatgacggcgtcgccgattgggggttggccgccttctgtgatgccgcggtgggtggcgagggtgaggaaggtggcgctgaacgcgatgccgcaggcgaggatccattgcggggtgcgcgtggtggcgccgacggcgtgttcgcggcttggtgtggtggagtgggtggtgcggatgagttggatgaggccgggcatgcgccgcaggagccgcacgtagtacgccgcggcgaggccgaatgcggcgaggattggcagggtgaggaggagtgcgagccaggcttcttcgctttggttgccgtaggagtgtgagctgaaccagatggtggtggcggcggtgggtgtgcgtggggcgatgatgtttggggtgatggggtcggagaggatggcgctgaagatgaatacgcagatggcgggagtgaagagggcgaggcgcggcaggtagatgaggcggaagaggctccagccgtgggcgccgccgaggcgtgcggcatggatttcgcgggcgtcgatgggggcgagtgcggtgcgttgcgcgaagtatgcgagcggcaggaaggaggtgatgaaggtgaaggtgagggcggtgactccggtgaagtcgtcggtgaggggccatgggagggcgccggtgcgcccgaggatgactttccaccctgcgccgatgacagggtgtgggatggtgagctggaacagcagcatcatgtcgagcgtgacgacgcccattcgcccacaccgcgtggctgcgagggcaccgatggtgcccagcgccgtggttgccagggtggcggtgagcgcgataacgctgccggtcaggagcggagtgaggggcagtccgtggagcgcgctggtgtcggcgagcgccgtttggatgagcgcgccgtagggcagaccgagcacgatcacgaagattgtggtgatcgtcgcggtggctccgaggacggccttcatggctgctcccctgctgtgtcggcgaaccaggtcatccaccgttcgcgttctgagtcggcgaggtcggggcggatggcggtgatgccgtcggtggcggcgagcacgtcgctgatgttgcctgcgacggcgctgttggtggggatttgtggtaggccgacgcgccgggcggaggtctgcccgctcggtgagaggagccagttcatcacgatccgcgcggcggccttgttgctgccctgggcgacgatcccgccggaggcgatctcgaaggatgtcccttcggcggggtaggtgatggtcaggggcgtgccggcgcgggtagttttgttttggcagtacggctcgtacgagatagcgacggccgcttcgccgtgcgcgacaacgtcactgggggcgttgccggaccgggtgaagcggtcgatgttgcgcatgatgttctggatctctgcgggttcgagccctgcggattgcatgctcagcagtacggcgtaccctgtgccggaggtcagcggcgatggcgcggaaacccacccgttgagatcggggcggagcaggtcacgccaggtggtgggcatgtcggtgcccaggtttcggaagacgtcgg

SEQ ID NO: 3985 - DNA, 21141 bp, synthetic construct
  variation 14701..14800: note = note, n is a, c, g, or t
  variation 16402..16501: note = note, n is a, c, g, or t
  variation 15394..15493: note = note, n is a, c, g, or t
  variation 15079..15178: note = note, n is a, c, g, or t
  variation 16088..16187: note = note, n is a, c, g, or t
  misc_feature 1..21141: note = Synthetic
  variation 15774..15873: note = note, n is a, c, g, or t
  source 1..21141: mol_type = other DNA
ttcggtctgtgcggtctggtccatagcagcccagtctagcccgtgccctaatttccgccgcggccgttgccgttattgccgccaaagatctcgttaagaagatcgtcgacgttatcagcgccctcgcccaagtcgctgggcaacgaggtaggcagctcccgggtgagatccggcgtctccgtcactgtctcggtgacggtctccgtctgggtctgcgtgacggggctcggggtgtccgtcaccgtcgccgtggccgtctgcgtaatggtctccggagcaggcggctcctggtttgcggcgcgcgtatacatataggccaacgccgcgagcgcgatgagcgccaacacgagcaggccgacgagaatgcccgtcaagccacttcccgaggagcgctcctccggcacgtcataggagcgcggcggctcttgccgtggtgcctgctgggacgccggttggggtgccggttgcggtgctggctgctggtactgatagttctgatactgcgactgcgctggctgcacacgcgtctcgtcttccgggaagacctggcgcggacgctcgaactgctgagtctcgtcgctcatccgctcgttccggccattattgggggtgttagtaggcatgtataaagaggtacacggtcaacctgtgagtcggctgaacagtcatcccccttaaaagcatgcataaatatgtaaagcgtcgagtcttccgttattgacagactgaccgtcctagtgtgaactagccacttagcctaggaccgagagatgtgctgacctcccactcccccgcgatagctaaagcccacaccccacccaaacatggaaatttcgtacaggtaccgagagtttgggtcggctctgggcgccaaccccacaccacaccccacccgtactgtggattgctgtacagaatccgtgagttcgggtggggtttcggcatgcgcgtggaacctccacgctgctggctcagtccaataggtcatgacgatctacacgacgcgacaactccgagagctcggtacaaccaagactcgccagaacaaggcggtagccgatggccgactcattaaactcaaggccggtatctactcaactacgggaagcctcgccgacatcgcgagtccgtatcccgaaggcgcggtcaccggtctcaacgccctggccctccatgacttgacggaagaatctcgccccgtcttcctgcgcgtgccgcacatcagaacgccattggcgaattcacacatccgcctcatccgctccgaggccccaagcagatccatcaacgacataaggacagtcaacgtcgcgcaagccctctctgacgcgctcgcccatgagaagctcgagaatccgggaaatctcctgctcaatcactacacaggcgtccgcggcggtgagcgtctcgaagcagatttagcccaactaaagcgccccagcgccattcgagaacttgcgtttaaggcaggcgtgggcaccgcctccaagtgggaacgcacaatgctgtttcacttgcgcaaggctggcctcgagcctgtgcccaatttcaagctcgaggcctattactgggacctcgccttccccgcagcccgcgtcgtcatcgactgggattcgctgcattatcacttgccgcacaacaacaatgacaccttttatatcggcctgtggaaatccattcaggccgtgcagctcggctgggcgcctctgaaattcaccgatacatgcacgaactatcacttcgagttagtgcgcgacgttatcaaggagaccgttgcacaccgcaccacactgcgcccgcactcgccggtcccggggacgttgaagagtccggcctggcaattccacgaggggattagttttggcacaagcttctagagatactgccagctctcgcggacacggttgaaccaccagtcgcgacgctcagcagaggcggccaactcagtgaggcggtcctccgacggcgcggggtgctccacgcgcaggaagccgtccacgagctcgcgcggcggacagacgtcctcgataaagagcgagccggtggccaggccggcggcggccggggtgacgtcgatgtcttcatcgtcgaggatcttggggagcgcggccacggcagcgaggcccatggagattcccaccgacgtgtcgagcgccgaggccaccgtgatgtccatatggtgtgcacgcaagtcgtgggcgatctgcaacagtcgcttaaccccgccgaggggcgcggccttgaccacggcgacatcggcagcttgaagttcggcaacgcggtaggggtctgcgaccttgcgaatggattcatcggcagcaacgcgcacaaaaagcccagagcgcatgaggcgcgagcggacctcggcgagttcctcggcggtgcggcagggctgctccatgtagtcaagcggcatgagcgccttggcggcctcgatggcctcgtcgacgctccagccgccgttggcgtccacgcgcaggacgggaacgcggcccatgtcgtggactgcctcgcgcacggcctgaacgcgcgcgacgtcgtccgcgagcgtctggcccggctcggcaaccttgattttgaaggtgcggcagcccggatagcgctgcatgacctcgggcaccatctccgccggcacggccggaatggttccgttgacctcgacctcggagcggacgggcgaagggaagccctcgtacgcggcctcgaggccagcggccagccagtgcgcggactcttcggggccgtattcgaggaagggcgcaaactcgccccagccggcgggcccctcgatgaggagagcctcgcgggtggtcacgccgcggaattgtacggccagcggaagggcaaccacgcgcgcgcggtcaaggacgtcgtcaacgttaatctgcatacgacccagaataatgcaccccacgaggtgcgactggtccacacagggtgataacctaaccaggaaaggttataacaaccgcggttagccttctatcgctcctcggagccccaccgccagcagcgcatgccaggcggcagctcttcgtaccagtgaaggaattgacttaccgtgctctatctcatcatcgccctcgcggccatcgcggccgtcgtgtggctcatctataaaaaggttcatgcggccgccgccatcttcggagtaggcgtcgccctcctcatgctcgccgcactcaccggccgcgcagacatgcgcaccaccgaaatcgaagccaccggcaacgccttctacgaccagctcctcgtggtcgacgccctgttcaaggctcgtttcagcggcatcggcatggcgattatggtgctcttcggcttcgtgtcctacatgcgtcacatcggcgcggacgcgaagaccgtcgtcgtgctctcctcgccgctcaagcgctttaatggctcctattggttggtgcccgtcggcttcgtcattggctcgctgctctcactcgtcatcccgtccgccgcagcgctttccctgctccttgtggcgacacttctgccggcgctcatcgccgcagggctcacgccgctcaccgtcgccgccatcgtcgtgacctcctcgaccatcatgccgacgccgctcgaggctggtctcattcaaggcgcggatctcacggacatgtccgtcaccgaattcgtctacggctccgtcgcccgcgccaccgtgcccaccctgctcattaccgcgttcgtccacatgtggtggcaacaccgctgcgacaagtcggaccgcaagcactacatggaagaacacgccggagaagccaccgaggagagcgaatccgaacgcactgcccgcgaagccatcgagcgcgccgccggactgccgggtttctacgctgtcctgcctctgctcccgctgctacttatcatcatctcggccattctcaatcgcaccggcgtcatccccttcgaggctgacatcctgcctgtcacggtcgtctccctcttcattgcgatgatcatcgaggctatccgcggccgctccatcgagaccgccatggactccaccaagtccttcttcaagggaatgggcgaaggcgcagccggcgtagtcgccctcctcgtggccgccgcagtcctcgtcgagggcattacccaaatgggcgtcatcgacatgctcatcgacgccaccaagggttcgtccggcgccgccgtcattatcgtgctcatcttcgtcgccgcgaccgccgcgatgtccgcgctcaccggctccggcaccgctccgtacttcgccttctccgaggtcgtccctggcctcgcagccgagacgtccattcacgcgccgcagatgctcaccgcgatttggggcacctccaacctcatgcgccaggtctccccggtcaatgccgcggtcctcatcgtctccggcgccatcaaggtcaaccccattcgcctggtcaagcgcacttctgtaccgatgatcaccgcgaccatcctcaacacgctcttcgcgttcatgtttattggataatcgtgtgtaacgatacgctccccacagaccacaagcgagggagaaaggaaaggaactcaccatgttgttagctgaagccctcgccgagcgcgccgaagcccaggcccgcctcgacgaactacgctcacgcatcgtcgccgtggcccgcgtccaagagggcgataccccggacgaggatccggcagagctcctcgcggaggcggaacacctcgtggaccgcatcgacgagctggtcaaagcaatcaacgcaacaaactcggccaccgcgttcgacgctgagcgcaacctcaccgcggcgctcgcggaccgcgacggactcatccggcgtcgccgcctgcttgccgatgccgccgaagccgccgccgcgcgccaagaccggttctcccgcagcgagattaagttcgtctccaccctcgacgtcgcggcgttgcgaaagaagatcgacgaagtctccaaggcctaccgggagctcgacacaaagattcagcagaagaactggagcaccgaagtcgtctaaacgtagttggtagtccacgccaccccacatcagcgagcgcacctcggccttggacgagaaaacccaaggattctgttggcagcctggtagcggagcaggctgggaagttcaagtcttcccaccgtattgcgcagtccgccgcacatgtcacaggagcacaagcgggtaacaaccccgcgcaccgctcacatatcaccaccaccgcgctgggatgagggaacgtggacgagggttgggcaaggggactacacgttcaaaacagcggggacgcgatgacgcgtccccgcttttcgcatactcacggggtctaaatcacaatcacttgcaataagtgtcgggagtatgtacatttttcaatgttcaacagattgaactctttacttcaattttagagaaatgagagatacgcacgtgaaacgcattcctgcgctcgtcaccctgtgcgccgccgcgctggccttgagcgcgtgttcgagcgatgcgagcgccgacaaaccgaaggaccacctcaccgtttttgccacgacgggctacctggctgacgccgtgcacaacatcgcgccggacgccgagatcaccacgatggtcggcccgggcggcgacccgcacacgtaccaacccacgacgaaagacatcgaggccatgcagtccgcggacctcgtcgtgtggaacggcctgcacctcgaggcacagatgatcgaccaactcgagtcgctgggcgacaagcagatcgcggtcggcgacaaggtggaccaggcgggtctgctgccctggccggagcgcagcgcggacggcgagaagctctacgatccgcacatctggaacagcccggagctgtggacccaggtcgtcgacgcgctgggcgccaagctcggcgaggtcgataaggacaacgccgccgcctacgtccaggccgcggatgactatgagaagcagattcaggccgccgaggacaaggcgcgtgccgagctggaaaacgccacgccccgcgtcctcatcaccggccacgacgccttcaactacttcggtaagaccttcgacttcgagattcacgcgacggacttcgtgacctccgaggctgcgaagtccccgacggaaatctcggagctcgccgataccatcgcggagaagaagatccccgtcatcttccaggacaacctggcgaacccgcaggcggtgacctccctcaaggaggccgtgcacgcccgcggctggaacgtcacggtctcctcggaagagctgttcgcggacacgctgggccccgacgccccgaatgacacctacttgggcgcctttgagcacaacgctcacgccgtcgcggaggcgctcaccaaatgataagacttgcaggtctcaccgtcgcctacgggtacacaccggtgctcgaggatgtagccattacctttcgcactggagcgatgacggggctcattggcgccaatggcgctggtaagtccactctcatcaaggcggcggtgggcctgctacccgctcccggcgcgcaaatcgacatagacggcaccgtgggctatatgccgcaacatgcagatatcgattgggacttccccgccacgcttattgacgtcgcgctcatgggccgcacgccccacctacgctggtggcagtggccgagccgcaacgacaagcagatcgcggaccacatgctcgaacgcgtcggcctagctgacaaacgcaacgatcccatcagcgccctgtccgggggccagcgccagcgcacgctgcttgcgcgcaccctcgcatgtgagccggacatcctcatcctcgacgagcccttcgccggcgtcgaccaacagagccaggccacgatcacaacaatcctccgggagctgcgaaaccagggcacgaccatcatcctcgtccaccacgacctcgccgaggtcgccgagctctgcgatgacgtcgtcctcgtggcgaaccgcaaaatcctcgccgcgggccccactgagaccactctcaccgagtccgccatctccgagttgtttagtctgccatgatcctcaccgagctcttcaccaactacacctaccagcaggcactcgcgggcaccgtcaccatcggtgcgtgcgccggggcgctcggcccgctggtctatctgcgccggcaatccttgcttgccgatgccgtctcccactccagcctgcccggcctcctcatcgcctttgtcacggcgaccgcgcttggcatgaacggccgcactgtcggagtcctcgtgtgcggcgccgtggccaccggactgctcgccgtcgccgccatccacaccctcccccaggtcacccccttgaaacaggatgccgtcatggccgctgtgctcaccacgttcttctccgtgggcatgctcatcctgcagtacgtctcgcgcacgccgttgccgggcaaggctggcatccaggacttcttactcggcaacgcctcgacgctcacccgcgccgacgtcgttacctccctcgtcatcggcgtgggcatcctcgtcgtgcttgccgtcgtgcacaaccatcactccgtcatgattttcgatcccgccttcgcccgcgtcaccggcacgcgtacaagaatcatcaacacactcgccttcgtcgccatcacggtcatcaccgtcctcggcgtcaaggtcgtgggcgtcgtcctcatggtcgccgtcgtcgtgagccccgccgccgcggcccgtcagtggatccaccgcctccccaccttcataggtctcgcctcctttctcggcgccgcctgcgccgtcctaggaactgcactgtcaatccacttcgccattcccaccggccccaccatcgtcctcgtgcaggcggccgttgtcgccgtgtcgctcgccgtctccccgcgccgccgggcggtgatcgcatgagtctcgcacttgccgcctgcctcctcgccgttgccacggctctcgcctgcgcgctgcccggcgtcttcgtcgtactcaagcgcgaatccatggtcatcgacggcatcggccacgcggtcctgcccggcatcgccgtgggctacctgtttactgcggacattgactcgccagtcctgctcgtgacggcggcatcggcaggcttagccgtcgccctcggtacggaatggctgggacgctccggcctgcttgcgggcgatgccccgctgggccttatcttcccggcgctctttgccgccggcgtcatcctcatctccacgcgcatgagccacgtccacctcgacgtgcatgcggtcctggtgggcgatctcaacctcgtcgcgctcacgcatccgggctacgcgctcgtcatggccatcatcgcgattctcaacgtcactttttgtgccgttgccctcccgcggcttacaaccagcaccttcgatcccgccttcgcacacagcgcaggcctgcgcactcgcggactccacgtcgccttcatggcgctcgtctcactcaccgcgacggccgcctttcaggccgccggcgccatgctcgtcatcgcactcatggtcattcctgcgtgtgccgcacgcctgctcaccacgcgcgtgatgaccatgctcgccaccgcgtgcgggattggcatcctgggtgccctgggcggattctggttggcctatcacctcaacgcggcgacctccgcaggcatggccgtcaccaacgcggggctgggtgtcctcgctttcctgatctcacggctgcgaacgactagatttgtcagtcatgagcgagcagagaacttacagcacggacaacccgttcaagccggaattgtggactaaggtccccggcttcgaggacctcacggacatcacgtatcaccgcttgatcggtgagagccgcgccgacggcatcgtccgtatcgccttcgaccgcccggaagtgcgcaatgccttccgcccgcacaccgtggacgagctctaccacgtcctcgaccacgcgcgccgcacccccgatgtgggcacggttctgctcaccggcaacggcccctccgtgaaagacggcggctgggccttctgctccggcggcgaccagcgtattcgcggccgctcgggctaccgctacgcggatggtgagaccgcggacaccgtcgataccgcccgcgagaaggtcgagggcggccgcctccacatcctggaggtccagcggcttatccgcaccatgcccaaggttgtcatcgccgtggtcaacggctgggccgcgggcggcgggcactccctccacgtcgtctgcgacatgacggtcgcctcgcgccaggaggcccgcttcaagcaaaccgacgcggacgtgggatccttcgacgccggctacggctccgcctacctcgcaaagatggtgggtcagaaatacgcccgcgagatcttcttcttaggccgcacctacgacgcccagcgcatgtacgagatgggcgccgtcaacgaggtcgtcgaccacgccgaccttgaagacgccgccatccagatgggccgcgagatcaatatgaagtcccccaccgcccagcgcatgctcaagttcgccttcaacctcaccgacgatggacttatgggccagcaggtcttcgccggcgaggccacccgcctggcctacatgacggacgaggccgtcgagggcaagaacgccttcctcgagaagcgcgacccgaactgggacgagttcccgtattactactagtcaggttccacagactgccatggtttatctcgccatcgccttcgccgtcgttgccctctgcggcatcatcggcgcccgcgtctggatgatcaaaggattgcgcgacgcccgcgacacggacgagcgccctttcgatcacgacgatgatctgcgaaatccctaccaatagtaaggattgtaagcgactgtccagaaccgcgaatctttcatcaagttttttatcaaaatgggtggatgaaatatcaacattggtctaaaatctcattttagaactgaacctcagtaagcgctggctagtttccagtggcgaatgctccagccggctccctcgggagccggcttttctcataaaggaatatccatgcctatttcccctgcccccacccgctatcgtgttggaatcgatgtcggcacctattccctcggtatgtctgcaatcgccatcgatgacaatgattatcccgtcgagattctgagctcgttgtctcttatccacgactctggattggatcccgaccagcaaaagtccgcgatcacccgcctcgcatcctccggagtcgctcgacgcacgcgccgactctaccgccgtcgtcgtcgccgcatgatcaaactggaaaagttcctgtcggcccaaggctggaaaactattccctttgaacaatactcggatccttacttgccatggaaggcccgtgttgaactagtcaatgagttcatcaccgaccccgatacccgcggagaaaagctctccattgctctccgccacatcgcgaatcatcgtggatggcgcaacccatatatcaaaactgtttcactctacaatccgggcgactctagcgatgcttttcaacaaatccgcacggaacttgaaaaacgagtaggccataagatccccgaaaatgtgaccgttggacagcttattgctttcgccaagtttggcgaggataggctcagaggcggcgggaaggctaaagatcgcgcaaaagaaaaatctggaaacaccgcggccatcaagcatgcgatcatttcagctcgtcttcaacaagttgaccatgcacgcgaaatcaacgaaatctgccgcgtacaaaaaattgacgatgacctccgcaagaacatcatcgatttggtcttcgctgcagagtcacccaagggcgcccaaaaaggacgcgtagggaaggacccgctgcaaccaaccaagaaccgtgctttgaaggcttccgacgcatttcagcgttaccgcatcgcggcactaattggaaatctgcgaatccgcaacggagaatccaagagtgagctctcccacgaacaacgactgctcgtcttcaattatctgacaaatctcgatcataagacggatgcatcgtggataaacatcgctgagctgctcaatatcgaccgcggcgatctacttggcaccgcgacaatgacgtcagatggtgaacgcgcaggtgcccggcctccagtccatgacaccaatcgcgcaatccttggatgcaaggttaagcctctcgccgcatggtggagatccgcatcatgtgcagagaggcaagcaatgctcaaggccttgtcgaacgcagaaacagatgacttcgattctcctgctggcgcagttgtacaggcattcttcgcagaacttgatgaagaagaacaaggaaaactagacgcgctgcatcttccgatggggcgcgcagcctatagcgaagacacacttgtccgtactaccaaacgaatgcttgacgaaaatctcgaccttcaccatgcactgcgcgcagagttcggcattcccgaggattggacgcctcctgcaccacgcatcggagaaccagtcggaaatccagctgtcgatcgtgtgttgaagggcgtcgctcgttggctcgaggccgcagccgctgaatggggagcccctgaatcgattgtcattgaacacgtccgcgacgggttcgtcagtgaagctaaagcccgcgagatagatcgagagaacaatacgcgcgccgcacgcaatcaacgattgttccacgagatgcaagagagactcggcgttgacggcataacccgaagttccgacctgtggcgctatcagtccgtacaacgtcaaaattgtcaatgcgcttactgcggatcgactatcacgtatcaatcatgcgaaatggaccatatcgtacctcgagctggagaaggttccaccaacgttcgttccaacctcgtggccgtttgtcatcgttgtaacctcgccaagaagaacattcctttcgccgtatgggcagctaaatcgactattcctggagtaagtctcaaggaagctctcgagcgcacacgtcactgggttgaagattccggacagagcaagaaggacttcaataaattccgcgatgaggtttgtcagaggctcaagcgcacaaccttcgacgaacctctcgacgctcgctccattgagtccgttgcatggatggcgattgagcttcgcggtcgcatagcgcaaaggtttgctgaggatggaaccaacgtagctgtctaccgcgggaagatcacagccttggcccgtagcgcttcaggcatttcgggcaagcttcggtttatcggcgggacgggaaagtctcgtctagaccgccgccaccatgccgtcgatgccgccgttgtagccttcgtcaaaaattacatcgcagaaactctcgtaaaaagagacagcatgcgccgcgcatctcatctcactcaaggcacctaccagtggaaagaatttactgggtcagatgccgcacaccgtgccgcctggaatgcatgggttccgcgtatgcaaaagcttgcagcactgctgcaacaagcgctcgacgaagatcgcatagttgttacatcgaacttacgtctgcggctcggaaatggccgtgctcacgaggacacaatcggcaagctgaagaagattcgtctaggaaacgcaatcagcgttcaggacgtcgatcgtgcctcctccgaggcgctttggtgcgcgttgacacgtgagtatgacttcgaccctaaagaaggtctaccggcaaacgagacgcgccggatccgagtcaacggtacttggctcgaagctgatgacctcatcgagatcttccccgtgggagcaggtgctattaaggtacgtggtggttacgctgagctcagccacttccatcacgcacggatttacaaaattccagggaagaaaaagccgagctacgcaatgcttcgcgtctatgacgtcgaccttgccaagcacaggaacgaagatctcttcaccgtggagctcaagcctcagaccatatctgttcgacaagcggaatcgaagctccgtgctgcgctcagcgatggctctgccgaatatcttggatggattgtcatcgacgatgaactacatattgacactgacgcattcgcgacagggcagatagctgcaatgcaaaaagaattcggcaaacaaactcgttggcgcgtagatggatttttctcgtcatccaaactccgtcttcgcccccaattgatgagtgcagaaggactctccgacaagaattcggcagagtccaagaaagtaatcgaacgtccaggctggttgcctgcaatcaataaggtgatcgagctaggcaatgtcaccgtcattcgccgtgattccctaggccgcgtgcgactaacgagtgccgctcatttgccggtgagttggaaagtgggttagcaacatgaacgctggatggcaagtactggattgcatcaatttaaaagggtcaatccgctataagcgcggacaacttgtcgtccaaaccgacgactcggaaaggatctttccgttagcacaaatcgctgttgtgctgatcgggatccagacaactatttcgggctccgtcattgcaaaattgagtgaatacgatatcgccttgcttgtgtgtgactggcgctctatccccaccgcaggcgctgttccttggcgggaacacacccggattggagcgcgacaacaagctcaagctcggctttcacttccgcgcaaaaagcaagcttggtcgcgtattgtcagtgcaaagatttcgggtcagaatcgaacgctagcagccattcaaggatcaccgtcaaaactgctttccgagctagctagaacaattcgctcgggtgattccgacaatttcgaggcacgcgccgcccgccattactgggctgcgctctcgggggaaacaaagttctcgaggtcaccgggcgtaggaggtgatgcgtggaattctgcgcttgactatggatacacgttgctgagagggtacggtatccgtgcaatttgtgctgcaggcttggtcggcactttaggactattccaccacagcagaaacaatagcttcgcattggtcgatgacctaatggaaccttttcggccgatggtcgaccagattgtatttgaaaatcttgacattagagatgaattatcgccgactttcaaacaacagttatcgctcggacttacgtcaaaatttgactcgtcaggaaagtcagtcccgtctattttcatcgactttgcccaatactatggtctttatgttgaaggcgaagtcgaaagcttgagagttccgatctggtcaggtgagttaaatgccagcgacgggaagtgaacctgtgtggtgcgtggtgatgttcgatcttccagtgaagacaaaacctgaaatgcgcgccgcaaatcgctttcgtaatcagcttctagatctaggcttctgccgagctcagctcagcgtttacgttcaatacttcccgctagcttcgcgagtttcgaccactgtctcgcagatcaaaacggagctaccccatggtggagacatccgaattctatccgtcaccgatcaccaatggtccaaggtaatccgcttttccaaacatgatgaagttccaccagaagaaaaaccatctcaactagtaattttttgacagcgatcgacaaataacccccaggtaattagccattttcaggccaacctgaagtctatcaggggttttgagaactgaaccccagctttctcactcgcgggccgcgccgccatggaagtctatcaggggttttgagaactgaacnnnnnnnnnnnnnnnnnnnnnnnnnnnnnnnnnnnnnnnnnnnnnnnnnnnnnnnnnnnnnnnnnnnnnnnnnnnnnnnnnnnnnnnnnnnnnnnnnnnnatcaggggttttgagaactgaaccccagcctgacggcacccgccgtaatctctcgctgaagtctatcaggggttttgagaactgaaccccagcctgctcgaagccgggcgcgtaacaaccagaagtctatcaggggttttgagaactgaaccccagcaagtttgtataccccgcgtacagggtgagaagtctatcaggggttttgagaactgaaccccagccggtagaggagctggagaaggccaaagagaagtctatcaggggttttgagaactgaannnnnnnnnnnnnnnnnnnnnnnnnnnnnnnnnnnnnnnnnnnnnnnnnnnnnnnnnnnnnnnnnnnnnnnnnnnnnnnnnnnnnnnnnnnnnnnnnnnnatcaggggttttgagaactgaaccccagcccagacaccgcgttgaggttaccggcgggaagtctatcaggggttttgagaactgaaccccagcatgtttttcagcttgtcgccatgcttgcgaagtctatcaggggttttgagaactgaaccccagcttgaagtccgtcgcttgcggggtaggcagaagtctatcaggggttttgagaactgaacnnnnnnnnnnnnnnnnnnnnnnnnnnnnnnnnnnnnnnnnnnnnnnnnnnnnnnnnnnnnnnnnnnnnnnnnnnnnnnnnnnnnnnnnnnnnnnnnnnnnatcaggggttttgagaactgaaccccagcacaacctcaccctgaatccgcgcgtcgtgaagtctatcaggggttttgagaactgaaccccagcacatgggttcggtgtcccaatcggccacgaagtctatcaggggttttgagaactgaaccccagccaaacgagaaagaacagtttgagaacgagaagtctatcaggggttttgagaactgaaccccagcctgtctggggttagtgtgtggtcttgtagaagtctatcaggggttttgagaactgaaccnnnnnnnnnnnnnnnnnnnnnnnnnnnnnnnnnnnnnnnnnnnnnnnnnnnnnnnnnnnnnnnnnnnnnnnnnnnnnnnnnnnnnnnnnnnnnnnnnnnnctatcaggggttttgagaactgaaccccagcgactcgctgcgcgcagctggcacgcagagaagtctatcaggggttttgagaactgaaccccagcctcacctggcggtagctgccccgtctgcgaagtctatcaggggttttgagaactgaaccccagcacggtatggagcgtccatgctcgagcttgaagtctatcaggggttttgagaactgnnnnnnnnnnnnnnnnnnnnnnnnnnnnnnnnnnnnnnnnnnnnnnnnnnnnnnnnnnnnnnnnnnnnnnnnnnnnnnnnnnnnnnnnnnnnnnnnnnnnatcaggggttttgagaactgaaccccagccgtcgcggtagacgtccacggcctccaggaagtctatcaggggttttgagaactgaaccccagccggtggtccactcttcgtggaatgcttgtgaagtctatcaggggttttgagaactgaaccccagctgctgtcgcaggagtccatcatgggtatgaagtctatcaggggttttgagaactgannnnnnnnnnnnnnnnnnnnnnnnnnnnnnnnnnnnnnnnnnnnnnnnnnnnnnnnnnnnnnnnnnnnnnnnnnnnnnnnnnnnnnnnnnnnnnnnnnnnatcaggggttttgagaactgaaccccagcccaacagggtcttaaagcggaacttgtggaagtctatcaggggttttgagaactgaaccccagcagacggctatacggcccgacccctttttgaagtctatcaggggttttgagaactgaaccccagccgttgtaggtgagcttcatgcctacggtgaagtctatcaggggttttgagaactgaaccccagctagtcctttcggtcttgtgcgcccaggtgaagtctatcaggggttttgagaactgaaccccagcctggtcaccggcttatagccgtgagcctgaagtctatcaggggttttgagaactgaaccccagcaggagagccgtactgatgtggcggtgccgaagtctatcaggggttttgagaactgaaccccagcctggtcaccggcttatagccgtgagcctgaagtctatcaggggttttgagaactgtggtttctcaatacagatgatccaacaagctaccgacagcattcaaagttccagtaccttccctagaatttcaacccggctgccatgacatccacccgtcaatggatgaagcaaccacaatcactttatcttttagatgagaaatatccgactaagttagacaccccatcacttcaagtataaagtcactccccatgaagtattccggcatttccgtatcgaccatgaacctcgcgagctcgtttgtcatgctcgccgctcgcctcatcgtgggcatcgtcctcgctgcccacggctggcagaagttcaccgagtggaccatcgcgggcaccaccaccgccttcgagggcatggacgttccggccccgggcatcgccgctccggtcgcggccatcatcgagctcgtcggcggcatcctgctcatcatcggcctactcacccgctgggttgctggcctcgtcgccgtcgacatgatcggcgcctgggccatcgcccacgccggcaacggcatcttcgtcgacggcggcggctgggagctcgtcggcatgattcttgccgcagccctcatgctcatcgccgcgggccctggcatgcactccgctgaccagttcatcgcaaaggcgcgcgcccgcgcctaaacacttactgctcgcggtagcctacataccgtgactcatcttctcgccccgctatctgttagtctccgcgacccgtcggccatcctggacgatctggagacagcgatagcggggcgacattcctatgtgcccgtccccgccgacgataagacgaaggcagagctgctgcgcaaccacatgcgagtcggcgaacccatcgccgaggacatcgccctcgtcgtccccacctccggctccacgggcacgccgaagggcgcacaacttaccgccgccaacctcgtcgcgagcgccgatgccacccacgagcgcctcggcggccctggccagtggctgctcgccatgcccgcccaccacatcgcagggatccaggtcctcgtccgctcgctcgtcgccggcgtcgagccgctctgtctcgatctcagccacggcttcgacgtccccgccttcgcgaaggccgcagccgagctcgccgccacaggcgaccgcatgtacacgggactgacccccatgcagctcgccaaggccatggattccctccaaggcatcgacgcgctgcgcgaattcgacgccatcctcgtcggcggcgccgccacgcaccctcagctcctcgaatccgcccgcaaactgcgcattcgtcccgtcaccacctacggttcctcggagaccgccggtggctgcgtctacgatggcgtctcacttcgtgatacggaaatccagatcgacgatgacggtcgcatcctcttgggcggccccaccatcgcgcacggttaccgcaatgtgcattccgatgccttccacgacgggtggttcgccacctccgacgctggctacctcaacggcgacaccctcaccgtcaccgggcgcctggacaacatcatcaattcgggcgggctcaaactccaccccgaggccctcgagcagctcctcctccatatccccggcgtcgacgccgcctgcgtcgtgggcatccccgataagcgcctggggcagatgatcgtcgctgcctacaccggctgggcctcccgtacagacatcctcatcgccctcgacgacctgccccgctggcaggtgccgaaggacgtaaaacgcctgcccgagatgccactcactggccccggcaaggtcgaccgccgcgccgtcaccgccctttttcagaaagcatagacacgacccacagcttttactaaggttacgggagtgaaatttgttaacttctggggccgcgcgaagacagccatgctcttcaccggcctcctctccctcgccgccccaatcgccacccccatcgccactgccgcgcccctcgatgatctgcagcacatgagcagccaaacggcaaaccagctcaaccgagccgccgccgacctcaccgcgcaggtcaacgagcagctcggcgccatccccggaagttcccaggcgcaacttcctgccgcgccggccccgcgcgtgggtaacgcgaagcccgccccgttcttcgtcaacggcaccggcggccaggtcttcactcagtccaccggccgcacgcggcgctacctcatcgagatgcccacgcactataacccggcgcgtcccgccccggtcatcttcggcttcgacggctggcgcgatagcccggagaatttccgccgctactcacgcctcaacgagacgggtgcagcgcgtgaggccatccgcatctaccccgagtccatcaaccacggctgggagggcgcgccctacgcggtcgtgcgacccggcgaggacctcgcgttcatcacgcaaatcatcgatgagctcgaccgcacctacaacgtggaccgccggcgcatctacgccacgggtcactccaacggcggcggcatgaccgcggtcgtcgcgtgccacctgccccacgtcttcgcgggcgtggccgccgtgggcggcgcttactacgaccccgtcaacatgaattgccggaacgaggccatcccgttcctcatcatgcatggcaccggcgacacgatgatgttctatcacggcggctaccgccacaacggcgcgcacttcctcgacgtggaccacctcatgagcagctacatcaagcgcaatgcctgcgcgttcccgccacgcatcgagaacatccccggcggccagcgccacgtctacgcgtgtgcgaaggaagaactgcagctcatcacgaactcacagaatcatacgtggaatcggacgccggacgcgtcgcaggaggtgtggaacttcctgtcgcgccagcgcctctaatagcccgccacacggcgtccacgacgaggaagaccacgagcgagatgccaaagagcggcgcgataatggcgtagatgaccaggcacagcacgagcgtcaccagcgccggcttcgagagcttgccgaagccctgggggcccgcgaagcgccgccccctccggaaccacatgacaaggcccagaatgctcacgacgagcagcgcgagcgcgataagcgccagcacaatctgattgaccagtccaaagaggaagcccatgtggagattgataagccactcggtgagcttcgccgcgagcggccactcagagaaattgacacgctccacaacgtggccgtccaccacggcgatggcgtcgttatggaagacaaagggagcgcgcgcctccgtgatattccacgcggcaccgttcggctgcaggttgaggattccgcgcagcccagcctcgcgcgccacgtcataggcgccatcaagcgacgcaagatccggccccatgtccatgtgctccatggaacccgcaccgtgaccagcatgctcgctggccgaggccgagagctgcggcgccttccagtggagcagtgtgcgtagcttgccaatgttcccgccggccacggaggaccatgtcagtcccgtcaccgtgaggaagagaaatccagcagagcacagggcacccaaccacgcatgcgtgcgcagcgtgccgcgagtgcgcttccggcggccaagccagagcacaagtccgccgatggtgagtgcgcccatccagctcgcggcgagctccgagtagagccggcctggctcgccgagccacagcgagcggtggccattggatagccacgcgcgcagcggcagcgcacgggagctgccgtactggaccttttcgccgcgcacctcacccgtcgccgggtccacgaagaccgcgtgcgtgtagctcttcgagggcagcgcgtcatccgcaaagagcacgcgagtgttctcccccgggatgacctggacggtgttgagcgcgagatccggatacacctcgcgcgctgcctcgacctggtcctcgagcgagacaactgcttcacccgagggccgggtgaggtcggcatagacgatcttctccaggctcggcgcgagcgcatagagcacgcctgtgagcgcggcaacgatgagaaagggcgcaacgatgacgcccacgacagtgtggagccttctgagaacgccgaagctcctcggcgacaaatgaattattgaaatcacgtgtcagttgtcgacagggaaacccggctcttccggttttagagtgcattgattag

SEQ ID NO: 3986 - DNA, 17989 bp, synthetic construct
  source 1..17989: mol_type = other DNA
  misc_feature 1..17989: note = Synthetic
cgcgggcgaaaacaccgccgtcgccgaacccaccaggcaggcggccacggccaacaccagcggaataggagcgtggaggatgaaatggttggttattattatgcaaatccccgcacccccaaggatcgtggacgaaagcatcagcggtaatggccgatgcttgtccgcccatattccggcggggatccccatgaccacgatagccagcgtcatgcacccgctcaccagggccgcataaaacggcgactgggtgagggccagcgtgtaggcgaaaaacgcgaagctggacacgctatttcccagcgtgctgacggtttgccccatcatgagcaggcgataatttttatcggaaaacagtatccggttgtcgctcattcgcctcccgccactaccccactgttctacggctattccaccgcggccagggcggcgtcaatgtcggcaatgaggtcatcaagatcctcaatgccgatggaaatccgcaccaaatcccggggcacctccagggtcgaacccgtcacggactggtgcgtcatggtggccggatgctccaccagcgactccaccccacccagcgactccgccaaacagataagccgcgtggccaaacaaaacgcccgggctgccgcctcgtcgtggaaccgcaccgaaatcatcgccccaaagcggcgcatctgcctcaacgccacctcgtgacccgggtgggtttccaacccggggtacaaaaccgcctttaccttgggtgactgctgcaaatgccgggcgatggcctcggcgttgtcgcagtgccgatccatgcgcacagccagcgtcttaataccccgcgcggtcaaataggcgtcgaacaccgaggggatcgcgccggccccgccctggagaaacgccaactcctcgtcaagctttgcggaattcgtgaccactaccccaccgaccacgtcggaatgcccgcccaaatatttcgtggtggagtgcagcacatggtcggcccccagcgccagcgggttttgcagatacggcgacgcaaacgtattgtccacaaccaactgggggccgtcgagcagctcggcaaccgccgcaatgtcggtgattgccaacgccggattagagggggtctccaaccacacgagtttcgtgtcgggcgtgatcgcggcggcaatggcgtcggtcgaagtagtgtcgacaacggtgtaggtaatgccccactccgcaaacaccgaatcaatgagccgaaaggtaccaccgtaggcatcgtggccaaaaatcaaatggtcacccgggcgcagcaacgtgcgcagcagcacgtcggtggcggccatgccggaggaaaacgcccgaccataagtggcaccctccagcgcggcaacggttttctccagggcggcaatggtgggattgccgcagcgggtgtattcgtagccgccccgaagctcgttcaaaccgttttgagcaaacgtggtggaggcgtagatgggggtattaattgccccataaagggaatccgggtcgtaacccgcgtggatgctagcggtggcaaacccctggggcttcggtgcactcatcggcgacgctccttgaacaatgtcgtttacggaaaagttcacgattggtagacaatcctttccgagatactagactaagcggtccactcgcgtcgattcccaacagaaccgggtgaataaaaccacccccaacccgccctatagggccagaagattaatcccgctgctgtgataggctgacccgaagggagcgtcgacccgcacccatcgactattccgcgacacccgcaaatgccgcggaatggcggccggggcatccatgccgggaatcagccccaaggcggtgagcgtaaacaccaagcgcatggggatctcggtgtcatcattgacggtaatcaccgcctgatccatgagcgactgcggcggacccaacgggcccgaaaactgccgggccagggcacgcccctggtcgctcagccgctgcaccacatcggcggggatttcatcaagaagctcaaagccggtagtcggtggcagcgcacccatcccccaccccgcatccatggccacggccgtcatggtggtgtcggtggcgtcggccaaaaggtcgctgaccagcaccgccgccccattcctagaacaggagccggcgacgcgccgggacgcgatgacggcgaagggggtggtgacgaacacgtcgaccgccgcgtcggagaccgtcgaaaagcgggccatggcccgatcctgcaacgcaaccgcgcgctgcaacaatgatatgagtccgcggccaccgcgttctatggtgagggtttcggtagccattattcgtcctcggcgcgggtgagcactttgatttccttcgcggtgatcgcgcgggggcgtgcggtcatgatgtcgatggcgacctgcaccacctcgaccacgcaacagatctgcccctcaccatccttgatttcctgccgggtggtaaacgacgtgttaccgatctcaacaacctgggtttccaccgtgacataggggttgtgcggcaacaccggccgcaaataatcggcctcgattttgcgaacaaacacactgggcatgtccatgccgcggcccacgaattcttccagcgcgaatgccatgcgggcttcctgcgccagttccacataggcggcattggtgatgtgcccgaacctatcgaaatccccccaccgaactggcacttgagcgatgtggatactactgtttgactgggtttctgccatgggtgttacatgctttcttcatcgttaagtaatcaagtgtacgcttcaatcaacataacgagtctagctgagttcttgttacggcaaaacaaaacccccgggtgcatccgggggcaatgctatttgtcacgcatgcattatgtcggtttttgcctgcgcttatcgacgcactatcgagtgagttttcggtgcgtcactcgggaaggtcgggccgcctcagcgcccagccgctcgaccttattcttctcgtagtcgccgaaattgccttcgaaccagaaccattggccttcggccacgttcccctcccatgccagaatgtgggtgcaggtgcggtcgaggaaccaccggtcgtgggagatcaccacggcgcagcccgggaagttctgcagcgcgttttccagggaggacaaggtttccacgtccaggtcgttggtgggctcgtccagcagaatcaggttgccgccctgcttgagggtgagcgccaggttcaggcggttccgctcaccacccgaaaggactttcgagggtttttgttggtcggcacccttgaacccgaaggcggacaggtaggcgcgggacggcatttcgttctggcccaccacaatgtggtccaggccgtcggacacgacttcccacacggttttttccgggtcaatgttttcccggccctggtccacgtaggacagccgcacggtttggcccacattcacttcgccggtgtcgggttcttccaggccaacaatggttttgaacagggtggttttgcccacaccgttggggccgatcaccccgacaatgccgttgcggggcagggtgaacgacaggtctttaatcaggatacggccgtcgaaccccttgttgaggtcgtggacttctaccacctgggcgcccaggcgcggcggggtggggatttggatttcttcgaagtccagcttgcggtatttctccgcctcggcggccatttcttcgtagcgggccaagcgggccttggacttggcctggcgggccttcgccccggaccgcacccactccagctcctgcttcaggcgtttttgcagcttgcggtctttctggccggcgacctctaggcgttcggctttcttctccaggtaggtggaatagttgccctcgtaggggtacagtttgccgcggtcgacttcacaaatccagccggccacgtggtcgaggaagtaccggtcgtgggtgacagctaggacggcacccgggtatttggccaggtgttgctccagccattggacggattcggcatccaggtggttggtgggctcgtcgagcagcagtagatccggttcggccaggaggagtttcgccagggccacgcggcggcgctccccgccggacaggtgggtgacgggctcgtccgatggcgggcatcgcagggcctccatggcctgctcgattttggagtcgatttcccaggcgtcggccgcgtcgagtttttcttgcagcttgcccatttcctccatgagctcgtcggtgtagttggtagccatttcctcggcgatcgcgttgtagcgcttgagggtttcaaaaatgtcgcctaggccttcttccacgttttcccgcacggttttttcctcgttcagcgggggttcctgaagcaggatgccgacggtcgcgcccggatcgaggaaggcttcgccgttagagggttggtccaggccagccatgattttgaggatggatgatttgcccgcgccgttgggaccgaccacgccgatcttggcccctgggtaaaacgccatggtgacattgtcgaggatgactttatcgccgatggctttgcgcacatttttcatcgtgtagatgaattcgcccacgtttggtttccccttaaagtgagtaagttaatagttggcttctaagggtacatgaccgtgctgcttgggtgcgagacgccgctagccaccagtgcttccgacaccggttccgcgggtgggtcgtccggcatgggttccgaatagggtgcttccggggcgggcggcgtcggcgacgcggcctccagtgccggaggtttgccgtcgtgaagcgacatggcggaaacctcaacggcgtagtgggtaatgtttttcggctcgcaattgaacctgctcaaatccgcgcccccggtatgctttgcgacgggcagtgggttgcggcaataccgcaccacataggcgcataactcaaaacccacgtagagcgcccgcaacaccaccttggtgcgcagcttgccttcctggtcgcgccattcttgcgtggtcaaataccccacgcaaatcactgggtttcctttcgacagtgactcgtgcacgttgaccgcgaggtcaccccaggtttccacatcaatatagagctggtcacgttcctcgtagtgcgcgctgttgtcggcgaatcggcgtacccgccgggaggtgcccagccgaaacctggcgaatttccggccggtgtcgaactcgcggtagaacggttcggcggtgaggtggccgatgagggtgacggtttgttgttgcatgggcaggctccttgaatcgggtcatcacgtggggttttgttgctgttacctcccactgtgcccgccggctgcccggttgtcgagggttttccgtaactcgtccggcctgtggataactttcctgcggctgccgagttatccacattattattgtgcagtcgactgcaacttctcagcctactgtgggcttttcgacgccctgcccaacccattcgggctgaaacccacaatcaggacccgttcttattcatccgcgccagcatttggttgtacgcttccaaatcctcgtcttcggtgtcgtcggcgcgctggtcgtaggccttggcctcgttccggtcctccttcaaccattgcaggaacagggcgccgaacaccaccaccagcgggaacgagccggaagcccaggcgatgccgccgcccacgtcctggtcgtgcagcaggtcgatgtcccacggcaaccctagggttcggtagaagtcttccgccagaatctgcgacagttgcatgaggtacacgccgaaatacaggtgcaccggcatggagaacaccagccaggcgaggcggcgcagcaccgtgttttcccgcggtttcgggtcggagccgatcatgtcccagtagtaaatgtatcccgacagcaggaacacccagttcataatgaggtggccggcgtgttctttcaccatgaggtcgtaccagggggtgatgtagagcacgtagaagaaggtgaggaattggatggtgttcaccgccgggtggaataggaatttgagtgtggtggattggatgaaggcttgcacccattcgtgcaaaccgggttcctccgggttgggggtggtgatggtgaggatcatttgcaggggggcgcccaacaccaggaacacggggatcaccatggacagcatcatgtgggccaccatatgcatggagaacatggccggcatgtacaggccaatcccggagctcatggccagcgccagggtgatgctgccaagcagccaccaaaaagtgcgctgccacggccaggctttccccaattgtttcaggcgatacagcccatacaggtaaccaatggtgagaaagatccccagggtggtgaacatgatgtcgaaccgccaaatggtccacacggaccacacggtcggctcaaacgtgaggtcataccccatggtaagggccatgggcgacagatccaccacccgcggtggcggtggcggggtgcgacctaaggaaaccgcaacaccaatggtggccgccatgacgagcacctcaacgacggcgatgcggataaaggggctgctatttcccgacgtcaggcgcggaatggtgacggtccggtgccaccacccgaaaatcgccaatacgaacgtgagtaccgtcttggccacaatcacccgaccgtaatcggaagtgaacaagtcttcgaatcgcacccggatggcggcgttgatgaccccggaaatggccatggcgaccatggaagtggcagcgatcatggagtagcggcgcaccgccaattgcaggctcgggcctaaccgccggccgtgggcgatgagcgccatgaggccacccacccacaacatcatgaacagcacgtgccacagcagcgagttcgtcccatagtcgtggtcgccgccggccgccgagtgcccagataatccttggggggcgacgatcaggatggcgcccaccagccacacgggctgccacatccaggtgcgcggcgcaatgagcgcggccccacccaccgcgagagcaatcatggccgaaatgagccacgccttggcatccgccacctggttaagcgccacaaaccagttcgctggcttgatggcctcggtgatcgactggcccgacacgtcggaaagtaccagcggcaccatgatgatcccgatgagtgcaaagacgagcgccgccaccgcacccgtgcgcgacgcgatgagaccatcgacggtcaggtacgcccgccgaatgtccccttgacggggggagagtaggaaacttgcgaataagaaggatccgaccgataacgcggcgagcaaccacgcccccgcccgcaggagtggcaaacctgctgtggttatggggccagggtcgggaatgcccaggacagcgagcgattccgttaagaaaccccaggaaataatcgcccccgtgacaccagcgatgagaaaaaagaggaggtataacggccaggttatccgcgctccccgactgctcttcgtttcgaccatgcgtttaagcctaacccccggtggggtaaatccagtcattgccccatcaacaaaatttcaacggcgggttaaaattgcgctaatctgtttctcgttacgcctccatagctcagtggatagagctaccggtttctacccggttggtcgcgggttcgaatcctgctggaggcacgtttgaaaccccactgccaggcgttttgccgagtcggtggggttttacgtttgtgaaacatggtgggtgttatgcaggcaccgaattcgcaggaattcgaatttttgttcgtgacggttttggtggttccaagacctgcagaagcgaactgtttttcgatgctctaccgggcccgcccgccactcgccgggccgaccagacgcaccaccaagttcgggccgccggtcccccaccaccgcggcagctatttttgtttctgaagctccgtcagcatcttctcgatccggtccaaccgctccggcagggtcgccaccgtccgggcgatttcggggatcagccgaatcttgccggcaacaaagtcgacaaaagttttgccttccgtggctttccacccggtgaaccgtggccccttggtgtcccattcggggccgacaagttggtctaaaatccagcgaatcatgatccgttcttctccttgctccggggtttccggggtgggtgttggggtggggttattgggttggcgggtgttacggagttcctgggcgtagtcgagcaccacgtcgtaggggaatccggggccggggtcggtgtggttgacttcgcgccaggcctcggagatttcggcatgcccgtgcacgccgcgggcgccggcacgaagccggtcggcgtcgataaattccaggggaatatcatacagttgcgaccagctggcgatctgctcggcggtccgccgcagctttgcgtcgtcgtcaagccagtcttcgcggctcatgcgcgcgtaaccggtgaggctgatatggaggcagcgggcgttgccggtggggccggccgcgtacggcataaaatcatctgtattgcacaaaattaaaatgccgtcggcaccggcgagcacgttatagcttgacccattggcggggtttgtttgccattgggccacggcaataccgtctcgttccggtgggcattccacggtatggacgcaaatcgactggatgctgtcgatcgaccggtagcccacgcccggcatgtccgcggtgaagtcggcgtcgtagcgcaccacgatcggcccggacgtctcgggctgcgactgcggttgcggcgcaacttcggacacgggtttttggccccagtaagggtgccagacgtcgttgacgtcgcattcgataccgtcgacggtgacctggccggcccgctgaaacaggacagcctcgctagacaattctccccatgaccaggcgattgtctgccacgccaggtgtttcccgccgcccagattagcgatcacgccatcctcgaccgcccagctaatcacgcgggaatgaccatagatcccgactctttcgcgccccaggatttcgcaacaggcccgaaaatattcgaccgccgtaacgttccactgttcgagcgtgatggcgaaatccacggcaaaaaacacgggatggttaccgcagccaagctcgtcgagtttttgtctggcggcccgggcatcggccagcccaccgtcgcggccgcgcataacgtcggaatcggcctcttttccgtattgccagacaaaagccacgtcgagaccatgaacatgaaagtcgtcaatttcggcacgttggatgggttttccgcgcatccaatctgcacgcggcgggctgatatatctcactgcgccgtcgtatccggcgtcacggacggcggcagcctggggaaccccggcgctgtaatctagtacggttgccatcgcatttcctccaattatgcaaaaccccagcatatttgctattttggggtggtagttgcgccccataatactgattggcccacccaaattgggggctctgggcaagcatctcccacaacaccttggtgttgggtagcactcaatcgcggtaataatgacgaattgtcacaccaaattgtggttagcaagatagccatgtagcagctttacgacgctctaaagtgcggaaaaataagatgaataatttataaataaccaaatatgtagcaaaaatggtacgaataaattgctcaacaaatctgggacaattttcccaaccaaatagtggaaatgtcaacattaactggggttttatctaaagaagaacttctactcccgtgaagccttgtcactcccgccactttgtatagttatttgcacagtaatttaccccctcaattaccccctatttgcgattttctaaataagccttgcgaatcaagatttttccttttatcattgcttgcagagttgaacctcagtaagtgtcggctagtttccggcgcagaatgctccagccgacggacttacctccgtcggctttctttttacgaaaggattcgccttgacctcggcaaacgtaaactaccgggtgggaatcgacgttgggtcttattccattggcatggcggccatcgccattgatgatgatggaaaacccacggaaatcctcagcgctatctccctcatccacgactcgggcgtcgacccggatagcaccaaatccgccgctactcgactagcgacctcgggcatagcccggcgaacccggcggctttatcggcggaagcgtaagcgtcttgccaagctcgacaagtttattaggtctcaggggtggccactcaaagagtttgaggagtacgaagacccgttttacccgtggcgggtgcgggccgagttggccaccacccctatcactgataagcaagagttgggcgaaaaactatccattgccctgcgccatatcgcccgccaccggggatggcgcaacccctacagcaaggtcactgccctgtataccgtgacggaaccatcggatgccttggtgagcattcaggaacagtgcgcaacggaattggggcgccccatcccgccaaccaccacagtgggccaattaatagccagcatgaatctgggcaagacaaggcttcgtggtgaagatagtctgttagcggccaggccacgacaaagtgacaatgccaacgagattcacgccattgccaaggttcagggcctttccaacgagctagtgaagcagatcattgaccacgtgtttgcggccgagtccccgaagggttcagccgcagagcgggtgggcaaggatcccctgcaacccacgaagaagcgtgcgttgaaggcatcggatgcgttccagctataccgcatcgcagcactcatcgggaacctgcggatccgcggtggcaagaaaaatcggcgtctcactgccgaggaaaccaggctggttttcgattacctgcggagcctgcctgctaagcaggagcccacgtggcagctggttgcggaacagctcaagattgaccgtggcaacctggtggggactgcgatcatgactgatgatggtgagcgcgccggggcaaaaccaccggttcatgagaccaaccggttgatggaaagcacgaagattaagccgcttgccgcatggtggaaatctgccgacgccgatgcccgggcagccatggtgaaggcgttgtcgaatgctgaggtggatgattttgattcccaggccggcgcccaggtacaggagttctttttcggtatttctgacgaggatcaggagaagcttgatggactccatcttcccattggtcgggccgcctatagcgaggacactcttgatcgcctcaccaagcgcatgattggcgagggcatggatttgtatgaggcacgacaggcggagtttaagattccgaatgattgggcaccgccagcaccggaaatcggcgagcgggtgggaaatccagcggttgatcgggtgctgaaggcaacagcccggtggttgaatgcggcggaacgccagtggggtgccccaaagtctgtcaacattgagcacgtacgggctgctttcatgagcgaatcaagtgcgcgggaacttgaccgggataatcaacagcgtgcaaagcggaatgtaaaagtagtggccgagatgcaggaaaaattaggcatcgagggccgaccaagccgtgcagatgtctggcggtttcaatcagtcgaacgacaaaattgtcaatgcgcatactgcggaacacagattagctttaagaattccgaaatggaccacatcgtcccacaagcaggtgaaggttccaccaataccagggataatctcgtcgcagtgtgccgtgagtgcaacagttcaaagtctaatatcgcatttgcggtgtgggcagaaaatacctctcgacccggtgtttctgttcaaaaagcggtcgaacgaactcgccactgggttacggattctggcctgcgtgaatctgaatttaagaagttccgtaagcaagtatgcgatcggctacggcgtaaggccaccgacgagccgattgatgcccgctccctggaatctgtggcgtggatggcgaatgagctccgctcccggattgcacaaaagttcaaggatggtgacacaaaggtccgggtgtataagggtgctttaacggctaaggcacgaagggcctcgggtatttccggcaaattggaattcgtcgatggtaagggtaagtcgcggttggatcgtcggcatcatgcggtagatgccgcagttgttgcgttcatgtcacattatgttgccgagacattagcactacggtcaaatatgaaattcgaccaggagctgcgtcgcaaagcgccccaatggcgggaatttactggctcggatcatgtgcatcaggttgagtggaccaagtggaagtaccgcatgcaggccttagcagaactattgaataatgcactcgcacaagatcgcattgttgttatgcataacctgcgtctgcggcttggcaatggtgcggcacatgaagacacgattggcaagctaacccggatcaaggtgggtgacgcaatctctactacagatattgatcgggcatccagcgaagccctatggtgcgcgttgacccgtgaccctgattttgatcccaagactggtttgccggaaaacccggatcgaacgattcggattcatggaacgcatcttacggcttccgatgagattacagtgttcccagtggccgctgcgtctgttcctatccgggatgggtttgccaagctggggagcaactatcatcatgtgcggttattccgggtaccgaatggtaaaaaatacaagtattgcctcatgcaggtatatgcagttgacctgctaaaattccgcaaagaagacctattcacggtagagctcaagccacaaactatcagtgttcgaacatgcgaagcgccactacgtaaagcactagcaaatggtactgcggaatatctgggatggttggtcagcgatgatgagctactcattgatacctcatcatttgatgctcccggaattgcaaagttgcgagaagaatatggtccagtcactcggtggcgacttgctggtttaacttcagttactcgattgaatctccggcctctttacctcagcaaagagggattgaaacctgatgtcgatcccgaaatcaaaaagattattgataatcgtagttggattatcactgtaaacaaactattcagtatcggtcacgtcaaaattatccgtcgagatgcgcttggtcggcctcgactccatagcgcagctcatctaccaacatgttgggaagtgaaatgaagaaatgagtgacagtagttggcaggtcctcgatttcagtgattttaaaggatcgctgacatataaacgaggaaatgtccatgtcaataaatatgaagatggttccgaagtagatgtgcctctcgccaatgctgctgtggtgattattggtgttgctgctacagtcagcggtgcactactgagtaagctctctgaatatgatgttgctctgctcgtctgtgattggcgtaaggtgccgatagcaggggcaatgccgtggcgggaacacacccggataggggcgcggcaacaggcacaagcagcgacaagtttgcctcggcgaaaaaacgcgtgggcaaagattgttcgggctaaaatccttggtcaggccaatacgcttttgggtttttcgcaagtaacaaaagctaaatcgcttcggaatattgctaaggcagtgcgatcgggtgaccctgataacaaggaggctttggcagctcggttgtattggtcatcgtttgcccagatggccgatttcgcccgtgatcctggttctgccactcaaggatggaattcggcactggattatacatacacaattttgcgtggtcatggtattcgggctgtcgcttctgctggtctcagcggcacattaggggtgttccaccgaggtcgtgacaatccgtttgcgctggtggatgatctcatcgagccttttcggccggcaatcgacgacttcgtgtttcaccatgttgcgtcagatgccgagctcactcctgatatacgccaccaattggttgcatgctgtgatcgtactttcttgtcggatggtcattcgatccccacggttttcacctcgtttgcccaaaattttggaatgtatgtagagggtgacacgaatgagctaactacccctgtttgggagggcccgttcgatgccaaagaagaatagcgaacccatgtggtgtgtcgtaatgtttgatctaccggttggaacaaaacaacaacgttcagaggccaaccgatttcggaatcatctgtttgaccttggtttttgccgtgctcagttcagcgtgtatgtgcagtatttaccgttgggagtgcgtctgcatatcctggcaaaaagtattaaagcagagctgcctcatggtggcgacgtgcggattttggctgtgatggatacgcaatggtcaaaaaccattcgatattccaacactgatgaaacaaaagccgaggaaacaccgagtcagcttgtgattttttaaaagagaaaatccctgatatagcctgttcaaaccctatttttggggctgtaacaagtatatcagggattattagagtcgaaccccagctacgccgcgaactccggcgcgccggcggcaagtatatcagggattattagagtcgaaccccagctacgattttgagtatcgccacagcgacacaagtatatcagggattattagagtcgaaccccagctgaccaaacactttctgcgcggacaaggcaagtatatcagggattattagagtcgaaccccagcctgggggatatccgagtacctgccagcacaagtatatcagggattattagagtcgaaccccagcttacgagccgaaccccagcaaccccagtaatcctagcaatcatccaaagccaggacccagtatatcggggtttaaaatacaaaaaccctgcaaataatcaaacctcaaccggaacatccaatctcaacttggacaagcaaacatatcaataaggaaatacctttgtgctctcccctatactaaaatcccatacatccaatcattcacagaaaaccggagcatgccacatgtcaatcattgttcgccgactcgcccaccgcgcaggcaccgtcactgggtagcggaatagctgacccctgcaacaaaccgcagctcacagcacaaggttagttgacctgcagccgaacccatgacgcacccctgagtgggcatatcatgccgcgccctattgatttccatcatttctggcgccggcgattttcccatgctttcccaaacctcatggagttcactgtgaaccaacccaacccggtgctttcggcacgccaactcacgcggcgcttccgaaacaccaccaccgtcaacaacgtatccttcgacattcaccccggccagattgtggcattggtcggcccgaacggcgccggcaaaaccacgaccgtgaaaatgtgttcgaccctcctggcgcccacatccggcacaatcacggtatgcggcattgacgccacccgaaggcgtcgacaagcgaggcgacacatcggcatcatcctgggcggcgaaaccggcttctaccagcatgcttccgtcaaagataatctactgttcttcgccgacgtcgcgggtattccaccacacagccgccgatcccgagtcgaggaaatcctcgcgcaggtccgcctcaccgaccgcatgttcgacccggttggggagctgtcgcgtggcatgaagcaacgactccacatcgcgcgtggcctgctgtctcgcccccaagtgctgcttttcgacgagcccaccaacggcctggacccagagatttccgtcgaaattcgggccctcatccgggagttagccaccgacggcgcaggcgtactactcacatcgcacctactcacagaggtggcggagctgtccgacacgatccatgtgctcattgatgggcgcatcgtcgtcaccggcggggtcgccgacatcgccgaacgagccggaatcaccgcggtgacctcgttcaccaccccgctgggcacagagccgcggctgcgggagttcctcaccactctcacccaccatgattcgattgcgcacgttacatgcgtgcggatggccacccaccacgctggcctcatcagttggtgtggcgtccccacggatgtttccgcgctggctgacgccgtgggtctgacggtaactgacgtcatgaccaggaagcccaaccttgaggaaagctacctggcactggtggggcaatcatgatttccgttatgcgaatggtgtggtttcacctgcggcagtttgcccgtgtcggatatttcgtggggttgctggtgtcgtcaaccacctcaatgtttttgctgcagctgctggcgatgcgcgccaccaccgggccgattccaagcccggatccgcagctgtgggtgcgggcggcactggtgggcatgtggtcggtgtgcacggtgtcggcggggatgattggttttcagcggatgcagggcaccctagtgcatgtgctgttttcgccccggtcccccattgtcacgctcgggccgatagtggcggccggctcctgctttgggattctggcgtttccgctggcggcgggcctggccgtcgtgtttcaccagccggtcggcacgatcaatggggttggcctgccgctctactggctggcctgtctgtcggtcagcgtggtggtggcggccacgttcgtgtttacgcgcaacgccatcgcgtacgagcccttactgctggttcccatgattgtgctgtcgggggtgttcggctccccactcccccagcttgccgcggtggggtgggtgatccccaccagccacgcgatcgcggtgctgaccacaccaaacattgacccgggccgcatcgtcgccaccctagcggtgtcggcagcatggttggcaggtggcggatggctcgcccggatagcgcttcggcgtgcaacggtggccggcaccctggaggtggcgtgatgtccgattgcaagcaatggtatgtggcgctacggatcgcccgccaatccatgccggcgctggcgaatccacgtaccgcggtggtcacgctggtcgcagcacccttgctggaggtcgtattactgctggttatcgcgctccggctgcgggttccagaaaccatcattgtgacggatgccagcctggtcgtaaccacaatcaccactatgaccggtggtattaccgccgcggtggtccgggatcgagcccaggggattctcgctcacatcatggccaccactcccctgcacctgcgctattgggtgtcgaaattcgtgcccctggctgggattgtgacggcaacaaacctgatcgtggccaccacggtactcatcgccgatccacaccataacctgcaactctatgcgttgacgctcgctggtatcagcactgccgcagtcaccagcgtgggggttagcatggtgtgcgcggccggcacgatcgtgttgcatgacccgtttcggctggccaatatcgtcaccgcggtgataccactatcggcaggcgtcctgctgccccacaccgcgtacccggcgggaatccgcgaggtgtgcgaggttctgcccggaacctggctggtggccgccctccgggagaacgcacctgccctcatgctcgtagaatgcggcgtctccgcgctgtggctggtgctgggcctggcgctcctcatggttgccggccagctacgctaccggagcggccgcacggacctgctttaggcgtcgacaagcggaaagctagcggtcgtcgacgtttttgtgcagatcaatgtggcggccaaacgtccagtcggggtcggtcagcatgcgcgccaccaccagaccggcgccgatagcgataatgcttaagcttgccgacgccgcggtgcccacaccactgtcaatgtcgccgctgttgaggtagtacacggtgcggtaaatcgcagtgccggggatcatcaccaccgacgccggcaccg

SEQ ID NO: 3987 - DNA, 15035 bp, synthetic construct
  misc_feature 1..15035: note = Synthetic
  source 1..15035: mol_type = other DNA
ggctcgttgattaactgttccagatcgacaagcccacccgcgacggtggcgatccggccgtcgctaaagtagcggcagtccgtagggatgataaacataggcgaaaacagcggtgcgtggccgttttctactagcttatcgacctccgccagcgcctgcgccatcgggggatcgttgctttctactacggtggcggggcgccccggatgcatgatccgcgtgtatagagcctgggcgtaagcaactgggtacggcaaatcaccggtagcgttatgcattatctgcttggcgattgggtgcaacacccgatcgatttcgctcgcgcggtcgtcgcggagacgaagcaccagccgccgttttccgtcagcttccacctcagtatgcatgtgtccataatcgggtttgaccgttgcgggtgtctccagccagctacgaacgcggtctttaattaccgcagttgcggtatcggcatcgaggtcttttacttcggctgccaatgtgcagaaatcagcctgcatatctcgaatcttcgccacccggttaacgcctttagccaattcttcaatgaccgttaacgaaagctcgtactctttagcagctgcgtaggcttgttcctgaccgcagatcgaccagagccactggaagtgccgcagttgggttttccggcagcggtactcccacgccatctcagctaaggaccgctcggcgatcttgtcgcataccagcttgatcacgtcgaccccccgtagggagaaggcttcgagagcgagggaaagaatgttcataccctcaccctaaaacccgcgctgtaccgcttccatcgccgaggtgaaatctgtggataacttcgttggtaccgtcaacaaaaaccggcctggcggacaaacgcccaggaagttatccacaggaaacctgagaaaccgcaaaatccgcctttcggccgcccctaactggggttagatggcatcgagggcggtgttgacgtcggcaagcaagtcgtcgagatcttcgatgccgatcgagatccgcaccatttcgcggggcacctccagcgttgagccttccacagatacgtgggtcatggtggcggggtgctccaccaaggattcgacacctcctaaggattccgccaaacagatcagccgggtgttcaggcagaaggcgcgcgcagcagcttcggagtggaagcgaaccgaaatcattgccccgtagcgccgcatctgcttcgtggcaacctcatggcccgggtggctgggcaaccccggatagcgcacctcgccaaccttatcgctggccgccagatgcttggcgacggcctcagcgttgtcacaatgacgatccatacgcaccgctaaggttttgataccgcggacggtgaggtaggcgtcgaaaactgacgggatggcaccagcaccgccctggagaaacaggagggcttcatcaagttccgccgagttggttaccactaccccacccacgacatccgagtgcccgcccaggtacttcgtagtggagtgcagcacgtggtcggcgcccagcgcgagggggttttgcagatacggggaggcgaaggtgttatccaccaccagttgcgcctgggtccctgccaccaatgccgcaatggccgcaatgtcggttaccgcaagggctgggttggaaggggtttccagccacaccagcttggtgttgggttgtagtgcttgctgcacctgatcaggttgggtggtgtctaccaccgtaaaatccacgccccaaggtttgaaaacggtatcgatcagccggtaggtacccccgtaggcatcgtggccgaagataaggtggtcacctggtttcaacaaacaccgcagcagtacatccgtagccgccattccagaggaaaacgcccgaccgtaggtagcgccttccaaagccgcaacagttttttctaaagcagtaatggtgggattgccgcaacgggtgtactcgtagccaccccgcaactcatttagcccattctgggcgaaagttgttgaagcgtagatgggagggttgatggccccgtagagggagtcaggttcgtaaccggcgtggatgctggcggtggaaaaaccttggtgcgcttggctcataacagctgtattccttctaactaactcggcaagatgattttcaagttaaacacatcacagcagcaatcaacacactacggggaaaagatgtgaataatattcttagcggcctacactgtcacctatgacttcacctgattcatttttcgccgcggtgggtggcgaggaaaccttcacgctcgtggtacaccgcttttaccagcaggttaaagaagacgacctgattggcccgatgtatcccgccgacgactgggaaggggcggaagaccgcttgaggtggtttttaatgcaatactggggtgggcctaccacctttagcgacaaccgcggccacccgcgactgcggatgcggcacgcaccatttcagattggcgaaaaagaagcacaacgctggttggaactcatggacaacgccattgattccgttgacgagcaaacgcttccgaccgcctaccgggaagccatgcgccaacacatgcagaaagtcgcctatatgctgattaactcccattcttcgtaggcaaaaacgtgctcacgtcccccacctgggcgagaagttcatctaactccgatttcaaccgcctcgcgaaattccgccgggcggccaactgctcccattgggcactgcgccgcgcaataaccgccgcccgatccgccaacgaatgcaacggatgatcgcaatggccgcgtacccaatgcaccttaataggtaagttgtagccgcgtagtttgtccgccagcagcctcgccctaaccacataacttttcggattacggttgctcagcgggtaggtaggggaattgagcacataatacaaatgcttgttatcggtgacgatatccaaaccaaaccgatggccaccccaggtatccaaagcaagggctaacgcagccccctccccttcagaaatattcgcagctgttactgtttccatccttatctcaccgcgcgtagtcaccgcagaaataccagcaagagttgtgcggttttgcatggaagcatccgtggccaccacaatccggctggtcttttgctgtttgccaggctgtagctcattggttttcgccgaatgcgcttgcctgcacaaccgccacgctcgttttaacccctcgcccacgacaacactacgcagcattaaccccgggaagcgctgtgggttttcctgcaataacccacgcaccacagcatcagagatatacaaaatcatgccctggtgggcgtactggctccacagcctaaggaactcctccaccaccacaccacgggtgtcacctttagtttccacatcgcgaacaataacgctgtgcgcactagcaccatcgacagctgaggtcaccaaacccactcgggtgccatcgacggtcaacgtcgatgtgtgtatcactgccagtgctttcataacccctagagtctagggcgaagcaggcatcaagcccaagagattactaccagaattacgaaaaacagacccaaatggggcatcgatacgcacccaactaccacagcgcgacacccgcaaatgccggggaacgtcaaggtcggcgtcgaaaagcggaattagagcaagcgacgacagggcaaaaatcatccgcatcggaatctccgcctgaccccctacccccgtcaccgtaataatcgtctgatccaacaacgaactaggcggccccaacggccccgaaaactgccgcgccagggctctgccctgctccgctaattgatgcactacctgcgcgggaatctcatccaacagctcaaaaccctccgtagggggcaacgcaccatgtggccaggtggcatctatcgcgggtgcctgaaactcctccaccaacgtcgccgctttcaccaccgcgccgttacgactcgccgaccccaccactcttctggcggcaagcaccccaaacggcgtagtcacaaacacatcaacatggcttttcgacgccgagaaccgcgccaacgccaacggatccaatgccaccgcacgctgcaacaacgcccgcaacccggcggcaccggaactaatggtcaaagattcattcaacatactagttttccgcgcgagtcagcaccttcagctcctgggcggtaatagaacgcggacgctgggtcatcaaatcaacagctacctgcaccacttccaccacacaacacagctgcccttccgcatccttaatctcctggcgggtagtaaaagaagtattaccgatctccaccacctgagtgtcaatcacaacttccttggtgctgggcaacaccggctgcagataatcagcagaaatgtggcgcacaaataccgtaggcagcgcataaccacgaccaacgaactccgcctgggcgaaagccatccgcgcctcctgcgccaactcaatataagccgagttggtaatgtgcccgaaacggtcgaaatcgccccagcgcaccggaatcgacgtggtatggataatgctggagctggaattcgtctctgtcatggtgaagtcagtcacttccttatacgggatttttacctacaagatacctacatatttttaccgtagtttgccccactacgttacctaagccacccaaaaccacttactgctaccagaccaatccccaccaaaaaacaccaaaaccctgcactaaggcagggtttttaagcgaaccaactcacattatcgagtcaacttacgatgcgtcacccgcgacggccgtgccgcctctgagcccaaccgctcgaccttattcttctcgtaatcctcgaagttaccttcgaaccagaaccactggccctcatcaacattgccttcccacgccaaaatatgcgtacacgttcgatccaagaaccaccgatcgtgcgaaatcaccaccgcacaacccgggaacttctgcaacgcattttccaacgacgacaaggtttccacatcaagatcgttggtcggctcgtccagcaagatcaaattaccgccctgcttgagcgtcaaagccaaattcaggcggttacgctcaccaccagacaacaccttcgccggcttttgctgatcagcgcccttaaaaccaaaagccgacaaatacgcccgcgacggcatctcattctgacccacatggatataatccaacccatctgagaccacttcccagacagtcttctcaccatcgatattctcgcggccctgatccacataggacaactgcaccgtctggccaaccttgacctggccggaatccggctgctccaaccccacaatggtcttaaacaacgtcgacttacccacaccattagggccaatcacaccaacaataccgttacgaggcaaggtaaacgacaagtctttaatcaaaacccgatcatcaaaacccttgaccagctgatcaacctcaaccacctgggaacccaaccttggtggtgtaggaatctgaatctcttcaaaatccaacttcttatactgctcagcctcagccaccatctcttcatagcgagccaacctggccttagacttagcctgcctagccttcgtcccagaacgcacccactccagttcatccttcaggcgcttctgcagcttcttatccttctgacctgcgatctccaaccgctcagccttcttctccagataagtagagtaattaccctcgtaaggatacaacttgccgcgatcgacctcacagatccaaccagcaacatgatccaagaaatagcgatcgtgggtcaccgccaaaaccgcaccaggatacctagccaaatgctgctccaaccacaacaccgactccgcatccaagtggttagtaggctcatccaacagcaacaaatccggctcagacaacaacaacttcgccaacgccacccggcgccgctcaccacccgacaaatgagtcaccggctcatcagagggcggacaccgcaatgcctccattgcctgctcaatcttggaatccacttcccaagcatcagcagcatcgagatcctcttgcagcttgcccatttcctccatgagctcgtccgtgtaattcgtagccatttcctccgcaatggcttcaaagcgcttcttcttctcgaagatttcgccgagaccctcctcgacgttttcacgaacggtcttttcctcattgagcggcggttcctgcaataaaataccgacagtcgcgccggggtctaggaatgcttccccattagaaggctggtcgagtccggccataatcttcaagattgacgacttaccagcaccgtttgggcctaccacaccaatttttgcgcctgggtagaaagccatggtgacattgtccaaaatgactttatcaccaatggctttgcgcacacctttcatcgtgtagatgaattcacccacgttagatttccccttagccaatagttaggacagtttgaccattagggtacaacaccaccctgtgttgctactaagaattcttctgctggcggctgcacgccgtgcagctgtaccacgcttgtcgacggcgcttcctccaccacttcggccgctactacttcctgtggggtttgctcggaataatcagcaggtgactccggtgcattatatttactcaaatcggccccctgaaccgcattaatgggcaccggatttctgcgataattgacaacataatttcttaattcaaaacccacaaatattgcccgcaaaataactttcgattgggaattgccggaattatcttgccactgttgcgtattaagataacccacacaaataactggttttcctttcatcaaagaggcatgagtgttttctgccaacgtgccccagcactcgacgtcaataaacaggcgatctcggtcaacgtatccgtcgtcttcctccccggaatacaacctagattcttcataagcgccaggtttacgtaccttacgggaggtcgcgatccgaaatcgggtcagctgggagcctgaggggaaggttttagtgtgcggattgctggtcagatacccaattaaggtaatggtctgctgcatgaaagtactccttcaaagatatggacttggtactttcactgtgccccgcgcagccgcacactgtcgatacgtagcatcattgttgtccaaatctgtggaattcgtcctgggattttagatttatccacagcaacaacttgcatcgacgtgcaaaaacccaggtcgcttaggcgcgtcgttaagcttagtcttcgccgcgattcatagctgccaacatggcgttgtatgcctctaggtcatcgtcaccggtttcctcggcgcgctggtcgtattctctcgcctccttgcggtcttctttcagccactgcaaaaacagggttccaaaaaccacgatcagcgggaacgaaccagaggcccaggcaatgccgccaccaacattctgatcatgcattaagtccacgccccacggcagcaataatgactggtagaaatcttcggccaaaatttgcgacagctgcatcaggtacaccccaaagtacaagtggaacggcatggaaaagaccagccaagccaaccgcttgaccaccgaattttgccgaggcttgggatcggaaccaatcatgtcccagtaatacaggtagccagagaacaaaaacacccagttcataatcaggtgtcccgcgtgctcggagaccatcaggtcgtaccatggcgtgatatacagcaggtagaaaatagtgacaaactgaatggtattgacagctgggtgcataatcacccgcaacagccgtgaatctaaaaacgcctgcacccactcgtacaccccaggttgctccgggttgggttggctgaccgtaagcaccagccgcaacggtgcccctagtactaagaacaccggaatcaccatggacagcaccatatgcgccaccatgtgcatggaaaacatcgctggcatatataggcccacaccagaactcatgcacaaccccaagctgaggcttccggctaaccaccagaaagtccgatgccacggccaggcgattccgcgttgttttaaccgaaacagaccgtagagataccctccgaccaacacaatggcaagcgtgctgaacatgaggtcaaaccgccataccgtccacactgaccataaagtgggggctttaaccaagtcatatcccatttctaacgccatggggctgaggttaatcacccgtggtggcggtggtggagtgcggcctaaggaaaccgccaccccgaccgtagcagccattaaaaagacttccaccaccgctaccgtgataaatgcccgccgatctccttgtgttagcttgggcatagttgctttacgatgccaccagccaactaaccccaacataaccgtaagtactgctttgactaccactattagcccgtaaccagtgctgaaaagatcttccacccgcacccgaatagcggcgttaatgacaccagtgacgctgagcaccacaatagcggtcagcgcgacggtagaaaacctggagaccgccaaggccatatctgggccgagccggtagccataagcaatcaacgccattaagccgccgacccacagcatcataaataacaggtgccataataatgagttggtgccatagtcatgatcgccaccggcagcagaatgcccagaaagccccaacggcgctatcatggcaattgcccctatcagcagtactggctgccatgaccaacgatgtaacatcaaagcagcacaccccactggtaaagcgataaccatgcaccctaaccaagcttgcgcctcggcaaccctagaaagcgccactgcccaattcgctggcgctaatgccgtaaccaacggttgcccagacacatctgatagcgtcatgggaatcatcaccgcagaaatcaacccgaagcccaaagctgataatgcaccggttcgcgccgccagcattccatcaacattaagctgtccggtggcaagcggggtgacaaaaaaggctgaaaacaaaaacgaccccaccgacatggcagccaacaaccacgccaccgcttttaaaaacggcaaacccgcggtggtaagaaccccaggatcgggaatccccaaagctgctagtgattcgcttagaaaaccccagctaatcgacgcggccacgataccgccgaccaccacaatggcaaggtacagcggccataatgacgactggatagtgcgcgaggacccagctttcagcgattctgtttcaggcatgttctctagcctaacgcctcggcttagtttgttaagaaaccagcaccagcacaccaccagaagacgggtattatcacgccctaccataaaacggtcttggccgcttgggcatttattgcacactcactaagtcatgagctaatctttaacagtctttcttagacttcagcctccatagctcagtggattagagcaaccggcttctacccggttggtcgcgggttcgaatcctgctgggggcactgacacaagaccctggttatctgtttttagcaggtaaaccagggtcttttttagcgtgacggctaggttcccccgactaggaagccggaaaccacaaaacccaaaacactgatgctgcaacaaagaacgcagtcgacctatcgcctcttttcccatcgaacttccccaatcccccacaacaaacagcgctgcattttctcagattcaccaataacataaagatattcttaactattctcacaatgtccctgctggaatgtgaaaccagccattactcgccactcgggatagaaaattttctttaggctttgatgtggtcgcaatatagcagaggttagctcgcccgaagggtgagagattgatccataatggctgctgaaagttgttttagtggtgtcagtgcttccagctgctcggtcgtcgatttgcatgtagaaaaataatccacagaacaacctgcataactgttgatatttaaatacaatctgataacagagttgaacctcagtaaacaccggctagttttcggtgtcgattgctccaagccggtaacacaattgttaccggcttcttttctatttttacagggtaggatcatgactgatatacggtatcgggtcggtatagatgttggcagtttttctataggcatggctgtcattgcgatagatgaacaagacaaccccagtgctgttttaagcatggtgtctttaattcatgattctggtttggatccggatcaaattaaatcagcggtgacaagacttgcttcctctggcattgccagatgtactcgtcggctctatcggcggaagcggcaccgccttcaaaaactcgatagctttattacaagccacgggtgggcattgaaagacttcgaagaatacccagatccctatctcccctggcaggtacgggcggaattgagtacttctaaaatcaccgaccagggagaattaggagaaaagctatcagttgcgcttcggcatatcgctcgtcaccgaggctggcggaatccttattctaaggtaaataccttgttaactcaggtaccgcactcttcgggttttgtcgctgtgcaggaggagttttccaagcttctaggtacttcttttcctgaagatgtgactttaagcgaaatggtggtatcagttccgactggttcaaaagcactgcgtggtccaaaagggttgttatcggcacgattgcaacagagtgactatgcaaatgaaatactaaaaatcgctcagcttcaagatctatctgaagggttgaccaaagaaataattcggcatgttttcgctgctgaatcacccaaaggctctggagaaggcttaactgggaaagatccacttcaacccaacgaagatcgagcactgaaagcatctgatgcatttcagaaatatcgaatcgcagcacttattggcaatcttcgtattagtgacaagtcgggacaacaccgcctaagcaaagaacaagtcaatgtagtctttgatcatttatgcaatctatctttcaaagaggagcccagctggatcactatcgcaaacttactcaacatagatcgcggccagctgctcggaactgcaaagattactgatgatggtgaacgtgcaggcgctaagcctccagttcacgataccaataggagaatcgaaggctccaaaataactccgttggtcaactggtggaagcaagccaacgaagaagaacgtgcagccatgattaatgccatgtctaatggcaaggttgatgattacgactccgctactggtgctaaagtacaagcctttttcagtgatctaccagacgaggaacacacaaaactcgatgctctttatctgcctatcggccgagctgcttactcagaagatacccttcaacggctaaccgcacagatgcttgacaacgccttagatctgcatgaggcacgaaaagcagaatttaatattgagaatgactgggctcctccagcaccagctataggtgagccagtaggtaacccagccgttgaccgagttcttaaaggggttgcccgctggcttaaagccgcagaaagcacctggggtgcaccggtttcgatcaatatcgaacacgtacgcgccgctttcatgagtgaactgaaaactcgtgaacttgatcgcgataataaaaatagggcagagagaaacgaaaaacttgtcgccgagatgtacacaaatctcaatatcaaaggacggccccgcgccgctgatatatggcgctaccaatcaatacagcgacaaaatggccaatgtgcctactgcggtgtacccattgattttaaaaactgcgaaatggatcatatcattccccgagctggccaaggttccaccaacaccagagacaatctggtagctgtctgcaagccctgtaatagtgaaaagagcaatgcaccttttgctgtttgggctgcgaagacctccagagagggggtctctgttgaacaagcagtggaacgaactcgacattggatagcagaccctggactaaacaaaaaacaatttgatgcctttgtaaaaagtatttgtaaccgattaacacgcaaaaccattgatgaagaaatcgacagtcgctcgatcgaatctgttgcttggatggccaacgaactacggtcacgaatcgctcaaagatacaaaaccactggcaccaaagtacgagtgtacaaaggcgcgttaactgctgaagcacgagcagcttctggaatttccggtaaccttcgctttatcgacggcgtcgggaaatcacgattagatcgacggcatcatgcggttgatgcagcagtgatctcatttatctcagactacgttgcagaaacactggctcaacgatccaacctcaaattctcacaagaactccgccgtaaagcaccacaatggaaagaataccaaggtagtaatgcagcccatagagccgaatggaaccgctggctacaacgaatgcaccacttgtcacagcttttatcacaagccctcgaacaagatcgcgtcgttgtcatgtccaacttacgcctccgcctaggtaacggcgcagcacatgaagacacgataggaaaactcacatccataaaagtcggtgacgtaatcacgaccgaagaaatcgatcgagcatcaagtgaagccctgtggtgtgcgctaacccggcaccctgatttcgaccaaaaaactgggcttcctgcgaatccagaacgtagcatccgtattcacagcactcacctagcagcagatgacaccattactttgtttcctgtcaatgccgggtgcatcgcacttcgaggaggatacgtagaactaggatcaagtttccaccacggcagaatatataaagtaccgcaagggaaaaaatttgctttttacatgatgcgcgtatacacaatcgatcttctcccctaccggaaggaagatctattcagtgtgacattaaaaccacaaacaatgagcgttcgccaatgtcaccccaaactacgtcaagccctagaaaataacactgcagaatatctaggatggctggtcaccgacgatgaacttcttatcgatactactaagttcaacacgggacaagtagctggtgcccaacaagaatttggccaaataaaacgatggcggctagacggattcgtctccgattcaaaacttcgattacggccattacatatgagtaaagaaggattaaagcccgatgcttcttctgattcaaaaaagatcatcgataatcccggatggcgtcctgcggtaaataaacttttcaccgacggccatgtcacagtaatccggcgagatgctttaggccgcccaaggctacaaagtacagcacatctaccaatcacgtggcaggtgaaataacccaatggttgcaggcgcatggcaagtcgttgacttaacagatttcagtggttccgtccgctacgtgcgaggaaacctacgagttatccggaaatctgagaacaagcctattgatctaccgcttgcaaccatagcgatgcttctgatcgggaactccgccgcaatcagcggcgcagttctgtcaaaattgtccgaatatgacattccgcttctagtttgcgattggcgcaaagttcccgtagcaggtgccattccatggcgggagcacacacgaattggggctagacaacaggcgcaagcgacattatcaatcccaagaagaaaaagagcatggagcagcatcgtccgtgcaaagatcaaaggacaagcagcaacccttagtgacctcaatctacaatcagatgcaaatcagctacataaactagcaacaacggtacggtctggtgacccagataatagagaagcccaagcagcgcgcatttactggtctgctatttctggcagcacaggtttcatccgcttacccggaggcgggctggatgcttggaatgcttccttagactatacctatactgttctacgaggccacggaattagagctattaccgccgctggattatctggcgcacttggagtatttcatcacggccgaggcaatccgttcgcattagtagatgaccttattgaaccgtttagacccagcattgatgcatacatcttccaatcaatcagcattgataacagtttaagttcagaaatccgtcgcagtttagtagcgagctgtgaccgaacctttaacgatgaaggccaatcgcttcccacagtttttacatcattcgcccaaaatttcggccgctatgtcgagggcgatttagctgatctgccagtccctatttggaaaggacaagtcgatgccaaagaaaggagctgatcctgtgtggtgtgtcgttatgtttgatctacctgttggctcaaataaggaacgcaaagaagcaacccggttccgaaaccaactactcgacctaggcttcggccgcgcccagttcagcgtgtacgtccaataccttccgctcgcagcaaggctcacaccactggtaaaaaccataaaaactgaactaccagaaggcggagacatccgaatcttgtgcgtcactgaccatcaatgggcaaaaaccattcgtttttccaacgccgccgagtcaaaacccgaagaagagccaccgcaattagtgattttttaaaaggaagatccctgataaaccccagtttaaagccaatttttcggcctatctgaagtatatcagggatctagagagttgaaccccagtttaaagccaatttttcggcctatctgaagtatatcagggatctagagagttgaaccccagtttaaagccaatttttcggcctatctgaagtatatcagggatctagagagttgaaccccagcgactgaccgtaaacgcgctgagcacgctgaagtatatcagggatctagagagttgaaccccagcgacgaaggccatgatggagggaaatgctgaagtatatcagggatctagagagttgaaccccagcagaacggactcatgcccctgctggattagaagtatatcgtagtttctagtggttgtggaaacaccctgatttttaaggtggtgtttctagttgt

SEQ ID NO: 3988 - DNA, 14906 bp, synthetic construct
  misc_feature 1..14906: note = Synthetic
  source 1..14906: mol_type = other DNA
gtcgtggcctgcgtggttctgcgggcaggcgctgcactggatccggatgggctgaaggattactgccgcgagcgcctgactgcctacaaggttccgcgcaccttctaccacttcgaagagctcgccactgaccagatcggtaagctgcgccgccgcgaagttcaggccgacctgctggatatgctgggcctggtgccgaaggaaaaggacgatgctgctgccgcccagccggaagacggcggcacgcaagacgtcgccgctacggataagtagcttgcgctgaataagatccacttccccggagtatttcacgccctggttcgcccatgatagtggccagccagggcgttttattgtgccactatgccgaacatacgcactcaaaacatggtttctgaaacaaaatcatgagaatttactcacatttgccgcgagttatccacgtgagataactcgcatgcactacggtgagcaaagacaacatgaacgtttcctcatattttctgtaaaggatgccactgcatgtctttgacaccgcttgattccatgcgcgcccccgccatcatctttgctggtcaagcctcggaatgggaaaagcagctgcgcaacgccgctgccagccaccacgccgtcggccgcctggacaattacctgacccaagcccgtagcctggtcagcccttacgcccgcaccattgcttccactatcccaggagccatggagcgcttggaagcgctcgtgcacgcggactcccaagacaccggcgcatctaaccacaccaccagcccgaacaattccactagttccaatgacgtattccccgccgtcagcatcccgggcatcgtgctcagccagctggctgccattgatcaattgcgtgacctggggctgaaccttgcaggttgcgacctagaacggggctcaacacagaacaacccaaccaccgccttcggccactcccagggcagcctcggcatcgcagccatcaaacatccagtacacgcactggccctggccatcctgatgggcacagcagcaagcgtcgcccacggctccaccgattcccgctcacacatgctgctgatccgcgacctcccgcgcgatgtcgtcgagcagtccctgaatgggaccaccactggctcagccgccatctccgtggtcaacggcacccgcgctttcgttgtctcgggcaccccggatgaactcgcagcggtagaaaataacgtcgccgcccacgccagcgcctataacgacgccctggaggcacgcgaattcggcggctcagaactcactccaaacttcacctacttaccggtcgcgctgcctttccaccacgacagcctcaccgaagccacagagctgaccatcgagtgggcccaggcctgccagctggatctcggcgacaccgatatcgccaccgtcgtccgcgacatcctgatccgcccgttcgactggaccgcacagaccgcccaaatggtcgaccagcacatcagccacgctctggtgcttgacgacggcctcgccaaactcaccaccccgctggtcgcgggcaccggtctatccgtcgttccggcttggacgccgtcgcaacgcgataacctcgctacccccggcgcgcaattgcctactgcgcgtgactggtctgagttcgccccacggctggtcacactgccggacggcaagacgtacacgcagacgaagttctctgcactgaccggcctgtctccgatcatgctgggtggcatgaccccgaccaccgtcgacccagccatcgtcgccgctgccgccaacgctggtttctggacggagatggccggcggcggaatgtattccgaagaactgtttaccgaactgaagaattcgctgatccgccagctgcatcctggacgcaccgtggcgtttaacaccatgttcttcgatcgcttcatgtggaacttgcagtttggccaagcgcgcatcgtcccgaaggcccgcgcgaacggcgctccaattaccggtgtcaccatttccgctggcgtgccggaagccgacgaggccacagaactgctcacccagctgcgtgccgacggtttcccatatatttccttcaaaccgggcaccaccaagcagatccgcgacatcctagccatcgctgccgccaacccggagcaccagttgatcctgcagatcgaggacggccacgccggcggccaccactcgtggctggatttggatgagatgctcatcgacacctacgccgctgcacgcgagcacgataacgtcaccatcaccgtcggcggtggcatttactcggcagaacgcgccgcggaatacctgaccggtacgtggtcacagaaatattctctgccgcgcatgccggtcgacggcgtgttcgtcggcacggtcgccatggccaccaaagaagccactacctccccgcaggtcaaacagctgctcgtcgacacccccggtatcagcccggagaccaacggcggttgggtcggccgcggccgcgctaacggtggtgtggcctctggtcagtcgcacctgctggcggatctgcacgaaatcgacaactcgtttgccgctgcggcccggctgatcacctcgctggatccagctgattaccaggaccaccgcgaagaaatcatcgccgcattggccaagacctccaagccgtatttcggcgacgtcgagaccatgacctaccaacagtggctggagcgtttcgtcgatctggccttcccgttcatggatccgacctggcaggatcgctggtttgacctgttgcaccgcatcgaggcgcgcctgcacccgtcggatcacggcgaaatcgacaccctgttcccagacctggattccgtcgccgatgccccggccaacctgcgcaccttgctcgaggccttcccgcaggctgccaccactaccgtcgcagcgcgcgatgccgcctggtttgtctcgctgaaccataagcacaacaagccgatgccatggaccacggccatcgatggtgacctgaaaaagtggttctccaaagacaccctgtggcaggcgcaggaggatcgttacgacgccgacgccgtacgcatcatcccgggcccggtctcggtagcaggcattaccaaggtcgacgagcccgtcgccgagttgctggcccggttcgaaaccggcaccaccgaggccttgcaacaagctggtgtggagccaaccaagcagtactcgcgcctgggcaatgccaccactgcagaagaattcttgcgccaggccccaagcttggaatggcacgggcacaccatcgccaacccggcggtcgagctgccaactgaagcctttgacatcatcaacgacggcaccgaggctgccccgcagtattccattcgcatcaacactgattcctactgggatgacctgccagaatcccagcgtccgttctatgtgaagtccgtgtccatccccgtcgatctttccgacgccgtcgccaccggtgccagcccggttgtggaccacgaccgtctgccgcaggcagtgtttgagctgctggcaggcctggctggtgtgggttcgatctccgaatccggcgatgagatcaccgcactgccgaccatcgtggaaggttcggtcgacgagcaatatccattcggctatgccgaagattccttcaccctgcctaccacgctgttgcaggcgcacactgcagtcaccggggctggtttgggcgacaagctcaccaccgccccgggcaccccggacgtgctggtgggcccagcctggcctgcgatttataccgcactaggctctggccgcatcggcgaagagcacggcgagcctgctggtaccgactacccagtcatcgagggccttctcaacgccgtgcacctgaaccacgttattgacctgcgggtgccactccacgaactcgcccgcggcaacaaaggcgaaagcaatgcgcgccgcatcgacgtcaaatcctggtgctctgcgatcgatgagtccaacgccggacgcatcgtcaccgtggaactggaattgcgcgatcacgaatccggcgagttggtggccacccagatgcagcgcttcgccatccgcggccgcgccactggtgccagcgtcccggcacctgccccggaatggggcggtgctgccctagctgctgaagtcgagccgaccccacgctccttcgtcgaccgcgcaaccgtcacggcgccgcaggatatgaccccattcgcgctggtctcgggcgactacaacccgatccacacctccactaatgctgctcgcctggtcaatcttgacgacgccctagtgcacggaatgtggctctcggccaccgcccagcacttggctaatacccacggcacggtcaccagctggacatattccatgttcggcatggtgcaactcggcgacaaggtggaaatcaccgcagaacgcgtcggacgcgccggcatccacagtgctttagaagtcacctgccgtattaatggcgaagtcgtctccgtcggccaggcgctgttggcacaacctgccaccgcctacgtctacccaggccagggtgtgcaggcagaaggcatgggccgcggcgatcgcaacgcctcccctgctgcacgtgaggcctggcgtcgcgcggatcaccacacccgcacccagcatggtttctccatccggcagatcatcgacgacaacccaacggagctcaaggtgcgcggtactaccttccgccacccgcagggcgtgctgcacctgacgcagttcacccaggtcgcgttggccgttgtcgcctatgggcagaccgagcgtttgcgcgaaaacaatgcgctggctactggtgccatgtacgccgggcactcgttgggtgaatacaccgcgctggcttcgctggcgaatatcttcgatttggaagctgtcatcgacatcgtctactcgcgtggttccgccatgggcacgttggtcgagcgcgacgagcacggcagttccaattacggcatgggtgcgctgcgcccgaacatgatcggtgtcagtgccgatgatgtgcaggattatgttgcccaggtggcgcaggaaaccggcgagttcttggagatcgtcaactacaacatctccggccagcagtattccatcgctggcaccaaggctggcctggcggaattgggcaagcgtgccacagctattgccccgcgtgccttcgtgaccgtcccgggcatcgatgtgccgttccactcccgcgtgctgcgcgacggcgtgcctgcattcgcggacaaactcgacgagctgctaccggagactttggacctggatgccctggtcggacgctatgtgccgaatctagtggcccgtccgttcgaactcacccaggatttcgtggacgccaccgcggctttggctccgtctggccgtctcgacaacatcgacgccgccaccatggagccgcaaaagctagcccgcctgttgctgatcgagttgttgtcctggcagtttgcctcgccggtgcgctggatcgaaacccaggaattgctgtttggtcgcgtcgaccagatcatcgaggtcggcttggcgtcgtcgccaacgttgaccaacttggcgcagcgttccatggccgtggctggcgtcagcttgccggtgtacaacgtcgagcgtgaccaggatgtggtcatgcttgccgacgtcaccgaggcgccaatcgaggtggatgacgaagatactgcaagtaactctgctgccgccgccgaccaagccagccaggcgccggaggtcggcgccgatgctgcacgtccgacggaaaacccggcaccgatgtcggaggcgggtcctgacagtgcagccggtacagcagccgcaaacgctgccaccgagtcagccggtgcagccgagtcagccccagcaaacgcatcggcaagcgccagcgctaaccccaacgctagtaccgctgctggaggcggcgccccggccggcgagctcagcttcaccgccgccgaggccatcatgacgctgttcgcgttttccaacaagatccgcctagagcagatcaacgattccgataccgtcgaagaactcaccaacggtgtgtcctcgcgtcgtaaccagctgctcatggatatgtccgctgaactcggagttccagccatcgacggggccgctgatgctgatgtcgccaccctgcgtggccgcgtcaccaccgcagctccgggctacagcccgtttggtgcagtgctcagcgaagccatcggggcgcgcctgcgccagctcaccggtgccgccggtgccaaaccggccgctatcggcgagcgggtaaccggcacctgggcactcccacaatcctggatcgcccacgtggaagccgaaatcctgctgggttcgcgcgaagaagattcggtgcgtggcggatcgctagcaacgatcccaacttcagccagctccaaggcagaagtcaacgaactagttgacgccgccgtgcagcaagtggctgctcgccacggagtagcagtctcgcaagcaaccggtggctcaggtgccggtggtggttccgtcgtggattccgctgcgctcaacgaattcgccgagcaggtcaccggtgaaaacggtgtgctggctactgccgcacgtaccgtactggcgcagctgggcttatccgagcctgcgccggagaccccagaaaccgataacacgctgtttgaaaccgtcgaggcagagctgggttccggctgggtcaagaccgtcaccccggtcttcgatgcccgcaaagctgtgcttttcgacgaccgctgggccagcgcccgggaagatctcgcgcgctacgcactggggcaggcagatatcgccctggagcgtttccgcggcacgggctcgaccgtcgccaagcaagcccgctggtgggcagccaacggtgggcagggcaagctggaagagatcgcgcagctggcagaatctgagctgcagggcgcctacgccgaggatatcgcgctggttaccggcgctgctccaggctcgattgccactgcactgatcgcgcgcctgttggaaggcggcgcgaccgtcgtcatgactgcttcgcgcgtgagccaagcgcgtaaggaatttgcccgcaagctgtacgccgagcacgccattccaggtgctgcgctgtggctggtaccggcgaacttgtcgtcctaccgcgatgtcgatgcggtcatcgactggatcggcactgagcaggtggaatccgtcggcaatgaggtgaagctgctcaagccagctctgatcccaaccctggccttcccattcgccgccccaccggtgacagggtcgctggccgacgccggcccgcaggcagaaaaccaaacgcgtttgctgttgtggtccgtcgagcgcaccatcgcgggattggccggtttggcgcaagctggcgtcgacaagcgctgccatgtggtgcttcctggttcgccgaaccgcggtgtattcggtggcgacggcgcttatggcgaggtcaaggccgcgctggatgcgattatgaacaagtggaaggtcgaggctggctggtccgacggtgtcaccctggcgcaggttctgatcggttgggtggccggtacgcacctgatggccggcaacgacggactggttccggctgtggaggctgcgggtatccgggtctggaacccagcagagatttcccacgagctgatgggcttggcttctgccgaatcccgcgcgcaggctgccgaagctccgctgcacctagacctgaccggtggtttgggcgacacattgaacatggctgagctgactgcgcaggcggcagcgaatgcggaacaagccgccgcggccgcagcagaggcagcagccaacgcccccgctgccccggccaccatcaccgccctgccaaatatcgcggtgcccgcacagccggagcgtgtggaaaccggtgagatcaccacggatctggatgacatgatcgtcatcgcgggtgtcggtgaggtctcgtcctggggctcaggccgcacgcgtttcgaggcagaatacggtattcagcgcgacggctcggtggaactaaccgccgccggtgttctggaactggcgtggatgacgggcctggtcaactgggccgaagacccaaccccgggctggtacgacgccaatgaggcagaaatcgccgaagaggaaatctatgctcgcttccgcgatgaggtcgtcgcccgcgctggcgtgcgcaccttgtcggataagtatcacctgcaggatcaggggtcgattgacttggcgacggtcttcttggaccgcgacatcaccttcaccgtgccgtctgaggcccaggcccgcgatatcgaagctgctgacccatcctttacccgtgtggccgaggccgacggcgagtggcaggtcactcgcttgcagggcgctaccgcgaaggtgccgcgcaaggcgacactgacacgcacggtggcgggccagatgccggataacttcgaccccacgcgctggggtattccggagcacatggtcgacgccctggaccgcatggctgtgtggaacctggtcaccgccgtcgacgcgttcattagcgccggcttcagcccagcggaactgctgcaatcgatccacccgggcgacattgcctcgactcagggcaccggtatcggtggcatggaatcgctgcataaggtcttcgtctcgcgcttcttggacgaggagcgcccgtcggacatcctgcaggaagccctgccaaacgtgattgctgcgcacacgatgcagtcgctggtcggcggctacggttctatgattcacccgatcggtgcgtgcgcgacctctgcggtctccatcgaggaaggctgcgacaagatcaagctgggcaaggccgatgtggtggtggccggtggtatcgatgacgtgcaggtggaatcgctggccggcttcggtgacatgaacgcaaccgcggaaacgaagaagatgaccgaccagggcatcgacgagcgtttcatctcccgtgccaacgaccgccgtcgcggcggcttcctggaggccgaaggtggcggaaccgtgctgctggtgcggggttcgctggcgcgggagctgggcttgccggtgtatgcggtggttgcgcacgcggcatcgtatgccgatggtgctcatacctcgattcctgctccgggcttgggtgccttgggggctggccggggccgcgagaactcacgcctggcaaagtccctgcgtgggctgggcttgcacccgaacgacgtgacggtggtgtccaagcacgatacttccaccaacgccaacgacccgaacgagtccgagctgcactccatgctgtggccagccgtcggccgcgatgccgatgctccgctgtttgtgatttcgcagaagtcgctgacgggccactccaaggctggtgccgcactgttccagaccggcggtttgatcgatgtcttccgcaccggccgcgtgccgcacaacgcggcgttggattgcgtggatccgctgatcgagccgaaggcgaagaacctggtgtggctgcgcgacggcgtttcgcttgccgacgccgggcgcccggtgaaagcggccgtgttgacctcgctcggcttcggtcacgttggtgccgtggtggtctacggccacccgggtgtcttcgaagctgcggtggctgcgcagttcggcgaggacgctgccggtgcttggcgcgagcaggcgaatgctcgtctggctgctggtgccgcacaccgagaggctggcatgattggccgccgtgcgttattcagtgtgattgagggccgtcgcttgccggagcggggttcgaaggaagcggagatcgcattgctgctggacgaggatgctcgcttgggcgctgacgggacctacccgctgccgggttccggtgcctaaactcgggaaaatttcagcaaatcaccagaaataattagccttacacaagcttgctgtgtaaactcagctttgagaattgaacctcagtaagcgccggctagtttccggtggcgaatgctccagccgggccttcgggcccggttttttcatacccgaaaggctctgggccatgcctgttaactatcgcgttggaattgatgtcggcacgcactcatttggatgtgctgccatcgaagtagatgacaatgatcaaccgatccaaattctcagtgctgtttctctgattcatgattctggaatcgatcctgatcagaataaaagcgctactactaggctggctacctcgggcgtagcccgtcggacgcgtcgcttatataggcgtcgccgtcaccgcacgatcaagctggagaaattcttacggtcgcaagggtggaaaaccaaggaatttgagcactattccgacccctatctgccatggaaaacacgcgttgctttggtgaacggttttatcgcagatgaaacgcagcgcggtgagtatttatccattgcgcttcgacatatcgccaatcaccggggttggcggaacccatattggaaggtgtctagcttatattctcctgacgcacccagcgatgcgtttgaagaaatacggaaagagcttgaggcaaaaacgaagcgaaagatcccgcacgatgtcaccgtcgggcagctcatctcttttgcacaatttggccaggatcggctgcgtggcggcggaaaaaagaaagacgagaaaaaatctgcgggcgaatttaaacaagccgttatttctgcccgattgcaccaggttgatcacgctcgcgaaatcaacgagatctgccgtgtacaaaaaattaatgacacactgcgcaaacagattctggatttagtttttgccgccgaatctccaaaaggtgcacagtccggcagggtcgggaaagatccactccagccaggcaaatacagggcactaaaggcttccgatgctttccagcgttatcgcatcgctgcgcttatcggaaaccttcggatacttcacgaaggggccattcgccggttgtatgacaacgagcgacacatcatatttgaatacctcgttaatttagcacccaagacagagccatcatggctcgaaattgctgatctactaaatattgatcgtggccagttacgaggtaccgcgacaatgactgacgacggtgagcgagccggggcaaaaccgcctgtgcacgacacaaaccgaacaattctcggttgcaaggttaaaccgttagctcagtggtggaaaaacgcgtcagaacccgagcgcgcagcaatgctgaaggcgttgtctaatgccgaagtcgatgatttcgattcccctgccggtgcacaagtacaagcgttcttcgcggaattagacgaaaaagaacacgaaaaactagattccttgcacctgccgatgggtcgtgcggcctatagcgaagacacgctggttcgtttgaccaagcgcatgaaccaagaaaatttggatctttatgacgcccgccgcgctgaattcggaatcgccgaagactgggcaccgccggctccgaggattggtgagcctgtaggaaaccctgcagtggaccgcgtgctcaaaggcgttgctcgttggttagaagctgccgccgacgagtggggtgcgcctaagtcagtagttattgagcatgttcgggacggcttcatcagtgagtccaaagcgcgcgaaattgaccgcgaaaacgataagcgccaccagcataacgagaagttattccgcgaaatggaagaacgtctcggtattgaaggtaagcctcgcagcgctgacctatggcgtttccagtcggtacagcggcagaattgtcagtgtgcatattgtggttcaccgatcacttataccaatagcgaaatggaccatatcgttccacgcgcaggtgaaggctctaccaacacgcgggataacctggttgcggtttgccatcggtgcaacctttccaaatccaatattcctttcgcagtctgggcacagaaagtcagtatcccgggggtcagtgttaaagaagccttagaacgcacaaagcactggtccgtagactctggtctgaacaaaactgagttcaataatttccgtggcaaagtccgtgaccggttccaacgcactgctcatgatgaaccacttgatgcgcgctccatggaatctgtcgcgtggatggctaatgaactacgcggacgcgttgcacaacggttccaccaagaaaacaccagtgtcagcgtataccgcggtgcaattactgcagaagcacgccgtgctgcaggtatcgccaacaaattgcgtttcattggtggccccgggaaaacgcgacttgaccgtcgccatcacgctgtggatgcagcagttgtcgcattcacccgtcaatatgtcgctgaaaccttggctatccgttccaataagaagcgtgcagccgaacttctccgtgatgttccaaggtggaaagagttcactggtgcggatgaaaaacgacgtgcagcatggaatgtgtggctgccgaaagtccagaaactcgcttcattgttgcaagttgccttagatgaagatcgcatcgttgttacccaaaatatccgtcttcgcgtcggtaatggccgcgcgcataaagaaaccattggcaagttgaagacaatccgcgttggtgatgctatttcggccaccgacattgatagagcatcctctgaagctctgtggtgcgctcttactcgggacaaagatttcgatgcgaaagccggtttgccagagaatcccgagcgcaagattaggatccacggcacctggtatggagctgacgatgaaatcgaagttttccctgtgggagccggtgcaatcaaagtacgcggtggctacgccgaactcagccgtttccatcacgcgcgaatctataaggttccgaagaaaacaggttatgactactgcatgctgcgtgtttacaacaccgaccttgtacggcaccgaaacgaagatctattttctgttgagctaaagccgcaaacaatgtctgtacgtcaagcagagcaaaagctcagaaaatccttggccgaaaactctgcagaatacctcggatggatcgtcccaaatgacgaacttgtcgtcgatacttcaagaatagccagtgcccagttaaacgaggttcaggagatatacggaaaaattcaccgttggcggctcctcgggtttgattcaaactctcgaatcttgctgcgccccctccaactaagcgcagaaggactgcccgatgacgcaaacgcagcatccaaagagataataaagggcagaggttggagaacttctataaatggttttctcacaggaggaaatgtagcagttgtccgccgcgatgcgttaggtagggttcgtctcactagcgctgcacatctgccggtttcttggaaggttgattaaaaatgaatccaggatggcgggttatcgattgcactaacttacaaggttcgttgcggtattcacgcggacaactcgtcatccaaaaagctgaaaatccagaaatcgcaatccccttggcgcaaattgcgatcgtgttgctcggtactcaaggtccgatcagtggtgccgtgctgcaaaaattcagcgattatgatattgcgttgctggtttgcgactggcgaggagttccagtctctggcgcttatccctggaaccagcattcgcgcacaggggctcggcagcaagcacaagcacagcttccggtcccgaaaaagaaacaagcgtggacacggattatcgcagctaagattcacggacaatcatcggtactccgtgcactagataaacctggcgcagacgaattgctcaagctttcccgcacagtaaaatctggcgatccagaaaataaagaggcacaagccgctcgacggtactggtcttacctttcacacgaggaatcttttgctcgtctgcctggcacaggagaacctggctggaattcatcattggattacggctatacacttctacgtggctatggaattcgtgcactagcaggcgccggattgtccggaacccttggagtgtttcaccgtggccgtggtaattcttgggcgctcgtagatgacctcatggagcctttccgtccaatggtcgaccaaattgtgttttcgcaaattgaatacggcgaaactctcgatgctgagcagaagacacaaatttctacaggccttaatacagcttttgctagtgacggaaagagtctgagcactgcctttaacgaattcgctcaacactatgggcaatacgttgaaggtaggttcccggacctcagtgttcctcggtgggaaggattcctccgtgcccacgaaggatagcgaaccaatgtggtgtgtagtcatgtttgacttaccagtcaagaccaaaaagcaaaccagggaagctaatcgcttccgcaatcatttattggaccttggcttttgccgctcgcaactgagtgtttatgtgcagtattttcctctcgcctcacggattgcaaaaacagtcaaagagataaaaactaatttgccagacggcggcgaagtgagaatagtctcagtcaccgataaccaatgggcaaaagccatcagattttcgaaacaccaggaagacacagttgaggaaaaaccaacacaactactaattttttaatgaggaatcgccaaataaccccagtaaaacggtccttttcgggccgcactgaagtatatcaggggtaatgagaactgaaccccagctcgtgtgatgacacctcaagagatagcggaagtatatcaggggtaatgagaactgaaccccagcagcgggtttgtctttcatggcttttgttgaagtatatcaggggtaatgagaactgaaccccagcagacgagttcgccgtcgtcaccctcgtggaagtatatcaggggtaatgagaactgaaccccagcttacaccctctaggtgttgccgcgatacgaagtatatcaggggtaatgagaactgaaccccagcgcagaccaccagcgctcaaacgcggcaggaagta

SEQ ID NO: 3989 - DNA, 14560 bp, synthetic construct
  misc_feature 1..14560: note = Synthetic
  source 1..14560: mol_type = other DNA
tcgaggagctgcccgtgatgtcaccgtagccggccacggaaaccgtgagcttccaccagcccagtttgcgccacaacagcggctgcgtgagcgccacggcgtgcacacggtgcagtggcacggtttgcgagcgacgctccgtcaagccataacgcagccgaagttcgtgggtgtgctcgttgtgttctgctcgaaaattccatgcccggttaacgaagctgagcatagcgggcgcaccacccaacacgatgggaatgaaaaacccgaagccgatgggggtgactaccacggcgatcagagcgaccaccgtgagaatgctggaccactgcagggctagcgccgccagcgcctgccgcacgggcaccgcagccatcaccgtggccgatcgtgggtgaggatctgccgcctctgtctggctagcgccgatatcctcctgctcgccacctgcggtgtcttgctctgcacggctgtggcgcagcacgatttctttcacctgctcggcggtggcctttttcagatactggatttccagtaccgagtcatttccgcccgcggtctcgatacgcaccgcggcaagaccggcgaggcgagcgaggaatggctcggtcacatcgaccgcgtggatcctatcgcaccgcgcggagcgggattgccgagtaaacactcccttttccactaccacttcgtcgctgcccagccggtagccattgcgcttccaccagatacgcgacagggcccaggtgaacccgagcaatgccacggtgccggcgacgctgagcagaaccggcaccagctcgaaggactcatagtcgcggatcacgcctaggatgccggaggcaagctcccgctggttgatagcgatggcgacgatcaccgccagtagcgccgaccagaaacgaagcaggggtgtcagcgggtgaacgcgctgaaaatcggcgttatctgcagtgacggcgggctgggtggtgtgtggttgttggttctcactcacagcccgctcatcctctccttcgccttctcactgaggcgcacgcgcagctcgacggcctcatcagcgggcaaacctggaatggtggagtcactggtggaggacgcggtgtgcaattcgatgttcttcaggcccaaagaacgctcgatggggccgttattgatatccacgaactgaatacgcccatagggcaccacggtgaggctatagaacaaccgacctcggcgaatcagcaattcatcctcggtttctgcccaaccgatgcgcgccacctgcaccatggtgagccagacgatgaatgcgctgaacccagccatcacgagcgcggccacgatgagcacgatctgccacgccccagaggcaaagaaggcaccgatggcgagacctagtgtggtcacggctagcacgggcacacggccgatcagtcgcgccttcacgagtgctggggatacaggctgaaacgtcacgcccatggcatcggcgtcacagcggttgaggtcagtgtgggaagccatggggtcattcctagcacagtcgatatatatagcttccactcagcgaaagtcacgagaccgcagtttcagcatgtccccgatggctagcggctcgaatttatcggcctccacggtggccgcccccgtggcgatgcgcacgataccgcgaacgatcacggcctttgcggtacgcgcaagccggcggtagcgcgcccacagccccggcgagaccaccacattgatcagaccggtttcatcctccatgccgaaaaacacggccccactggctgtctgtgggcgctggcggtgggtgatcaccccggccactaggatgcggctgccgtcttcttgttccagcagtttctcggcgggcaccaccgctcgccggtgaagctctgcgcggatgagctcaatcggctgactgctgggggtgattccagtgctggcaacatcagccaccatgagatcgaaggtgttcatccccggcagcggcggggcggtgatagctgagagcccgggcagcatgccctgctgttcgctggcggccacgcccgccacccactgtgcctggcggcggctgatacccatcgactcaaacgcccccgcgcgccccaggctttccacatcacgcacgttcagctctgcggcacgtgcaatatcggccaccgtcgagtgagtagacagccggtgccggatcttctccagcttctcggcggcctgggttcgcagccctgcgattgagcccagccccagccgaatggcgccactgtctacccgcggctgcacatcagagtgcagcactgacaccggttgtatctgcaccccgtgccggcgggcgtcttggatgagggactgcggggaataaaaacccatgggctgagcgcgcagcaggcccacacaaaactcggctgggtagtgatatttgaaccacgcggagaaatacaccaaggaggcgaaggattgggagtgtgattctgggaatccataggcggcaaaagccatgatttttagccacagaccgcgggctacgtcttcctctatattgttggtgcgtttgcagccggcgtagaacttcgcccgcagcgcctccatcctctccggcgagcgtttggagcccatggcgcgtcgtaaagcatcggcttccaccccactaaaaccagcggcgtcgaccgcgatctgcatgagttgttcctgaaacagcggtaccccgagagttttacccaaggcattttcgagacagggatgatcgaactccacgggctcgaggccattgcgcctgcgaatataagggtgcaccgagccgccttggataggtcctggccgtacgagggccacctccaccacgaggtcgaagaattcgcggggcttcagcctcggcagggtgttgagctgggcacgggattccacctgaaacacccccacagcatcagctcgggccagcatggcatacacctcaggctcggcgaggtcgagctcccacaggttcaccgtgatgccatgctgctctgccaccagatcgatcatgtggtgcagggcctccagcatgccgaggcctaagaggtcgaacttcaccagccccgcagaggcgcagtcatccttatcccactgcaccacggagcgcttgtccatgcgggcccactccacaggcaccacgtccgcgatggggcgatcgcacagcaccatgccgccggaatggatacccagatgacgcggctggccttctaggcttgccgccagctgctgcacctgttctggcgggtcggataccccgcgcgaccagccatcgcagctaccttgggggaagccgagcgctcggccggcatcgcgcaccgcgcctttgtgtcggtaggtgatcacattggccaccatggcggcgtagtcgcggccataggtgtcgtagacatattggatcacctcctcgcgacggccggactcaatatcaatatcgatatctggcgggccctcgcgctctggggagagaaagcgctcaaagaggagcttcgcgctgatgggctccacattggtaatgccgagggcaaacaccaccgcggagttcgcggccgagccccgcccttggcacaaaatattgacgcggcggcaaaaatccacgatgccgcagacgatgaggaaatagccggcaaacccgaggtgctcgatcacatccagctcataatcgatctggtcataggcccggtgggcgatctcggctgggcgggaggcatagcgctgtggcgcccactcggagaccagcgcgcgcagctgcgtcatctcatcctcaccgtggctgggcagatccggcgccacaagggtgagggtgaaagcgcactcttctgcgatgcgcaggttttctgccatgagctctgcggcgtgcggcaccatggtggctagcgccttctcccctaaaagccagcgcccacccatcgggtccagctcgggggcgtgctcccccacgctgcggcgggccgcgagggcatccttcgcggcggcgagccgacgcgcacccatgttggccgcgtttgccacggccgagacagtccctcgcagctgatagcgggcacgcagcgcgtccagctcggcgtggtcgtctgcatcggtggggcggcgggtaatgcggtattcgagacggatattctccgagccgaatgccgcgatgagggaaggtagatgggcagcccaggtgacgtcgacaagcacataccagcgcccaccggcatccgctccgagatcggcaagagtgggatagactgtgcggtccttctgcccggcggccatcttcgcgcgcgaaatcacgcggctgaggcgacggtagccctccacgtccttggcgatcacgcacaacggggagtccatcccccactgctcgcccacgctgagctcggcgccgaagacggtacctaggcggtagcgtgccgccgcctcggcgaatttcaccaccccgtagaggccatcgcgatcgcacaccccgagcgcgcggtaccccagctcggcggcccgagccgccagctcctccggttcggaggcgccatggagaaagctatagctcgagcggcaatgcagatccaccacacggccatattctcctcgaacagatgatggctcagaacgggaggaacgaggggcgagagcgagcgtgccatcatagtgcccagagaggatcctttcgagcctcgaccagctcaaaggttgggcattcagccctaagaatctaccattccattccatgcgcactacgctagcacgattagcacatgcgttctaccactcaccggccgcggccgtagaccaagctgtacagaacttaagtaaggtgctagcgtaaggcagcgtcaaatagacagctctttctacaaactggtctactcctcaaggattcccccatgaagcgatttacccgcaccaccgccgccctagctaccgtggccctgtccgccaccgcccttgtggcctgcggcaacgacgattcctccaccatcaagctgggctccagcgattccaccctgaagcagttcgctgcctgggaggatgtggccgccgataacgacatcgacctggaagtggtgaacttcagcgactacaacacccccaacaaggccctggctgagggtgagatcgatgccaatagcttccagcacttgaagttcctcgccgagcacaacgtgggctccggtgatgatctggtgccgatcggctccacctacatcgtgccgctggcactgtactggaaggaccacgattccctcgacggcatcgagggcaaggaagtcgtgattcctaacgacccctccaaccaaggtcgcgccatcaacgtgctggtgcaggcagacttgatcaccttgaagaacgaggtggacaaccccaccccggcggacatcgataaggacaagtccaaggtgaaggtgcagccggtggatgccgcacagacccccaccggatggggcgagggcaagcccgccatcatcaacaactccttcttggaccgcgccggcatcgacccgaagtcctccgtgttcgctgatgatcccaactcggagctcgccgagccctacatcaacgtggtggtggtgcgcgccgaggacaaggacaacgagcagctgaagaagctcgccgagatctggcacagccaggccgtggtggatgccgatcaggaagacactgccggcacctccgttccggtggatcgccccgccgatgagctccaagagatcctcgatcgcctcgaagacgagatcaagcagggctaaaccctccaacgatcaagcagggctcaggcttgaaaagcccccaccctgctcttaggcccccaggccgtgatgctgggggccttgattttccactcttttacgtttttcctctacgttttaaggaacattttcgctcgtggcacaacaaccacacgcggccgccgccggctccaccccttccggccctactggcaccgctattgaattccgcaacgtgtctaagacattctcgaccaagcgcggcacggtgaccgctctcgacaatgtcaatctcagtgtcgcccccggcgagatcctgggcgtgatcggctactccggcgcgggtaaatccaccttggtgcgccagatcaacgggctcgatgtgccgagctccggcgaaatcctgctcgatggcaccaacatcgtgggcatgccggagaagaaggtacgtcaactgcgccgccacatcggcatgatcttccagcagttcaacctgttctccgcccgcaccgcggcgggaaacatcgcctatcccctcgagctggccggcatgcccaaggccgagcgcactaagcgggtacaggaaatgctcgacttcgtgggcctgtccgacaagggcggctcctacccggagcagctgtccggcggacaaaagcagcgagtaggcattgcccgcgcactggccactaatccttctttgctgctggccgacgaggccacctcggcactcgacccggaaaccacccaggacgtgctggcgctgctgcgcaaggtgaacgaggagttcggcatcacgatcgtggtaattacccacgaaatggatgtggtgcgttccatcgccgacaaggtggtggtgatggaaaacggccgcgtggtggagcagggctctgtgtttgaggtcttttccgatcctcaaaccgccgtggcccgccgattcgtggccaccacgctgcgcaatgagccggataatgtggagtccgatgatctccgcggcaagccgggccggttgttcaccgtcaagctcaccgagaactcgggctttttcaccgccgctggccatgcccgcgaagccaatgtgagcgtcaatatcgtgcacggcggtgtgaccaccctgcagggtaattccttcggcaaggtcactgtgcgcctcaccggcgatgatgccgctatcgacgagttctatcattgcctcacccagaccaccgagattcaggagatttcttaaatggacaccacttatctcgcagctgattgggatcggctcggcgacacgttcatcgactccatcttcgaaaccctgtacatggtgggcatcaccatggtggccggcggtttcttcgggctcttgctgggcattttgctctacaccacccgcccgagcggcattttgcgtaactcggttgtctacgccgtgctcaacgtgttggtgaacttcatccgcccgatccccttcatcattctcattgcgtttatcggcccgctgacgaagctggccatcggctccaccatcggcaccggcgccgcgacattcgtgatgtcgatcgccgccaccttcgccgtcgcccgcatcgtggagcaaaaccttgtggccattgatccgggcgtgatcgaagcggcccgcgcgatgggtgcctccccgtggaagatcatcacctcggtgatcgtgcccgaggccctgggcccgctcgtgctgggctacaccttcatcttcatcgcagtggtggatatgtcggccatggccggctacatcggcggcggcggcctcggcgatttcgcgatcgtctacggctatcgttccttcgactggaccgtcacccttgtagccaccgcagtgatcatcgtgctcgtgcagctcgcgcagttcttcggcaactggctgtccaagaagatcatgcgccgctagttcggctcaccgccccgcgcttatcgacgcagcgtccctgccttttcaggggcgctgcttttttatgcgcctctaggactcttcctcctgacgagtcctcatgaatagctccgcaaagggtcccgccgtaaccatgagctcctcgaagcttccctcctgcacaactcggcctttttccagcacgatgatgtggtccgcgatggccagcgtggacacgcggtgcgagatcagcagcacggtcttcggggccagcccttcgccgcctttgctccttgttttaagcatccggaaaatgtgttcctcggcggcggcatcgatggcactggtgggttcatcaagaatccagacagggcggtcctgcagaagcagacgggcaatcgctagtttttgccactgaccgccggaaagctccctaccaccccattgggcgcccagcgcctcgtctaattccacgtctaggtccacctggtccagcgcttcgtggcacgccgcagcatcgacgccctccggatgggtgtttccgagcagtagaaactcgcggaccgttagctcaaagtgctggaagttctgcgtgagataggaggtggtggccgaggagagaagagtgtgcccaccgctgatgtcctctgggaacatcccggtcaaggcattcaccagcgtcgtttttccggccccgttggctcccacgatggcggtgaccgctccttctttggctgtgaagctcacatcccgaaggatgggagtttgtgacagctccaccgaaaggttctgcacctcgatgtcgccgccgacgcctgcggcgttgttttgcctgggaggcagcgtcggcgatgcctgaatgaaatcgacaaagcggcgcgtcgacggaatagcgagcgccagctcccctacctggtagcccagaccggacatgactgacgatcccgtcagcaacgcgacgatgatggccgtcacgtccgctacggagtcccccgtgttccacacgatgagcgccgaggacacgagtagccccacagtgacgacgcctgctataaggtccgccacaagcgagcgatactcaagcccgcaggcaagacccagccacgaccgccagctagcagacgccggttccgtaaaagagcggccgaactgggcgaaggaaatctcacggcccgagtgctggtacaccagctggctttccaagtattcggcgcgacgggcgtgtttcgagcgctcaccccatgcctgggactcatagcgcccagccagagctagagcgatggccgaggggaaaatggaaagcacgcacagcagcgctccgagcacactaatctgcgccaagctgacgaacagggagacggccgccaccacggccgcggcgatgttcagcagagcctgtgcaaatcccacgaggcgagtctcggcgagatattccttggcctcgcgtgcggactccaaaaaactgagctgcgagtacgcggagtgatccaccttgagcatggcgtccgcgaagagcttgtggctgtacacccgcaggtattgggcgttaatgcgagaaaaagcgtaggaaacgcgctgaatgatggcgaaggaaccgatcaaaagggcagctagcgccacggtcacaccatccgccgccgcccctaggcgctgcgccaccagcacggtgagcgcggggatcaccgccactacgagagtcaggcccgttgcaatgaccgcgctccaaggtgagcagacaaagaacgctctcagcgcaaaaatgtaggggttcttcttagtcattgagctcaccacatctcatccatctgcatcgaagactagaccaccggggcgccaatgctcccgcacgtagccctctccttgggaatcccttttccaccgactcacacgtgttaggggcagcccttttcgtagccttccccctcgagtccggttcggctcccgcgatatctgctgaacttcagcttatagaattcatcccggcctgatgcgccacattcttctagtcgagctacatatccctgaaccatacgggtctttaatttgcgtgaaccggccacacacctttgctgagggcacgcgtcactagcgatgcagacatcagtgaccacctatggccagactcggggtcaatccctgaataagtagagcttgtctaaggggcggtcgacttgccgctcaccgtaggcttcactacctcgctgcagagcagcaccgtttcttactcctgccgattttacgaagcccaccccacctccatataggggtggtccgtagtcaatttactgacacacagacagtattggtgttaaaatcaaagtcgaactgaacctcagtaagcaccggctagtttccggttgcggaatgctccagccggaccttcgggtccggctcttttcatatctaggaggccctcatggctacgaagtatctcgtgggcatcgatgttggatcgtactcactcggatgcgccgctatcgaagtcgatgatgctggaaatcccatccagctgttgaacaccatttcttttatccacgattccgggattgatccagactcgaacaaatccgccaccacccgcctcgcggtctctggcattgcccgccgtactcggcgcctctaccggcgtcgtaagcgccgcacaataaagctcgaaaagttcttatgcgctcaagggtggaaaactgtcccgttcgagcaatatacagatccgtatctaccgtggacggcgcgagtagcgctcgttaacggctttattgccgattcagagcaacgcggggaatatctatcgatagccctacgccatattgctaatcaccgcgggtggcgaaacccctaccactcaacctccagcctgtattcgcccggcgaacccagcgatgcgttcaacgagattcgcgaaggcttgagcaagcgcatcggccaccctatcccctgcgacgccaccgtggggcagctcatatccttcgcacagttcggccgcgatcgtctccgtggtggcggcaaaaagaaggatctcaagaacccagatcacgccaaacaggccgttatctccgctcgtctccagcaaagcgaccatgcccgcgagatcaatgagatctgccgcgtccaaaaaatcgacgacggcctgcgtaagaagatcattgatcttgtcttcgctgcggaatcacccaagggggcacaagcgggacgtgtgggtaaggatcccttgcagcccaccaagtatcgcgctctcaaagcctccgataacttccagcgttatcgtgttgctgccttgatcggaaatctccgtatccggcaatccgataagacccaacggcgactcacggccgaggaacgctccttggtctttgaccatctgatcaatatgccggccaacaaagaaccctcgtggctcgatgttgccgagattctgtccgtggatcgcgggcgactgcgtggcactgcaaccattaccgacgatggcgagcgcgccggcgctagacctccggtgcacgaaaccaaccgggttattgcacgctgcaaggttaagcctctcactcactggtggacagcagcagaccccgatcaccgcgccgagatgctcaaggcgctgtcgtactccgcggcacctaactttgactccaagcctggtgccgcagtgcaggcgtttttcgcgggcttagaggaagatgaccaccaaaagctcgatgcccttcatcttcctattggccgtgcggcctacagcgaagacactctttcacgactaactgcttggatgcagtcagagaacatggacctatatgaggcgcgtcgcgcagaatttggagtctcggaggactggactccaccgaagcctcgtatcggtgaaccagtgggaaaccctgccgtcgacagggttctcaaggggcttgcacgctggctggaagccgctgaagccgagtggggcgcacccgaatccatcgtgattgaacatgtccgcgacggcttctccagtgaaaacgtggctcgggagatcagtcgcgagaacgaccgccgccataagagaaacctcaagctctacgccgaaatgcaggagaaactcaacatcgatggcgcggtgcggcgatctgatctatggcgataccagtccctccagcgccagaacgagcaatgcgcctattgtggctcgcccatcaccttttccaactgtgagatggaccatattgtgccgcgcgctggacagggctcaaccaacgtacgggagaacttggttgccgtatgtcatcgttgcaatctcgcgaaaaagaacattccctttgcggtttgggcacagacctgcaccataccgggtgtttcactcagggaggctctcgagcgcaccaaattctggcttcccgatcccggtcagaagaaatccgactttaacaagttccgcagcgcagtgtgtgagcgtttgaagagaactcactccgatgagcctctagactcacgctccatcgagtctgtggcttggatggctaatgaggtgcgtggacgcgttgcccagcacttccgcgactcgggaacgaacgttagcgtgtaccgcggcgcactcaccgctgaagcacgaagagcatctggtatccacaagcgtttgcgctttatcgatgggcctgggaaaactcgctttgaccgccggcaccatgccgttgatgctgcgatcattgctttcaccaccccctatgttgctcagaccctggctgagcgagccaacaaacgccaagctgcctttattaacaacgctcctcatcagtggaaagagtacacaggcgccgatgatgctcaccgtgctgcttggaactcttgggtgcctaaagtgcgcaagctcgcactcatgctccaacaagcactcgacaaggatcgaatcgtagtcacttctaacctacgactgcgtttgggtaatggacgcgcgcacgaagataccatcggagcgctcaaaaccattcgtctcggcaatgaaatttccgccaccgacatcgaccgagcatcctcagaggccctttggtgtgcgcttacccgcgaacccgactttgaccccaaaaacgggcttcctgctaacccagacaggcgcattcgggttcacggttcatggttcgatgccgatgacaatatcaaagtattcccagtcggagcgggttgcatcaaggttcgcgggggatacgccgaactgagcagattccaccacgcgcgcatctataaaatcacgggcggaaagaaaccgtcctacgcgatgctacgtgtctataacgtggaccttctcgaccatcgggacgaagatctattctctgtcgagatcaaaccccaaagcatctctgcccgccaagcagaacctaagctacgcaaggcacttgcagaaggcaccgcagattatcttgggtggctcgtagtagatgacgagctggtgattgacacatccagtttcacaacaggacacatcggcgagtttcagaccgtcttcggtccggtatcacgctggcgactcgatgggttctatagcgagagtaggctccgactgcgcccgctcctcatgagcgctgaaggcatagatccccaaatgcccgatgttgtgcaaaaaattgtcgatcgaccaggttggctcccatcaatcaacgttgtcttcggcaccggtcaggcaaagatcattcgccgcgactcgcttggacgcgtacgcctgtctagcgcagctcacctgccggtctcttggaaggtgcgctaacatgcattccggctggagagttgtagactgctcgaacctcgaggggagtgttcgctatcgccgcggtcagctttctatccagccggacaccgcggcagagcctgtcaatattccgttgagccacatcgcggtcgtcatcataggcacaaaggtgaacatatccggcgcagttttctcaaagctcagtgaatatgacatcgcactcataatcactgactggcgcggggtacctgtggctggggctaatccttggaatgagcacacacgcattggcgcgcgccagcaatcacaggcctcactatcccagcctcggcgtaagcaggcgtgggcgcgaatcgtaagcgcaaagattcatggccaagcagccgtagcacgggctctgaacagacagaacactgaactcttgatgaagctcagccgaaacgttcgctcgggcgatgtagacaacaaggaggcagtggccgcaagagcctactggagggccctagcggaagaaccgaatttcagacgacaacccggcactagttcggacgggtttaactctgcgctcgactacggttacacacttctcagaggcaccggcatgcgggcagtagctggcgctggtcttgctgggacactcggtgtattccaccatggtcgcgccaactccttcgctctggtcgacgatctcatggagcccttccgcccattcgttgatcagtttgtgttttctgtacttagaccaacctctcccctctctgctgattacaagcaccgcatttcatcgtttctccacgctcaagccttcaacagtgccggccagagtgtcgccacagtctttgacgactttgcccaacagtttggtttatacgtagaaggaacggtcgatcgactgcaggtgccgcgttgggaggggcagatcagtgccagcgaaggacagtgagcccgtgtggtgtgtcgtgatgtttgatcttccggttcaaactaagaaccagcgtagggaggctaatcgcttccgtaatcgcttattcgatctcggtttctgccgagcacaattcagcgtgtacgtgcagtattttccactggctgcccgtctcagcacagtagtgaaacaggtcaaagcgcagcttcctgcaggtggagaggttcgcatcctatccgtgacagaccaccagtggtcaaaggcgatccgtttttcgagccgcaaagagcaagcggccgaggaaaccccctcgcaactcacaattttttaaatcggaacgcagaaaataccccagc

SEQ ID NO: 3990 - DNA, 14200 bp, synthetic construct
  source 1..14200: mol_type = other DNA
  misc_feature 1..14200: note = Synthetic
gccgcacctggatcgcgacaacgacggcgtggcctgcgagcggtaagttctgcggttgggtgtttgtgactttgtagagtgaacgatgcgtgtgcgtaatgcagggacagcggtggtgttgtctatgacgctggtgctcggcagtggtggcacggctgtggctgtcgaggcttccggggtggaggtaaaggctgccgctgacgggaaagtggctggtgggtccgctgctggaggcgctggtggtagtagcagtgaccgggttgattccgcagttaccctcatcgctgcaggtggaatgatcggcatcatcgccgcctgggcactgcaccgcggcatcattcctgtagctgggtcgtcgttccctggaggtttgtccgtacttggggtcactggcgctggattccccacctgtgacgctgcacgccgcgcaggcttaacgacgcccatccgccaaggccagcccggctactcacccgccctagaccacgacaaagatgggattgcgtgtgagtgagagggagtgaggtgtgttttccccgctgcggcggggacttttgtgtgatgactgcgtttgtgtagttttcaacaacgttctatcggggagtagtgcgttcttggctgtggtggggttgtgaggtgaaagtgtggagtttggcattgctcattttcaagttctgtccactgtttagttgattgaatacatgctctacctttgctttttgtgaaatggtcatatcaaatgcgcaggctatctatgtgtggcgaatacccccgaaagtgtaaagattccaccaagactatacaaagcatcgtagaggcacttattattaaatcgagaattgatcctcagtaagcatcagctagtttctgatgacgattgctccaaccgatgcgcgcattgcgcgcgtcggttttttcaacctcataggagttgcgatggatacttcgctaaccagatatgctgttggtatcgacgtcggtgatttctccgtaggtatggcggcaataaaagtcggtgaagacggcatgcctcaggaaatattgagtgcgatctcccatatccatgattcgggtcttgaccctgacaacattcaggaagctaggaccaggcttgaaatttcgggaattgctagacgtactcgacgactatttcgccatcgacgccgtcgtcttattcggcttgatgcattcatacaaagtaaggggtggggacttccacaaaatgacgagtctgatgatccctatcttccctggcgtgttcgtgcggagctggcatcacgtccaattccgacagaagaagagctaggtgcaaaattatccatcgcaatccgccacatcgcgcgccatcgggggtggcgcaacccctatagtcgggtcaactcgctcatggcggatgtcccaccaagcgatgccttcaaagcgatacaagagcatttttcgaatatactcggtcgatcattttctgatgatatgacccttgggcagatggttgctgcttgtaacctcaccaacactaagttgcgtggaaaaggtggtgcaatatcggcgcgactgcagcaatcagattttgctcacgagatcaggaaaatctgcgcgatgcaagagatagatgagagcactgtccgggagattattgaacatgtctttgctgcggagtctcccagaggtgcaaatgctactcgtataggtaaagaccccctccaaccaagtgaagatcgtgctttgaaagcaactgacgcatttcagcggtaccggattgctgcgctgattggaaaccttcgtgttcgtgaaggaagcggtaaaagagaactcagttttaatgaacgtaaactagtttttgaccatctagttcacctggagccaaaggttgaacctgactggactgccgttgctgaaaagcttaatattggtcggagagatttgttgggaacagcgacaaccatggatgatggtgaacgtgcaggcgcacgtccgccagttcatgaaaccaatcgtcgtattctcacgtgctcagtgaagcctcttgttaaatggtggcaagaggcagatgatgcggagcgcagagcgatgttaatagctctggggaacggttcgattgaagattatgatgacgcacaaggtgcaaaagttcaagcattcttcactgaccttccagatgaagatatagaaaagttagataagctacaacttccagtaggtcgcgctgcatacagtgaagatacgcttacaaagctaaccaaagccatgttgtcaaacggcgtagacctctataccgctcgccgtcaagtctttggaatatccgaagactgggcaccgccagtgccggaaataggcgaaccagtaggtaaccctgcggttgaccgcgtgcttaaagtagtagcacgttggttgcgtgcagcagaaaatacttggggagtaccagaaagtatcaatattgagcatgttcgtgcaggctttatgagtagaagcaagtctcttgagctagatcgtgacaacgaacggcgagccaagcgaaaccttgagcttttcactcagatgcagcagaagtttgggcaagacatcaagccgtccagagctgacctgtggcggtatcagtcagtgcaacgtcagaatggacagtgctgctattgcggtacaacaattacttatcaaaactgcgagatggatcatattgttccgcgtgcaggacgtggatccacgaacacgcgcgataacttggtggccgtctgccatgactgcaacttgtcaaaaggaaacattccctttgctgtgtgggcggagaaaagcgccaaacctggcgtcagcgttgctgaagctcaagagcggctacggcattgggtgtgtgaccctgggctaaagaccccacagttcaggcgctttgttaagtcggtgaatgatcgcttgtcgcgtaagactattgatgaagaacttgatgccaggtccatcgaatcggttgcgtggatggctaacgagcttcgtggcagaatcgctcacaagtaccgagatgcaaaagtgcgagtatttcgagggcaactcacggcagaagcgcgaaaagcatctgggatcagcaaaaagattgcattcatcgacggtcctggaaaatctcgccttgatcgccgccatcatgctgtggatgctgctgtcatcgcattcatgtctgcaaaagttgcggaaacacttgccatacgaagcaaccttaagtttgaccaggagcttcgcaaagacgctccacagtggaaagagtttactggttctaccgacgcgcacaagatcatctggtcaaagtggcgtaatcgcatgtcagctttagctgacttactgcaaactgcattggacgaagaccgtattgtggtgatgtctaacctacgtttgagactggggaatggtgctgttcatgaagaaaaagttcgcaaacttaagaagctcaaagttggcggaccaatctcagctgtagatgttgatcgtgcatcaactgaagctctatggtgtgctctaacacggcaccctggctttgatccaaaggaggggttactagcagatcctgaccgtaatattagggttcaaggtaggcatcttagtgcggatgacaccatcgaggtatttcctgtctctgctggcgctgttgcagtgcgtggtggatatgtgaaacttgggagatcatttcaccatgcgcgtgtttataagattgcagatggaaataaagtagagtatgcaatgctgcgtgtctatagtatagatctaaaaaaatataaaaatgaagatctatttaccgttgaattgcagcctcaaactatgaccatgagaaaatgtaagagcagtcttcgaaaagcgcttgctgttggcaaggctgaatatcttggatggctggtagtagatgatgaactgcatttagacactgcaaaatttaacactggtcaaatcgtaaatattcaggaggaacttggggaaattacgcgttggcgagttgacggatttaaaacagaatccaaactgcgcctacgtccgctccaaatgagtaaagaagggatccgcaaagacatgtctgaagatgttaataagatccttgacagtgaagggtggcagcctacggtcaataagctttttggggttggaaaagttacggtaatccgacgcgacgcacttggacgagtacgcctatccagtaatgcacatctaccagttacatggactacaggataagttatgtctactggttggcaagtacttgacttcactggctttgatggagcattggcgtacaaaaggggtcagttagccatattatgtgagaaggagatagtggaatccataccgcttgctcagcttgccgttattttagtcggatcaagcactaccttttccggtgctgttctgcagaaactaagtgagcatgatgtggcaatcctggtatgcgattggaagcatgttcctgtcgctgctgcgtatccatggaaagagcattcgcgtatagccgcacgtcagatagcccaggctgagctgtcgcttccacgacgaaaaaatgcatgggcacaaattgtcaaagccaagatcttcggtcaagccgcaactttgaacatcgttgatagtaagggtgccaagtacttatactctgtggctcaaggagttaagtcaggcgacccaagcaatcaggaagcccttgccgccagattttattggcgacggcttactgcagatccaacgttccggcgattgcctggaattggtgaaagtgatattaatgggtgccttgattatgcctatgccatacttcgtggtcatggcatacgtgcggtggtttctgctggactttgtgggacaataggtgtgtttcatcatgggcggtctaacccatttgcacttgtcgatgacttaatcgaacccttcagacctgcgattgatcactacgttattagcaaacttgataacttttgcgttgatgatccaggtgttcgacgtcaacttgttggctttattgaatctgcgttttcaggcgcgggacacacgatacccaccgttttcatgcagtttgcacaggaatacggccgatacgttgagggggatctgcagcggctgattccaccaacatggaaagggctacccagtgccagcgaaaagaagtgaaccagtgtggtgcatagtgatgtttgacttgccggtcaaaacaaagagacagcggaccgaagcaacacgattccgcaatatgctacttgataatggctttgcgatggcgcagttaagtgtctatgttcagtacttaccgcttgcggcaggtgtggccaagctggcggcactcataaagtctgagctgccgtcgggtggtgatgtccgcatcctcgctgtctcagataaccaatggtcaaaaatgatcagattttccaacatgcagactgaagaacctgagcctgaacccgcccagctgatgattttttaacctaagatagccagaaaaacgcaggtaaatcaaggtttttctggctatctcaagtatatcagggttaacgagaattgaccctcagccaggccagcgcggttggcgaactagtgtcaagtatatcagggttaacgagaattgaccctcagctcgggatttcgtcgtgttggacattgaccaagtatatcagggttaacgagaattgaccctcagctcctgcttcgacttaatgtcctcagccacaagtatatcagggttaacgagaattggccctcagcttgctggtgttgacaaggttgtggaggacaagtatatcagggttaacgagaattgaccctcagcccttagcatccgcaaaaatacccgggtacaagtatatcagggttaacgagaattgaccctcagctattcgtgatacgcagttccttacccagcaagtatatcagggttaacgagaattgaccctcagcctccccatcaggcagcccaagggtggggcaagtatatcagggttaacgagaattgaccctcagcccatatgcgcggccaccatgggtgttcccaagtatatcagggttaacgagaattgaccctcagctggttggactgcgaaccgcattggtttgcaagtatatcagggttaacgagaattgaccctcagcgcaatggggccggtgtgaagcactgtggcaagtatatcagggttaacgagaattgatcctcagcgggggtgagtaagccaagtatccggcccaagtttattaaagttagaaagacttaactattgagtttgatttagtctctttttgcgtgtcgaatacttcgtattgcagttttctgtcgacgcacctctaaaaattattgcttctaatcatggttgtcgctttctcttttatgactggtataaagtttccttctggggtttagaaatggacaactatggcagatttacttatagcatcatgcatgaatattattcaattctcgaagaatagtcagaaaggcttatagcagaacatctgctgagatgttgtatctttcgacggtttccctcgcagcgacctatctcattttgggctctagatcggctccgtcgttgtgcccatctagaactccggcactcagaaatccaccccacaccccacccgcacaaacaaaaagcgcccccggcaggattcgaacccgcgaccagccgggtagaagccggatgctctaatccactgagctacggaggcatggaaggttttcttccatcagggaactttaccgcatctgtccgcgcccacaccacacgaccccacaccacatagcccacaccagaccgtccacccacccccgcctgtacgccttcgtgtctgccccacctattagtgtttagtgcatgacgtcatcttcttcggccacccccacgtcaaactcagtcagtgccacctccaccccagcaaacactgagcgcgccgcggcgtcgtcaagcagtgcccgcgtgacctggccgttgtttgtgttgttttgtgtcacagcgggtgttgtgggtgcggtggtgtcggcgggtttcttgggggagtcgttggcggcgttgggtattcctgatccgggtccgttgaccacggccggtttgccttttttccgggcggcggcgtggatgttggcggcgttgtcggtggggtcgtttttgttcgcaggcttcctgtgttcgccccgggagctccgaacacccactacgtccagcaccgcccccacaccccacaacagccacgacaaccagaacacccacaacacccaagacaactcaaacaaccaccccgccctccgcttcgccatactgagcgcggacggcacggtggcgtcgaaaacgggtgcggttgcggcgttgtgttttggtctcatcgccttgttgatggtgccgatgtatttgtcggatgtgtcgggccaaccgttggcggacgccatgcagccacagaattggtcaaccgcaataaaccaggtgtctacgtcgttggcgtggcagtggtcggcggtgtttgcgctggtgacgggcgttgcggcgctgactacgcacaggtggatcatgcagccggtgtggttgtgcggggcggtgttgatgattgtgccgctgggcttggagggccattcggcgagcggcggcgatcatgattacggcacgaattcctacctgtggcatgcggtgttcatggtgttgtgggttgggggtttgatggcgctgatcgcgcatggtcggcggcgggggccgggcatggtggtggcggtgcgtcgttattcggcggtggcgttggcgtcggcgctggtgatgacgctgtcgggcctgatcaacgccgcgattcgtatccactggtcggattggttcaccacgagttatggcacgttgattcttactaaaaccgtcggcgtggtggtgctcgtcatgatgggctggctgcaccgccaggccacgatcccgaagttggagaaacagccgcgcctgttccagcgggtggcgattgtggaagtactggtgatggcggcgatcacgggtgttgcggtgtcgctgggccgcactccgccgcccccgccgcgcgagccggatttgaacaccatggatattcagctgggctacaagctgtttgtggaacccaccatctggaatgtgtggacgatgtggcgtttcgacatcattttcggcaccctcgccatcctcctcgccgtcgcgtacatatggggtgtgcgccgcttgcgccagcgtggtgaaccctggccgtggtaccgcaccgcctggttcatgtcgggttgcgtgatgttgctggtcaccatgtgttccggcatcggtatgaacatgcccgccacgttttccatgcacatggttggacacatgattctctccatgggcgtcccggtgttctgggtgctgggcggcccgttcaccctgtggctcgccgcgatcaacccaggtcagccgggccagccgggtccgcgcgagtggcttgaggtggccatcaacaacccggtggtgcggtttatcacccaccccgcggtgaacaccatccagtttctggtggtgttttacatcctgtacctcaccccgctttacgacgtcgcggtgtccgagcatgccggtcacctcaccatgaacatcatgttcctgtggtccggtttcatgtactactgggaggtcatcggcgtggatcccgtgccggtggagcgcaaccccatgggcaagggcgcgtggctgttcgggtcgctgccgttccacatgtggttcggggtggcgctgatgcagatgcaagtcatcctggcctacgatttctactccacactgggactgccgtggcacgtggatttgctgcgcgaccagaacgtgggcggtggcatcgcctgggccgcaggccagttcccgctgataattgtggtgggggccgtgttgctggcgtggtaccgggacgatcaccgccagatgcgcacctacgacaaacgtgccgacgaaaccgacgacgaggacatggccgcctacaacgccatgttggcgcagatcaacgctggtgagaaccccttcgaggagtactatgcgcaggatatgaggggcagaaatgatagctccacctagtctgctgcgcaacgcctcacctggccgtctgtggataactcggtttatccacaggcaggctctgacggcagatgcgcaacctgcggatcaggtggcagagtagggatcacggccccagggaatgacaccgggggatcggggagacgggggttcgaggggaccattcccgccggggccgatattacgttcgtgttcgacggcgcactcggcgccgacaatgaggaggggcatcatggctcagcattcctacactgtgaccggcaatcttgtcgccgatccgcattaccgccagacgggggaaaaccagggggtgtgtaaattccggttgggggccagccgtcagcggcgtggcgaggacaacgtgtggtattccgtcgaccaggtatggctcaatgttgagtgctggggaccgttggcgcagcacgcgcgtcgttccctgaccaagggcatggcggtgattgtggtgggcacgctggtgacgcattcctggcgggatgctgacggggagcttcagtcctacatggtggtcaaggcatcgcatatcggccccgacctgaaccggtacctcaccaacactgtggttccgcagcacgccgtggtgcaggccgatgccacagcggagatgcccgacgcctcgacggatgcgagccaatgggtggattcctcctcttataagccggaggatgtcgataaagaactcgcggcggtaggtgcggcaggggaggttgaggaagcaccgttttagcgggggcgtcgatacgcgcacctgggggagtggctgatgacgcctcctgaacccacttcatgtaccctttgtggaggttaaaagttgcaacaataaaaggggttgtcgtgggtgagttcatctacacgatgaaaaacgtgcgcaaagcacacggtgacaaggtcattttggacgatgtcaccatggccttctttccgggcgcaaagattggtgttgttggcccgaatggtgccggtaaatcctccatcctgaaaatcatggctggtttggaccagccctccaacggtgaggcattcctcgacccgggtgccaccgtgggcattctgctgcaggagccgccgctgaatgaggaaaaaacagtccgcggcaacgtggaagagggccttggggagattttcgccaagaagaagcgtttcgacgagatcgccgaagaaatggccaccaactacaccgacgagctcatggaagaaatgggcaagttgcaggaagatctcgatgccgccgatgcctgggagattgactccaagatcgagcaggcgctggaggctctgcgctgcccgcccggcgatgagcccgtcacccacctttccggtggtgagcggcgccgcgtcgcgctggctaagctgctgctttcggagcctgacctgctgcttctagacgagcccaccaaccacctcgacgccgaatccgtcctgtggttggagcagcacctggccaaataccccggtgccgtcctggccgtcacccacgaccgctacttcctcgaccacgtcgcgcaatggatttgcgaagtcgaccgcggcaagctctacccctacgaaggtaactactccacctacctggagaagaaagccgaacgcctcgacatcgcaggcaaaaaagaccagaagctgcaaaaacgactcaaggaagaactcgcctgggtccgctccggcgcgaaggcccgccaggccaaaaacaaggcccgtctgcagcgctacgaagaaatggccgccgaagctgagcagtacaagaaactcgactttgaagaaatccaaatcccgacgccgccgcgcctgggcaaccaggttgtggaagtcagcagcctgaacaagggtttcgacggccgcgtcctcatcaaagacctttccttcaccctgccccgcaacggcatcgtcggcgtgatcggccccaacggcgtgggcaaaaccacgctgttcaaaaccatcgttggcctggaaaaccccgacgagggcgacgtgaaagtcggccaaaccgtccaactctcctacgtggaccagaaccgcgaaaacatcgacccggaaaaaaccgtgtgggaagtagtctccgacggtctggactacatcgtggtcggccaaaacgaaatgccctcccgcgcgtacctctcagccttcggcttcaaaggtgccgatcagcaaaaacccgccaaggttctctccggtggtgaacgcaaccgcctcaacctcgcgctcaccctcaaacaaggtggcaacctcatcctcctcgacgagcccaccaacgacctcgacgtggaaaccctttcctccctggaaaacgccctgcagaaattccccggctgcgccgttgtgatctcccacgaccgttggttccttgaccgcacctgcacccacatcctcgcgtgggaaggtaacgtggaagaagggcaatggttctggtttgaaggcaacttcgaggaatacgaaaagaacaaggtcgaccgcctcggccccgaggctgcgcgcccgtcccgcgtgacccacaggaaactcactcgctaaagcggaggtttgccggggccggatttatgtaccggcacgtcaaatgtgcttatgctcaagcacgaaaatggggtgtttttcgacttggagataagcacatgtgacgtgcttgtcatataggtccactgccaggtccgaaaacaccctgtttccgtacccagcgatagacctttttcttgcaagcgtttgcactaacggtgttcaaggctttcctgctcaccagccgcacagctgccgcgctctaccaaaccgccacccctgcaaagtatgtataccgtcaagtctgaaaacgccccattttcaaccggagcgtatacacacttcacatcaaccccgccctagcaccaccgactccacacccaacccgccaccaacctcatcatcgattaacctgcgcatatgcccaatacccctagcgttaacatattttctatcgcctgagttcctggcccgatttgtggtagaaaaggggggactgttttcttgcgtaggggccgtgctgttctgtggcgcggttgttgcgcaggttttttggtgaagggaaggctgctcggatatgggcgaacgtggtaatcagcatgacgtgactgagggcgctgtggtgcatgtgtgtcggattccggtgaggtggtcggattttgatcgttttggccatctaactaattccgcgtatgtggaggtggcgcaggaggcgcgtttggattgggcgcatcaggagtttgtacagaagggcatggatgtgccatctgtttttgtgcggcatattactgctgattatcgtcttccgattttgcccacggcgactgaggttcaggtggaaaccgaggttgtgcaggtgaagaccacgtcatttaccacccgccagactattaagaatgagaagggcgaggctgcgtgtgtggtggagtgcgtgcagattgcggtggatttgaagacggcatcaccgcgcgcgattgaggcgcatgagatgaaggtgctcgcccgcggcaagagcgaagagggcagcgaagagggccagggctagccatgtccacaacccaggatcacttgaccattacgtcgggcgagtcgggcttgcgggcgttgttgttgcgtgctcgtgggttggatgagcaaacgacggtgcgtttccgtcagctgggggagcaggttgattgttttgtcaccactccgttccgcgtcctggcgagtcgccgcgtggtgggggaggtctcacgggatggcgctgcggctggggtgtcggcggtgctggaggcgctggatagctccccggaaaacgcttctttagggccggctcgcgacgccatgtttcccggcgcgcttccgccggcgtcggggtttgtgttggttgatgagcttccggtgggtgttgtccgtgatcttgcggatcagggccgcgccttggccaggcagttttcgggtccgatgggcccgccagcgtcgttgatggatcagacggtgattaccgcgacgtcgtcaagcggtgacacgagcgttgaggtgccaatgcgcgcggtgtttgcgtgcactgccctgcagttgattccgggtggctctgcgccggaggagattcccaggcagttgcgggtgtcgtcggtggggcgctggttgcgtatcgacgccccgtttggttccgtttacttctcagctggcggtttttcgctcgtagaccgcttagtctagactgtggtttactgtactgtccgtaccgttgtttggaggaagagtgtcccagcgaggttttgccacgaacgccgtccatgcgggctacgcgcctgacccgaatgtgggggccgtgaatccgccgatttacgcctccaccacctttgtgcaggacggattgaacgagctgcgcggtggtttcgagtacacgcgctgcggcaatccgacgatcgccgtgctggaggaggcggtggccaccctggagggcggcgagtacggtcgggcgttttcgtcggggatggcggcgacggatgtggtgctgcgcgcggtgctgcaaccaggggaccatatgatcgtgggcaatgatgcctacggcggcacgttccgactgatcgatacggtgtttggccagtggggtgtggagtattcggtggtggataccgccgatgcgcaggcgatcgccggggccttgcagtctaacaccaagctcatctgggtggagacccccacgaaccccctgctgaacgtgtcggatattgcggcgttggccgaggtggctcactcgaacggcacgctggtggcggtggataacaccttcgccaccccgtatctgcagcagccgctggcgttgggtgcggacgtggtggtgcattccaccactaagtacctgggcgggcattcggatgttgtcgggggcgtggtggtgtgtaacgacgccgagttggatgagaaaatccagtttctgcaaggcggcgcaggcgcgatccccagcccgtttgacgcctttctgacgatccgcggattgaaaaccctgaatctgcgcatggataggcactgcgcaaacgcgcaggctgtggctgagttgttggactctcacccgaaggttgcttccgtgctgtacccggggcttgctggtcatccaggccacgaggtggccgcccgtcagatgcgggggttcggcggcatggtgtcggtgcggttccatg

SEQ ID NO: 3991 - DNA, 8221 bp, synthetic construct
  source 1..8221: mol_type = other DNA
  misc_feature 1..8221: note = Synthetic
aaggaaaccgcaacaccaatggtggccgccatgacgagcacttcaacgacggcgatgcggataaaggggctgctgtttcccgacgtcaggcgcggaatggtggcggtccggtgccaccacccgaaaatcgccaatgcgaacgtgagtaccgtcttggccacaatcacccgaccgtaatcggaagtgaacaagtcttcgaatcgcacccggatggcggcgttgatgaccccggaaatggccatggcgaccatggcaaccgcggcgatcgtggagtagcggcgcaccgccaattgcaggcttgggcctaaccgccggccgtgggcgatgagcgccatgaggccacccacccacaacatcatgaacagcacgtgccacagcagcgagttcgtcccatagtcgtggtcgccgccggccgccgagtgcccagatagtccttggggggcgacgatcaggatggcgcccaccagccatacgggctgccacatccaggtgcgcggcgcaatgagcgcggccccacccaccacgagagcaatcatggccgaaatgagccacgccttggcatccgccacctggttaagcgccacaaaccagttcgctggctggatggcctcggtgatcggctggcccgacacgtcggaaagcaccagcggcaccatgatgatcccgataagcgcaaagacgagcgccgccaccgcgcccgtgcgcgacgcgatgagaccatcgacggtcaggtacgcccgccgaatgtccccttgacggggggagagtaggaaacttgcgaataagaaggatccgaccgatagcgcagcaagcaaccacgcccccgcccgcaggagtggcaaacctgctgtggttatggggccggggtcgggaatgcccaggacagcgagcgattccgtcaagaaaccccaggaaattatcgcccccgtgacaccagcgatgagaaaaaagaggaggtataacggccaggttatccgcgctccccgactgctcttcgtttcgaccatgcgtttaagcctaacccccggtggggtaaatccagtcattgccccatcaacaaaatttcaacggcgggttaaaattgcgctaatctgtttctcgttacgcctccatagctcagtggatagagctaccggtttctacccggttggtcgcgggttcgaatcctgctggaggcacgtttgaaaccccactgccaggcgttttgccgagtcggtggggttttacgtttgtgagacatggtgggtgttatgcaggcgccgaattcgcaggaattcgaatttttgttcgtgacggttttggcggttccgaggcccgcagaagcgaactgtttttcgatgctctaccggaaccgtccgccactcgccgagccgaccagacgcaccgccaagttcaggccgccggtcccccaccgccgcggcggctatttttgtttctgaagctccgtcaacatcttctcgatccggtccaaccgctccggcagggtcgctaccgtccgggcgatttcggggatcagccgaatcttgccggcaacaaagtcgacaaaggttttgccttccgtggctttccacccggtgaaccgtggccccttggtgtcccattcggggccgacaagttggtctaaaatccagcgaatcatgatccgttcttctccttgctccggggtttccggggtgggtgttggggtggggttattgggttggcgggtattacggagttcctgggcgtagccgagcaccacgtcgtaggggaatccggggccgggatcggtgtggttgacttcgcgccaggcctcggagatttcagcatgcccgtgcacgccgcgggcaccagcacgcagccggtcggcgtcgataaattccaggggaatatcgtacagttgcgaccagctggcaatctgttcagcggtccgccgcagctttgtatcgtcgtcaagccaatcctcacggctcattcgcgcgtaaccggtgaggctgatgtggagacaacgggcattaccggtggggccggcggcatacggcataaaatcatctgtattgcacaaaattaaaatgccgtcggcgccggcgagcacgttatagcttgacccgttggcggggtttgtctgccactgggccacagcaatcccgtcccgttccggcggacattccacggtatggacgcaaatcgactggatactgtcgatcgaccggtaacccacgcccggcatgtccgcggtgaagtcggcatcgtagcgcaccacgatcggcccggacgactcgggctgcgactgcggctgtggcgcaacttcggacacgggtttttggccccagtagtggtgccagacgtcattaacatcgcattcgataccgccgacggtgacctgaccagcccgctgaaacaggactgcttcatcagacaattcgccccatgaccaggcgattgtctgccacgccaggtgttttccgccgcccaagttggcgatcacgccgtcctcgaccgcccaactgattacgcgggaatggccatagatcccgactctttcgcgccccaggatttcgcaacaggcccgaaaatattcgaccgccgttacgttccactgttcgagcgtgatggcaaagtccacggcgaaaaacacgggatggttgctgcagccgagctcgtcaagtttttgtttggcggcgcgagcatcggcaagcccaccgtcgcggccgcgcataacgtcggaatcggcctcttttccgtattgccagacgaaagccacgtcgaggccatgaacatgaaaatcatcaatttcggcacgttggatgggttttccgcgcatccaatccgcacgcggcggactaatatatctcaccgcgccgtcgtatccggcgtcacggacggcggcagcctggggaaccccggcgctgtaatctagtacggttgccatcgcatttcctccaattatgcaaaaccccagcatatttgctattttggggtggtagttgggccccataatactgattggtacacccgaattgggggctctggacaagcatctcccgcaacaccctggtgttgagtagcacccaatcgcggcaataatgacaaattgtcacaccaaattgcggctagcaagatagtcatgtagcagctttacgacgctctaaagtgcggaaaataagatgaataatttataaataaccaaatatgtagcaaaaatggtacgaataaattgctcaacaaatctgggacaattttcccaaccaaatagtggaaatgtcaacattaactgggattttacctaaagaaaaacttctacccctatggagccttgtcacttccgccactttgtatagttatttgcacagtaatttatcccctcaattacccctatttgcgattttctaaataagtcttgcgaatcaaggtttttccttttatcattgcttgcagagttgaacctcagtaagtgtcggctagtttccggcgcagaatgctccagccgacggacttacctccgtcggctttctttttacgaaaggattcgccttgaactcggcaaacgtgaactaccgggtgggaatcgacgttgggtcttattcccttggcatggcggccatcgccatcgatgatgatggaaaacccacggaaatcctcagcgctatctccctcatccacgactcaggtgtcgacccggatagcgccaaatccgccgctactcgactagcgacctcgggcatagcccggcgaacccggcggctttatcggcggaaacgcaagcgtcttgccaagctcgacaagtttattagctcccagggttggccgctcaaggagtttgagaagtacgaggacccgttttacccatggcgggtgcgggccgagttggccaccaccgccatcaccgatcagcaagaactgggcgaaaagctgtccattgccctgcgccatatcgccaggcaccgagggtggcgcaacccctacagcaaggtcactgccctgtataccgtgacggaaccatcagatgcctttttagcaatgcaggaggaatgcgcgaagtagctggggcgaaccatcccggaaaccatcacggtaggccaactggtaaccggcatgaatctgggcaagacaaggctgcgtggcgagaatagtctgttagcggccaggccacgacaaagtgacaatgccaacgagattcataccattgccaaggttcaaggcctttccaacgagctggtaaggcagatcattgaccacgtgtttgcggccgagtctccgaagggttcagccgcagagcaggtgggtaaggatcccctgcaacccacgaagaagcgcgcactgaaggcatcggatgcgttccagcagtatcgtattgcggcattgatcggtaatttgcggatccgcggcggtaaggggaatcggcgcctcaccaccgaggaaaccaggctggttttcgattacctgcggagcttgcctgctaagcaggagcccacgtggcagctggttgcggaacagctcaagatcgaccgcggcaacctggtgggtaccgcaatcatgactgatgatggtgagcgcgccggggctaaaccaccggttcacgatactaaccggatcatggaaaacacgaagattaagccacttgccacgtggtggaagtctgccgacgccgatgcccgggcagccatggtgaaggcgttgtcgaacgctgaggtggatgattttgattcccaggctggcgcccaagtgcaggagttctttttcggtatttctgacgaggatcaggagaagcttgatgggcttcacctgcccattggtcgcgcagcctatagcgaggacactcttgatcgcctcaccaaacgcatgattggcgagggcatggatttatatgaggcgcggcaggcagagtttaagatttcgaatgattgggcaccgccggcaccggaaatcggcgagcgggtgggaaatcctgcggttgatcgggtgctgaaggcaacggctcggtggttaaacgcggcggaacgccagtggggtgccccaaagtctgtcaatattgagcacgtacgggctgctttcatgagtgaatcaagtgcgcgggaacttgaccgggacaatcaacagcgtgcaaagcggaatgtaaaagtggtggccgagatgcaggaaaaattaggcatcgagggtcgaccaagccgtgcagatgtctggcggtttcaatcaatccaacggcagaatggtaaatgcgcatactgcggagcagagattagctttaagaattctgaaatggaccacatcatcccacaagcgggtgaaggttccaccaataccagggataatctcgtcgcagtgtgccgtgagtgcaacagttcaaagtctaatatcgcatttgcggtgtgggcagaaaatacctctcgacctggtgtctctgttcaaaaagcgatcgaacgaactcaccactgggttacggattctggcctgcgtaaacctgaatttgataagttccgtaagcaagtgtgcgatcggctacggcgtaaggccaccgatgagccgattgatgctcgttccttggaatccgtggcgtggatggcgaatgagctccgctcccggattgcgcaaaagttcaaggatggtgacacaaaagtccgggtgtataagggtgctttgacggctgaggcacgaagggcctcgggtatttccggcaaattggaattcgtcgatggtaagggtaagtcgcggttggatcgccggcatcacgcggtagatgccgcggttgttgcgttcacgtcgaattatgttgcggaaacgctagcactacggtcgaatatgaaattcgaccaggagctgcgccgcaaagcgccccaatggcgggaatttactggctcggatcatgtgcatcaggttgagtggaccaagtggaagtaccgcatgcaggccttagcagaactattgaataatgcactcgtacaagatcgcattgttgttatgcataacctgcgtctgcggcttggcaatggtgcggcacatgaagacacgattggcaagttaacccggctcaaggtgggtgacgcaatctctactacagatattgatcgggcatccagcgaagccctatggtgcgcgttgacccgtgacccagattatgaccccaagactggcttgccggaaaacccaaatcgaacgattcggattcatggaacacatcttacggcttccgatgaaatcacggtgttcccagtagccgctgcatccattcccattcgggatggattcgccaagctgggaagtaattatcatcatgtgcggttattccgcgttcccagtggcaaaaaatacaagtattgtctcatgcaggtgtacacggttgatcttctcaaattccgcaaagaagacctattcaccgtagagctcaagccacaaactattagtgttcgaacatgtgaagcactactacgcaaagcgctagcgaatggcactgcggaatatttgggctggctggtcagcgatgatgaactactcattgatacctcatcatttgatactcccggaattgtaaagttgcgagaagaatatggtcctgtcaatcgatggcgacttgctggcttaacttcagttacccgattgaatctccgacctctttacctcagcaaagagggattaaaacctaacgtcaatcccgaaattaaaaagattattgataatcgtagttggattatcactgtaaacaaactattcagtagcggccacgtcaaaattatccgccgagatgcgcttgggcgtcctcgactccatagcgcagctcatctaccaatatgttgggaagtgaaatgaagaaatgagtgacagtggttggcaagtcctcgacttcagtgacttcaaggggtcattgacgtataaacgaggtaatgtccatgtacgcaagcatgaagatggttccgaagtagatgtgcctctcgcccatgccgctgtggtgattaaagaagcaacgttcggaggccaatcggtttcggaatcacctgtttgacttgggtttttgtcgtgctcagttcagcgtatatgtgcagtatttaccactaggtgttcgactgcacatcctggcgaagagtattaaaaccgagctacctcatggtggtgacgtgcggtttttggctgtgacggatacacaatggtcaaaaactattcgatattccaacgctgatgaaacaaaagccgaggaaacaccgagccagcttatgattttttaaaagtaaaatcccctgatattacctgttcaaaccctatttttggggctataacaagtatatcaagggatttgagagttgaaccccagccgaagactggcttgccgacgaccaaaagcaagtatatcaagggatttgagagtcgaaccccagcagttatgagtgttgggcggaaagatccccaagtatatcacagagccgaaccccagcaaccccagtgatcctagcaatcatccaaagtcaggacccagtatatcggggtttaaaaatacaaaaaccctgcaaataatcaaacttcaaccggaacatccaatctcaacttggacaagcaaacatatcaataagaaaacacctttgtgctctcccctatactaaaatcccatatatccaatcattcgcagaaaaccggagcatgccacatgtcaatcattgttcgccgactcgcccaccgcacaggcaccgtcactgggtagcggaatagctgatccctgcagcaaacctcaacccacaacgcaaggttagttggcctgcagccgaacccatgacgcgcccctgagtgggcatatcacgccgcgccctattgatttccatcatttctggcgccggcgattttcccatgctttcccaaacctcatggagttcactgtgaaccaacccaccccggtgctttcggcacgccaactcacacgacgcttccgaaacaccaccaccgtcaacaacgtatccttcgaaattcaccccggccagattgtggcattggtcggcccgaacggcgccggcaaaaccacgaccgtgaaaatgtgttcgaccctcctggcacccacatccggcacaatcacggtatgcggcattgacgccacccgaaggcgtcgacaagcgaggcaacacatcggcatcatcctgggcggcgaaaccggcttctaccggcacgcttctgtcaaagataacctgctattctttgccgacgtcgcgggcgttccgtcacgcagccgccgatcccgagtcgaggaagccctcgcgcaggtccg

SEQ ID NO: 3992 - DNA, 23087 bp, synthetic construct
  source 1..23087: mol_type = other DNA
  misc_feature 1..23087: note = Synthetic
ccatggtaccgcccaccctaccgcgattcccgccccaaggaaagacccctgccgtcacaataatcgcccaccccacccgttatccggttgtaaccaaccctcgaggtgcgtcatgtggaaattgtggaccaaccggatactcgacttcctgctgtggatcggcttctgcctgatgctcgccaccggcttcatcatccgctaccgcctgccccccggcagccgcggcggccaggggctcggcatctggggctggaaccgccacgactggggcgaccttcacacctggctggcctggacggtgtgcgggttcgtcgtcctccacctcgccctgcactggaactggctgatgcgcaccgcctggccgaaggtcaggtggccggtcatcgccggcctgctcgccggggccctgctcgccgcctcggcctgggtcctgccggtggagaagatccgcggcggcggccacggcgagcacgccgaacacgcgtccccgtgaacgcacgccgcccttgacgcggccggtgcgccccgtgtatatttcgccacatgacgaaatataccgacgaccccctccgccgctcggcccggctgttcgcggcgctgtccgacgagacccggttgcgcctgctgctcgccctgcgcggcggcgagttgtgcgtctgccagctcaccgcgctgctcgacctcgcgccctccacggtctcgaagcacctgtcgctgctgcgcgacgccggcctggtcgatgcccgcaaggagggccgctgggtgtattaccggatggcggtgcgcgcggattttccagtggttggaaaaaaggccccggcggttttccaggccctggaaggttcggcggcggcgaagcgcgatgcgatgaacctgaaacggatctgccgggaggacatggaaacgttgtgccggcggttgggcgaaaggaaacgcgtatgagaacgatcgaggtgtatgacccgccgatgtgttgctcgagcggggtatgcggtccggcggcggacccgaaactggtgcagttcaaggcggcgctgaaggcgctggagtcggatggccacacggtgcgccgcttcaatccgacccaggaccaggcggcgttcgcgggaaacgcgcaggtgaacaaggcggtggaaaccgggggcatgggctgcctgccgctgatcctggtcgacggcgcgatcgtgagccgtggtgcgtacccggagctggcccggttgcgggagctcgcggccggatgagccacggcgcggtaccgctgacggcgctgctcgacaacgccccgcgtttcctcttcttcaccggaaagggcggcgtcgggaagacctccttgtcgtgcgccaccgcgctggcgctggcccggcgcggacgccgcgtgctgctgatcagcaccgacccggcatcgaacctctcggaggtgctcggcgtgacgctcggttccgccccgcgcaccgtgccggaggccggcggcttgtcggccatgaacatcgaccccgaggaggcggcgcgcgcctaccgggagaaggtcgttgccccctaccggaccagcctgccggcggcgatggtggcgggcatcgaggaacaactgtcgggcgcgtgcacgacggaaatcgccgccttcaacgagttttcgcgcttcctcggcgatcccgacgcgacccggggatacgagcacaccgtgtttgacaccgcaccgaccggccacacgctgcggttgttgcagttgccggccgcgtggcagcacttcatcagcaccaacacctccggcgcgtcgtgcctcggtccgctttctggattgagcgaacacaaggacctctatgaacggaccctcgcggcgctgtgcaatcccgcgaccacgcagctgatcctggtcagccgcccggaacgcgccgccctgtccgaggcggaacgcagccgggatgagctggccggcctcggcttgcggaaccttcacctggtcctgaacggcgtgatggacgaagggtccgatgatgcggtggccgccgcgatggcggcgcggcaacgggccgccctgcgcgccatgccggcgggcattgccgcactcccccgcagcaccgtgcacctgaagtccttcaacctgaacggcatcaacaccctcgacgcgctgttcgatgcgaccacgggcgggcacgatgcggccccgcctcccggcagcgagggcggggatcccgccgcggaaccgctgggcaccctgatcgacgacctggcgcggtccgggagcggcgtcatcatgaccatgggcaagggcggtgtgggtaaaaccacgctggccgccgccatcgcgctggaactcgcggcgcgcggacaccgcgtcctgttgaccaccaccgatcccgcagcccacctgaagcagacgctggacggtgtggcggagcacctggaggtcggacggatcgatcccggggcggtgacccgcgcgtatgcggaggatgtgctcgcgaccgccggcgcgggactggacgcggaagatcgtcgcttgctcgatgaggacttgcggtcgccgtgcaccgaggagatcgccgtgttccgcgcgtttgccgacctcgtggaacaggcgcaggaccgttttgtcgtactcgataccgcgccgaccggacacaccctgttgctgctcgacgccaccgaatcgtaccaccgcgaagtgctccgcaaccagagcgcgatgccggagccggtcaagcgcctgctgccccgcctgcgcgatccgtcgtacacgcgggtcctgatcgtcacgctgccggaattcacgccggtgcatgaagcgaccatgctgcaagccgaccttcgccgggccggcatcgaaccctatgcgtgggtcgtcaaccagagcctgcagcccctgtcggtcacccacccgctgctggccgcacgacgcgcccatgaacgcccccacctcgccgaggtccgccgccagagcgtgcgccggtgcatcgtgccgtggctgtcgcgggaaccggtcggcatcgacggattgcgccccatcacccaacccgacacggaggtatcacccacaccatgaacaagctgaagatcctttttctctgcaccggaaactcctgccgcagccagatggccgaaggctgggcccacgcgctgaagagcggcgtgatcgaaccgtattcggccggcatcgaaacccacggcatgaacccgaacgcggtcaaggtcatggccgaggcgggggtggacatcaccggccagcgctcgaagaaggtcgatgaactgatcgacgtcccgctcgacctggtcatcaccgtctgcggccacgccgacgagacctgcccggcctggctcggccggaaaacccgcgtcgtgcacgtcggatttgacgatccgcccaaactcgccaagtcggcgaagaccgaggaggaagcgctggcgcactaccggcgggtacgggacgagatcaaggcgtttgtgcaaggactgccacagaatctgaagcagggataagtcccacggatgcccttggcatccgtgggctccccctcttcatccatccaggagatcataccatgaatccgtcgaatgaccgtaccatgaccagcctcttcgaacgttacctgaccgtctgggtcgggttgtgcatcgtcggcggcatcctcctcggcaagctggccccgggactggcgaaggccctcgacggcatggccatcgtggtgaacggcgcgccggtggtatcggtgccgatcgcgatctgcctgttcttcatgatgtacccgatcatggtgaagatcgacttcacgcgggtggtgaaggcggggcgcacgcccaagccggtgctgctgaccctgttcatcaactgggcggtgaaaccgttcacgatgttcgtcatcgcctcggccttcctcgggtggtttcacgcgctggggctgatccccggcacggagatcgtgaaggacggcagcgaggtgcccctgttccgctcctacatcgccggggcgatcctgctcggcatcgcaccctgcacggcgatggtgctggtgtggaactacctggtgcgcggcaacgacgggctgacgttggtcatggtggcgatcaattccctgaccatgctgttgctctacggcgtgctcggcggatggttgctgggcctgaacgagatgccggtgccgtggcaggcgctgctgctgtcggtcggcgtctacgtggccctccccctcatcgcgggttacgccagccgccagtggatcctgcgcgcgaagggcgaggcttggttccgcgagaaatttctgcacgtgctgaccccggtttccatctccgcgctgctggtcacgctggtgctgctgttcagcttcaagggcgaagtgatcctcgcccagccactgaccatcctgtggatcgcccttccgctcctcgtgcagaccgtgctgatcttcgcgatcacctacgccctcgcccgttggatcaagctgccgttcgaggatgccgccccggcggcgatgatcggcgcctcgaaccacttcgaggtcgccatcgccaccgcggtcatgctgttcggcctcggctccggcgcggccctcgccaccgtggttggcgtgctgatcgaagtcccgctcatgctggcgctggtcggcttctgccaacgcacgcggcactggtttggcaacacggccgcacgccaacaggtctgaatccccgcggcggccttgaccgcgtccggggatggtgggatgttcgcggcgtgccgaccgacacgatatacctgctgatcgccgggatcttcctgatcggcttcctctattcctcggtgggccacgccggggcatcgggctacatcgcggttatgtcgttgatcggcatggccccgtccgagatcaaacccaccgccctgttgttgaacatcctcgtcgcctcgatcaccgcctggcagttttaccggagcgggcattttgcgtggtcgttgttctggccgttcgccgcgctggccattccgtttgccttcctcggcggctacatcaacctgccgaccgcctggttcaagatgctggtcggggtcatcctgctctactcggcctggcggttcctcgcgaaaccggcggaagcagccacgaccaccccgccgcggaaaccggtggcccttgccacgggggccggactcggcctgttgtcgggcctgaccggaacggggggcggcatctttttgaccccgctcatgctgttcatgcgctgggccccggtgaaacgggtggctgcggtgtcatccttgtttatcctggtcaactcgaccgcggggctcgccgggaactggagcagcacgcagtacctgcccccggtcagcctctggctgctggtcgcggccggcatcggcggcgccctcggctcgcacttcgggagccggcgcttcaaccccgccgtcatcaaacgcctgctcgccatcgtcctgaccatcgccggcgcgaagctgctgttcggcgggtgagctgacggcccgaaaggctatcgcccctccacgatcatggatcgtatggtctccgtacccgggcccgcatgattctgaattgcccgaaatcgcgccaagatctgatccggcgaaagggcgccgtggtgttcgggggaatcgtctggacacgaaagtttggctacgctctttccctggtgtttgatgaccacgctatggccttgttcgatcaattgcaacagatgagaaaacatcttttccgcttcgatcgactcgatctctatggttttcacatcaccagcttgtttgtctgacttatgcatgtcaacgctggcgaacggattagaaagcttgatgcggcctgacggccccactacaaccgttcgtagtgacgccgtgaggcgtcatggagaaccaccaacatggcacgcgttaccatcgaacttccctccgcctggaccttcagcatcgacatcccggtgcggatcaccgacatcaactacggcaaccacctgggcaacgattcgttcctgtccatcctgcacgaggcgcgtatgcggtggatccaccagcacgggtggacggagttgaacatcgagaagaccgggttgatcatgatcgacatcgcggtccggttcaaggccgaggcggtgttcggtgatgtgctgcgcgtgcagctcgcgccggtcgagtggtcgaacctcggcttcaccctgatctacctcgccacccacgcggtcaccggggcggaagtcgcccgggcccagtccggcatggtgttcttcgactacgcgacccgccgcctgacctcgatgccggccgtgttccgcgaaaagctcggcggctgatcacccgggttcgccggcatcgaccgggtcgcgggtcggggcggcctagtcgcccccgccaactaacacgtgaccgatcccgttcctgcgtggtaggcttgacccacttcgaaacaggcaggaggaggctgaacccggagtgacaccgtctgacaacaagtccgccagccaagccgccgcgtcgccggccggccaccccacggttgtgtccaaccacctgaacgccctgctggcggcatggacggcctcgtggcgagccgacctccccgccgcgatcgaactggttctcgccccctgcccacaaccgctccattcccccgtccccgctccgatgattcggacggtgctggacggcctcgttcagcgagcccgccagtccatcggcgaccggtccgggcgcatcgtcctccaggcgcgcccgtccgaacccggcgaagacaccccgctcgcctgcgacctggaacatccgtttatcgaactgtccgttggcgacaatggaccgggatccgatgccccatggcccaaccaggctgcccttggcgccacgttggccgcgcgcggcggatacctcgaggtgggccaccgcaccagccagggttccgtctcccgcatcctgctcccggccgtcagccaggagcgcgcccagcggttgcgcgccccatttccggcccacatcctgatggtcgaggatgagtggaccattgccacaccgaccaagctgttcctcgagcgcgccgggtaccgggtcagcaccgcgtccgatgccgaacaggccatcgccctcgtgcacaatcaacggccatcgatcgacctgttgctcaccgacatcgtcctgcccggcatgaacggccacctgctgctgcgcaccctgcgcgccgacctccccgacctgccctgcctgttcatgtccggctataccgccgaatcactgaacaacctgcagcaaggcctgcaccgcaccctgttcatcggcaaacccttctccagcgaacaattgctgaccgcgatccattccatgctcgcccctgcgggcgtggccggaaacctcgaacgtccctgataaagattagtttgtatccttgttggtccgttggatttgtccaagaatggcagtacaagaaacgattcgaaggagggagctcatgagtacatcggaaaacgtggagtcggtacgggtggcgatcatcgaggacgacgccctgttgtcatcgctgctgacctcgtggttgaatgccaagggcgcctggtccgtggtcggcgtggccgcctccggcgacgaaggggtcgccctgtgcgaacgcgagaagccggcgctggtcctgctcgacctcgaacttcccaacaccaacggcatcgtcatcgccgagcaactgatggagaagatgcccggcatcaagatcctcgtgatcaccagccacaccgacccgtactggatccaccagatcacccgcctcggcctgcacggctacgtgaacaagacgaactcgctggacgcgctcgacaaggccatgcagcacatcatcgccggcggcacggtgtacggcgaggagttcagccaggcggtgcgccgcctcgcctcgcccgatgcgtaccacaagatcctgaccccgaaggaactcgccgtgctggccaaggtgtcgatcggctggaccgaccagcagatcgcccaggagctgcagatctcccaccacaccgtggcgacccaccgacgcaacatccgcgtgaaactcgacgcccacggcgaccgcgacctgatccgctacgccgaggagtggggcctgcgcggcatccagtaggccgcccgccgcgaccggagaacgccgatggaagggctggccatcatccgggacgaccgcgtggcgtacgcgagccgttcgtttgccgcgatgttcaatgccgccgaggccgacctgtgcggcctgcggtggaccgacctcttcaccacctccagccccgactacgggcgtttcgcctggcccgacctcgccaccatctcccgctgggacggcaaggcccgcggccacgcccgcaacggcagcctgttcgaggccgacctgcacctggtgaaatcccccggcggcgactgggtgctccacgcggtcaacacgaccatggaacaggccgaggcccgcgaactggcccgccgcagcgccgaactggaacgcgccacccggatgaagacccacttcctcgcctcgatgagccacgagctgcgcaccccgctggccggcatcctcggactctccgaagtcctgcgcgaaggtatctacggcgaactccagccgaaacaactggaagccatccgggcggtggaagacagcggacgccacctgctcgggctgatcaacgacatcctcgacctgaccaagatcgaggccgaccaggtggtcctcgatcgcaaaccgaccgccctgacacccctcgccgaggccgcgatgcgcatgatcaaatcgcccgcggccaagaagtgcatccagacccgctgcaccgtcaacccgcccgacctcgccgccgaactcgaccccgcccgcttcaagcagatcctggtgaacctgctggacaacgcgatcaagttcaccccggtcggcggcaccgtgtccctcaccatcgacggcacccgcgacaccgacaccgtgctcgccgaagtgcaggacaccggctgcggcatcgactccgccgacttccgccgcatcttcctgccctttgaacaatccgaccagcaactggcccgcgcctacggcggcgccggcctcggcctccccctcgtcctgcgcctggccgaactgcacggcggcggggtgagcgtcagcagcgcgcgcggccacggcagcaccttcaccgtgaccgtgccgcgcggcgaacccaacgcgacccccgcccccgcacccggccacgacgaccccgccgacacgtccgtcccgcccctgcccgccggaacccgcatcgcggtgatcgaggacaatccggtgaccagcaaactgctctgcgatttcctgaacgggaacggctgccgctgcgaagcattgctcgacagcccgaaggcgctggaaacctgccgcaccttccagccccacctcgtgctgatggatatccagatgccggtgatcgacgggttcgaactgaccggcctgttccgggcctccggcgacccgaccctcgccaccgtcccgatcatcgccctcacggcgctcgccatgcccggcgaccgcgaacgctgcctcgccaccggcatgaacgactacctgcccaaacccttccgcctccacgaggtctacgccgccctcgcccgcgcacgggccgcgcaggcctgaacccggcatggcaggatcttcataccccgaatccggacgttgaaaccacggatacacacggatcaacacggatgtacaagggggtgcgcggtgtttgccagtgcacggaaaagctcggttttatcgcggtagaaatcatcttcggaatcccacatccgtgtgcatccgtgtcgatccgcggtgaaatcactatcggttttcgggcttaacgccctttccatccgagctgtccgcgtaacctacacgttctaataatcgacccgaaaacatttcattgcttccgattgtgtcgttttgggaataaaaaagcccccgggacgaacccgggggcaggttgctcagcgagcaattccttacgaactaaagttcttgcttgtgattagcaaatccaatagccgctcagatacattatttgtactatggaatgtggaggccgtttagacaaggagattcgtatgagcaagagcgtatccaccattctcgggcttgatattggtttggcatccgttggatggagcctgatcgagacacacgccgacattcccacgaagatcattcaagccggagtccgggtgtttccgatgggcatggagttggatgaccgcggcaaaggaacctcacgcagcgtcgaacggcgagaggcgcggttgcgccggaggcaactggatcgccgggcgatgcgcaaagcgcatattcgcaagctgttgtttgtcaacaacctcgcgccggaccgcaaggcggatgcgcaggcgtggcgcgccttcgaggggttgcaaccgtatgaattgcgggccaagggcctcgatcaaccacttaccacccacgaatttggccgggtgatctaccacatggcgcaacgccgcggattcttgtccaaccgcaaggcccccgaacgcgaagacgacaaacccggcgaagtgaaacaggccacccaggcgctggagacggaaatgaaggccgccgggtgccgcaccttgggcgagtttttcagtaaactggatccacaccagcaaaggatcagaaaaaactataccctccggcgctggtacatcgaggaattcgatgcgttgtgggctgtccagacaaaggccgccccggatcgcttccacgaggcgttgggcaaacagcttcgccaagccctgttttatcagcgccccctcaaaatcaaggagggctcggtcggaacgtgtgaactggaagcagggaagaagcgatcccgcatcgccctcctggacgcacagcggtttcgcctgttgcagcaggtgaacaacctgcggctggaaaccggaccgggcaaggagcgggctttgaccccggaagaacgcgcgaagatcatggagatgctggctaccaaggcatcggttaaatttggcacgatccgaaaggccctcaagattcgtggcgatttcaacctggaacgcggcggctcggaagccttggtcggggatgcgactaccgcgatcatcaccgcgaaaatcggttcggcctgggacgatcttgatcgcgcggaacgggatcaactcgtgaacgacatgctcagcatcgatcatgccgaggtgctgaagcgacgcttgatgacgcgttgggcgcttgacgaggcggctgccgacgccctctccgaagtcgcactggaggacggtcatagcgccttgtccatggccgcgatcagcaagctgctgccccacatggaggctggcgacccgtacatgacggccgtcatgaaggcgtatcccgacaacgccaactggaaaccggcggacgaagtgccgccctttccaaacttgcgcaatccgcttgtgcagcgctcgctggccgaaacccgtcgggtggtgaatgccatcgtgcaacgtcacgggaaacccggacgcatccgggtggaactggcgcgcgacctgaagaaggcggccaaggaacgcgaatccgaatggtcgcgcatgcgtgtgcgcgagaaggaacgggccgaagcacgcgaggccttgcagcgcctgaaggaataccacatcgccaacccgaaagcgtcggacatcgagaagtggctgctgttcaaggagtgtggcgggatgtgtccgtacaccggcaaagcgatcacccatgccggcctgttcggggaacatccgcagttcgatgttgaacatatcattccgttcagccgatccctggatgactcgttcggaaacaagacgctgtgttgcgtcgattacaaccggaacaccaagaagaacaagacgccgtatgaaacctcgggaggcacacctcaatgggaggagatcatcgcgcgggtaaagaagtttaacggggtctatgccgaggccaagctgcggcgttttgtgttggagaatgtcgccgagggtggcgcgttcctggagaatttctcgcagcgagacctggccattacccggtatgcaaccaaggcggcttatcaggccttgtcgcgtttgtatgcgccgggcgaagcgaagtcgcgggtggaggccactcaaggcgtggccacgtcatacctacgtcgcgcttggcgactcaacaacgtgcttgggttggccaatgaaaaaacccgcgacgatcaccgccagcatgcgattgatgccaccgtggtggccctgaccaaccgtagcaccgtcaaagccctggccgatgccgcagtcatgggccgcgccggtgcattcaccccgatccccgagccgtgggaagggttcaaggaagacctggccagcacgatccaagggatcgtcacctcccatcgcgtcagcaagaaaaccaacggaccgctgcacaaggaaacctattacggcatcattaccgatccttcagacctcaagaccaaccgggccgtcgttcggaaggacgtggcctcgttgtcggacaaggatgtggccggcgaggtcattgtggacccggccgtgcgcgatgccgttcgcgcccggctatcggagctgggcgaaagcgatcccagaaaggcgttcaaggatcgggcgcagcatccgtacctgaccgcaaaagatggccgcaaaatcccgattcacaaggttcgggcatttcagaagtgcgatcctctcgcccttgaaacagcaccgggaagccggcatgtcgtgctcggcaacaaccaccatgtcgagtttttcctggtgaaagacagcaagggaaatccgaccctgaaaagcgcggtcatttcccagctcgacgtccgtcgtttggtcgccaaagcccggaaggagaacgtcgctccggtcatcgttcgcaaggccgacgaggaaggcaacccgctggcgttttcgttggccatcggcgaggttgttgttcttgacgacgaaggaacactaaacaagttcgtcgttcagaagttgtcctcaagggattatgtattcaagtctcttaatgatgcacgcatattcaaagacatcccaaaaagtgaattggtacgcataaccagcgacagtgggcttatgcagaagttcaaaggcaagcttatctgcgatcccctgggccacacctaccgaacgcgtgattaaccgcatcatcgagatatccgaaggcggatatttccttcgggtcgaggatcgccagctcgtgctggaaaaaaaaagcgaggcggcgaaacgaatccccctgtgcgatatcgccgtcctggtgctgggcacaacgtgggcaacatactcccacacggttctgtcgggattggcggaagaaggcggcgtggtggtggttgcggacgggcgcggcatgccggtttcgttgctgttgccgatgtaccaccgaagcttgcaagcccagcggctagcccagcagatcgcggcaagcgagcccctgcgcaagcgtctttggcagcaggtggtcgaactcaagatcgaaaaccaaggccggttgttacaacacctgcatggtgatgatttcggccttctggccaaggcgaagcaggtcaagtcgggcgacaaggaaaacctcgaggcacaggcggcgcgtatttattggtcccggttgtttggcgatcccggattccggagaacccccggagagggtgagcggcccaatcattttctcgattacgggtatgcggtactgcgagggattgtcgcgcgggccatctgcgcctccgggctgcaccccacgctgggattgcaccatcaccaccgcgacaactcgttttgccttgcggatgacgtgatggagccgtttcggcccttggtggaccacgcggtatgtcacctggttcgcgaaggaatggcgaaagccgacctgaaccgggataccaagtcgatcctcctttcgccgatgatgggcagactggtgtgggagggcaacaacctgaccttgtttgatggcctgtcgatgcttactgcgtccctgggtcaacgattcgctggcgaggatgtggaattgagccttcccgcgcccctttccttcgactgagttcctcgtgatcccggagtacaaaggcatgtggcttattgccatgttcgatttgccggtcgatacccaagctcgtcgccgcgcctatacgcgcttccgcaagaccttgctcaaggatggcttcaacaaactccagttttccgtctatgcccggttctgcgtcagcgaggacgcaagcaaggttcaccgcaagctcatccgggacgaattaccggaggaaggggaagtccgggtggtcaccctgaccgaccatcaatttggaaaaatggaggtgtacttcgggaaaaaacgaactccaaccgaagaaaagccgcttcaattggagtttttctaacgcggaaggccgcaaaaaggccctgtttttattgctaaaaacagggccagtaatgtatctgagcggccattggctgccaaccacagctgtaatgatcgcgggtaaaacagggaggcaaatgtatctgagcggccattggctgccaaccacagctctaggggtcaagggccaaggatcggcggcaatgtatctgagcggccattggctgccaaccacagcggagcccgctgctctcccgccggatctcccaatgtatctgagcggccattggctgccaaccacagcgatgctggtgcagatggcggcggctacccaaatgtatctgagcggccattggctgccaaccacagcaagatcaccgcagagggcgtcgtggtggccaatgtatctgagcggccattggctgccaaccacagcgtgatgtcgaatacgccatcgacaccgaggaatgtatctgagcggccattggctgccaaccacagcggccgtggcgttggtctcggccgcgtccacaatgtatctgagcggccattggctgccaaccacagcgtccggcatggctggcgagatctcctgcagaatgtatctgagcggccattggctgccaaccacagcccggagggggtcggctcccttcctctcgataatgtatctgagcggccattggctgccaaccacagcaacccgcccccgtcatgcgcgacgcatcgaatgtatctgagcggccattggctgccaaccacagcgtgcgcgctgcgggttccgatggatgccttaatgtatctgagcggccattggctgccaaccacagcgccgacggttcagcttctccgcgatcgccaaatgtatctgagcggccattggctgccaaccacagctgggtggcgatggtggtttcgtgctcggtgaatgtatctgagcggccattggctgccaaccacagcgatcgcgcgtttggtcccggcgcttggcgcaatgtatctgagcggccattggctgccaaccacagccctgttcgctgcccagggcgaaactcgcgcaatgtatctgagcggccattggctgccaaccacagcgtaccgcatcagctcctcgagcgggattacaatgtatctgagcggccattggctgccaaccacagcgcactatgcgcgcactggtcatgcaaccaaaatgtatctgagcggccattggctgccaaccacagcgttccccagcacgacggacacggcttgctgaatgtatctgagcggccattggctgccaaccacagcgggcgacggcacggcgccgcacatcgagcgaatgtatctgagcggccattggctgccaaccacagctcttgtattacataggctactgattccccaaatgtatctgagcggccattggctgccaaccacagcccggccgtggctgtatcccccatgacagccaatgtatctgagcggccattggctgccaaccacagcctgattgccttgcaggaacgcgacctcgacaatgtatctgagcggccattggctgccaaccacagcggcaaggccgtcgagcagctccggcacggaaatgtatctgagcggccattggctgccaaccacagcacgttgtggatattgctcgccgaacctacaaatgtatctgagcggccattggctgccaaccacagcccgtcaatcactccaacggcgtcaccaccaaatgtatctgagcggccattggctgccaaccacagcgacatcgcgccgacgaccaacgcgatcacgaatgtatctgagcggccattggctgccaaccacagcccatcatcatcggcggggaaaccctctacaaatgtatctgagcggccattggctgccaaccacagcccccggtcgccccggttgatccgtcatcgcaatgtatctgagcggccattggctgccaaccacagcatgctgccggggatggacgtcggcggcgcgaatgtatctgagcggccattggctgccaaccacagcgccatcggtaagggcaaaggcctcgaggttaatgtatctgagcggccattggctgccaaccacagctccactccgtgatagcccacgtcgtaggcgaatgtatctgagcggccattggctgccaaccacagcaatcgggatgggtggcatccgtaaggcgaatgaacgagtgcagcttgcgctatcggtcctgatcccgttactggagtagcctttgtgttcttccttcgtttgaaattgaagttcaataagatcagggtaaatagaaacaccatgaacctgacggaaaaacagaaggaaaacctggcgaagtctcaccaggctgcacaccgcgcactggccgaagcggcccgcaagcacagggaaaaggtcgccaagaaaaagccgcagcaatcaccgtcgacgatgatgacgctcagcaaacgaaccgcgacctgatgtcagggcggcgggacggctgacgacgaacggccggatcaaacgacccgctagcgcgcttccagccaggcctggtcggcggtgctgagccgttcgaccgggatccgcaccgtggttccgtcgcggcgttcgagcacgaccacctgggcctcgcgaccggccagccgcgcctccagcgtcttgccgcgctggtcggtccaggtgcggaacggatccgcatccgccgccggcgcgggcggcggctccggggcccgctcgacggtgaacgccagggtctcctcgttgaaccggaagcggtaccagcccgcgagcggttccgcgctcgcgaccttgccgccgagtcgcttgagcgtcgcgggtttcccctgctcgacttcgtgcccgtcgtaggccgcaccccagaagatcaccccgtcctcgttggcggatacggtgaactgcggcgtcgccccgccagccacctcgacttcgccctcccatacatgatccgcgaccaggcgcagcggccacgccgtcttgctccatccgttggcgtcgctggaaatgtgcatcgccgcatacatggaaaagggcgggcgcgccggggcggtctcggccaccggtgccgccggtgcacgccccgcccgcggccgctcgaccagcccgtagatccgcgcactccacggcggcagggtggtgcgcgccatcgccgattccccgcgcagggtgaacggcttgggcgcggcgttccgcgtcgcgccgccgtagttcgcatcgtcggtgtcgagccgcagcacccacggaccggccgacgggaacggcacgacgacctcggtcggcgtcgaggcgaggttggccgcgatcacgacgacgtcatccggtgcggcggccgaccagcgccagtacacgatggacttcgcctcgtggtcgatctccgggatgcgcacctcgcggccggtcagcgccaccgtcgcgccgccgcggttgcggcgcagcgcgatcaggtcgcggtgcagggcgagcaggccggcgtggcgggtggtcttgccccagtcgagcgggacatcgtcgtggaacgtgccggcctcctggaactcgttgcccatgaagagcagcgggatgcccggcgcggtgaaggtgaacagcgcaccgaggccgctgagcgcgcgcgccttggcgccgcccggattggccgggtcgatgtccgaggcgatgcgctgcatgccgttgatcttgccggcctcgtcgtggttgtcgacgtagatgacgcggggcatgccgccgctccggccgatcgcgttggcgagcttgcgcaggtcgcgctcgtcgtcggtgcgcgcggacagggcgggcatgacctggtggtggaagtcgtagtcccacgaggcgtggaacgcaccgatgtcgagcgagtcctcggcaatgctccagcgaccggggaaacgttcgcggatctcgcggttgatgtcgtcgagcatggccgcgccggccgggatcggctgtgcgccgaagctgtgggcgcggatgttgatggtcgagtcccagcggaatccgtcggcccggtactcctcgagccacatcatcgcattgtcgcgcacataccggcggaccatcggctcgtcgtagcgcagacgcggaccccacggggtcatgccgatgccctcgccctcgtagaagtagatgccgccgttgagcccgttgccggtgccgtcgaactggagcaggtcgaggttctgcggaccgtagtggttgtgcacgatgtcgaggtgcacggtgaggccgcgggcgtggcattggcggatgaacgccttgagcgcgtcggggccgccgtaggcctgttcgacggcgaacgggtcgctcgggttgtagccccagctatgccgcccgctgaactcgtgcacgggcagcaggcagagggtggtgacgccgaggtcgacgaggtagtcgaggcggcgcgcggcgtcggcaaaggtggcgggttggccgtcggcgggtttcggatcgtggaacgccccgatgtgcagttcgtagatgaccatgtcgtcgagcgtctgcgacggggcgcggtggccggtccagtcgaaggcggccggatcgtggaacaccccgtggcggccgtccggggtgaccgcgcgggcatacgggtcgcgcttgaccgaggtgccgttgatcaggaacgcgtagccaccgcgtgggcggctgcgcttgatggtcaacgaccagatgccggtggccgcgtccttgaccaactggtcgccctgcatcgccttccagttgttgaagtcgccgatgaccgcgaccgactgcgcgttcggcgcccagacgcggaaggtggttgcaccttcgccgccactcaccccgagcggttcctgtgcgcgcgacggggcgctcgtcacggccagcagcatcagcagcaacagcacgcgaaacatggcgggttactccgttttgaccaggtcggcatagaccgcagcgaggcggcggcggtactcatcgaagttgtagcgctcgtcgatcagccggcggccggccgcgccgaaccgtaatcgcgtatcctcgtcggcgatgagccagttgatgccggcggcgaaggcgggcggcgtggcctcgacgagcattgcgaaggagtcgtcgaggatcagccggttcgattcgttgttggtggcgacgatcgggcgcgcggccttcaggtagtcgagcagcttcagcggcgtgttgatgccggcgcggcggggcgacagcaggatgtcggcggcggccatggtgtgcggaagctcgtcgggcgggaaatgcccgaggaaggtcacgcggtcctcgatgccgtggttgcgcagccaggtgcgacgcgcctcgatctccggttcggagccgccgatgatcacgaaccgcgcctggggatgctgctgcaccacgtagggcatgctgtcaaacagcaggtcgaggccctggtacaccgcgaacgagccgacgtacatgacgagcacttcgtcgggcttctggcgcatgcgggcacccagcgcggcggcgcgtttcgcgtcgggttcgaccagcgaggacgggatgtcgaagatatggtggaccggacgtcccggcgcggcggcgcgcgcctgctcggcgaggccttcgccggtggcgatgatcgcatcggaccggcgcatgacccagtgttcgacggcgcggtagccggccatgacgaggttgcgcaaccaggatttcttgtaggaggcggggtcggaatgtttctcgaacaccaaccgggccccgcagcaccgcgcggccgcccaggcgaccatcccggtgtcctcgataccgtggaccacatcgtaacggttacgacgggccatgccgatcgcggcgaacagcaactgcaggtcgaagaccagcttgggcagggatggaccaatcggatagcgctcgaaccgcatcggattgccgacccggtggatggtcgcgccttcgatttcccggccttcgccgatcggcacggtgagcacatcgacctcgaacccgcaagcgaccagggcctggatgtcgaaacccagccggatgggcgagccgcgccattggaaaaacggcagcgaggtgacgagcaacacgcgggggcggcgaccggtcatgccgggcctcccttgcgcatccgttggttggccagccagcggcggaccatgcgcaccggggtgtcacggcggccggtcacggtaaacaagcgggccccgagggcggcgcgcagcgacagcaccggacaggcgggatcaaaggagggaacgaggaccgcgtaccggccgaccgaaacagcgtcgtcggcaaagggcagcggatcggaaccggcgagcacgggcagcttgcggcggcggccacggcggatcagcggggaggcgggcagtccgcacgggcgcaacgtggtgtcgccgagcgcgagcggcgcggacgaggcggcctcgatcaatccgcgcaccaccgcaccgcggcgaccaagccatttgccaggtgaccacggcaagaccggcaacccgccagcgcggcggatcgccgcgacggtggcgtccgcaggctcgcggtcggggaagaggtccggggtcagcaacgccagcacctcgacgccttcgcgggtcaccacctggcggccggcgaacaaccatatccggtcggccggatcggcggcgcgacgcacggccacgacaccgggttcggggccgcgctcccacgtgtaaccggacgggagcgtggaacggcgggcggcgaggtcggcgaaaaaggaacagtcgtggcgctcggtcaggagcaggccgagttcggcggaggcgccggacggaaccagggcacgcaggttggagaaggcgctggcccaccacatgtccatggcgtacccggggtacgcatgaacgtgggtgtcggcgatcaacatgcgcgtgatgccgtttcgattagaacggcaggcgcagggcggtcgagacgataaacgcctccatcaccaggtcgcgggcggggccgagcgaggtggagatatccgccttctcgagatcgccctgataggcaaggccggcggaccagatgaagtccgggctgatggcgtagtcggcattgacgccgaagcggtacacaatgccgtcatcggcgtcgatatcgaaacgctggtcgggcgaggagtcgctgttgcgcgcggtgatcttcgacaccgtgctcaggtagcggatgccggcgtcgaggatgacgttccactcgtccgactggtaggcctggaagaggaccgaaccgccgaaggggatgacttccatattgccgtcgaaatcgtacaggttcgagccggggctgttcgcgccactgtccgaggcccactcgccatagccgatggccaacaggtacccccacggggcgctgaccatgtcgcgaaattgcagctcggcggtcaatccatactcgaacaggtcgtagtcaccgacaccggggataccgaactgaagctccacgcccagatcgggagagacttcctcgtaggtcggcaactgtgccgacgcggacaccacaccaacacccatcgccaccagaatcgccatccatgatttcataagaaaactccttctgttgccggatatggacacttgttgtgcaaacacggtgaaacactacgaaatggaatggcggttagcaaccacaaccgggcggtggtcaaaccgcggatggaggacgggaagaacacgatgtccatgatttctacgtgataaccagcccggtcctgttcgtgtcgattcgtggttgatccagaccaaccacgaatgaacaccaagcaacacgaatgacgagcttgccgcaggcgtccccatccgcgcacatccgcgccatccgcggttcctcccttcggtcattttcggcatgaaaagaatctccccattcgtgctcattcgcgtccattcgtggttgatccgaaccaaccacgaatgaacaccaagcaacacgaatgacgcgcttgccgcaggcgtccccatccgtggttcctcccttcggtcattttcggtatgaaaagaatctcctcattcgtgctcattcgtgtccattcgtggttgtttattccggcgggcaaaacaaaacgggcgcaccggaaacggtgcgcccgtggcgaacgaggttgtcgcgttgcggcttagcccttcatcgcggcctgggcggcggcgaggcgggcgatcggcacgcggaacggcgagcagctgacgtagtcgaggccgaccttggcgcagaacttcacggaggcggggtcgccaccgtgttcgccgcagataccgcacttcagcccggggcgggtggtgcggcccttcttcacggccatatccacgagctggccgacgccgctggcgtcgaggctctggaacggatcgaccggcaggatcttctgctcgaggtagtcgggcaggaacgagccgatgtcatcgcggctgaagccgaaggtcatctgggtcaggtcgttggtgccgaagctgaagaactcggcggactcggcgatctggtccgcggtcagggcggcgcgcgggatctcgatcatcgtgccgaccatgtacttcaccttggacttgcgggtcttgatgatcgtgtcggcggtctcgcggatgatcttctcgcagaagtccagctcggccttggtgcccacgaggggaaccatgatttccggcagcaccttgatcttgaggcgttcgacgttgcaggcggcctcgatgatggccgtggcctgcatgacgatcagctcgggataggtgaccgacaggcggcagccgcggtggcccagcatcggattcatctcgtggagctgcttcacgcgctgcttcacgcgctcaaccggcacgttcaggcggcgggccattt

SEQ ID NO: 3993 - DNA, 23216 bp, synthetic construct
  source 1..23216: mol_type = other DNA
  misc_feature 1..23216: note = Synthetic
atataaggaggtttcgccatgggatttacttggtcggtttggcgggtgcggcaggcgcagcgttggtcgaagccgcagcgggcttggccggggtggtaggcgaggcattcgtcgaagctgcggcgtcgggcttggcgggagcagcggcaggcggcgcgggtgcgggaagtgcgctgccgatctgggcaggttgcgccttcaaggtatcgacttcctttgtcatggcttcatcgatcgggatgtggatggtgcctttggcttgatcgacccaatccgccggggcattgatcgtgccgttctcctcggcctgaagtttttgcagcgtgaggtaacgatcattggaaatttgttgatcgtggctggtgtaggcgcgggtcatgtgcccggaataaccggcgatgatcgcgaaaatcgagaaggccgcgaggatgccgatcagccaagtgatcttgatctgggaaggtgatgcggtttcggtggacatacgctagttggtgacggtgaggcattcgaccatgcgcgggtcgcggttcgggaagagcgaggccgaggcggtgacgcgaatgtaggcgaagccgaggatcgagccgacggtcatgaaggcaacgaagtcctgaatgctgggaataatgctcgtcggatgcgcatagggcatgatgaaccagtagagttcaacaccgtgcatgatgagaatccagatcgcgatggcggtcagcgcgcgcaggcttttcttggtgtcctgggcgaggaggtacatgacgggtaacatgaatttgccgacgatgatcaagaaggagagatacatccacgcgccgcgattgtggtcgttatagaagatggtttcttcggggatgttggcgtaccagatgaggaggaattgaccgaaggcgaagtaggcccagagcatggtgaagcccaggaggagtttgcccatcaggtaaaaatgttccgaattgagcgcaccgaggaaaccggcggagcggaagatggcgacgagaacgatgcacgccgccaggctggcttgggcgcagacgccgaagttgtaggcgccgaagagactggacgaccagctccaggcgagtcccatgaaccaatcgaaactgaggaaggtctcgagcacgccgaagatgacgagcgcgagataactgtgatcgatcatgttgcgggtgtggaccgggctgccgtcaatgtcctgcattctcgagcggcgccagtagtaaagcccggcgaggctgaagtagaggaagtagacgacgacgcggaaggagaaggacatcgggctgaaccagtctttggcatggttaagtgccgcctgattttccggggtcagatatttccagaggattccgccaaaagccccgccagaagtcgggatgcagcagggcagaaagagaatgaagaagagggggatcaaggcgacgatattttcccacacgcgacggacgaggacgccccaaccggcgttgcaggcgtgatggagtgtgacccagaagaaggagccgagcgcgatggtgaagaagaagtaaaacgcgaagaaccaggagtaggcgaactggacgcgatcatgccaggcaccgagagcggagaggatgattcccacgacggagaggatcgcgaaaatgccggtgagggcatacttcgacggcacgaggcgctcgggcggcgggagatggagggtgtggggatggccgctcattgctttagctcctcgtcagtatttggactgtaactctcagcgagttgggacgagatcgtcttggattcaccatctgcgaaattatggtgaaaattctcccagtcctgtacgctggggcgatcatcgagagtgcgaaggtcgctggtacactccgacttgagagctttcgcattggaagccgacttggttgggggcgttgctggcgcaggttgcgcatcgggagcgggagccggggcggcaggcgtagccggtttcatcttggcctgaagcgctgtttgttcctcgggggaagcatcgtcgaaggtcgcattttggctgcgttgcagcgcgcggatgtacatgacgatgcgccagcggtcatcgatggtgacgttgtaggcgtagccgagcatctggcctttgccgttgctgatggtgttgaaaatctcgccatcgctcatcttgcgatacatgtctgagtgataattggccgcgccgacgaggccgtacttcgaagtgatgcctttgccatcgcccgccgcgccgtggcagacctcgcaactgatggtgtagcgttcgcgaccgcgcgccatgttggcggcgtcgacttgcagcggacgtccaccgtcgatggcatcgtgggtcgggatgccgtcgccccaatgcgtctcatcccatttgccggttgcccagtaatcgtttttgccgggcatttcctcggcgatagttcctggaacgggcgggcgtgaggcagcgccgtcagagaagaaggtgctgggctgctggtccttgaccttgtcctgataattcatgtcggggaaaatctcgaagggcggcttggagaagtgatctccgcgaaatccggcgatggtgaagacgccgaggacgaccagcgcaaaggcgagaaagaagtaagttagtctcattcttcgtctccgatgtaggtgagattggtgccgccgatttccgtgagcaggtcaatcgaggccttttcattgaagcgcgggtcgttggcttcgatgacgatgaagaatttgtcgtgggtggcgcgggtaaaggcgtcccattcccagaggggatggtgaagcctgggcaggccggagaggacgaccatcccgacgatgctcatgatcgcggaaagaatgatcatgaggagatcgaggatcggcacgaaaccgggcaggctgaagtagggcttgccctgcgtatcgatgggatagacgtagacagaggtgatcgtgacgaggagaaagccgccgacaagaccgccgaatccgcccgcgaaagtgaagagaccgaccatcgatttgctttgccccatggccttgtcgaggccgtggacgtagtaaggcgtgtagcagtcccagcccttgaaaccgcgatcgcggattttctcggcagcggcgtaaatcgatttgggtccgtcaaattcggcggcgacggcgtagagctttttcggtgtccgtccagaaccgacggcgtacacgagttggttatcactcatgggacgctccgttcttttccgcctcgacgatgggggcatcgtgcgggttggcttccggcatgacgccccggacttcggagatggcgatgacgggcaggaagcggatgaagaggaggtacatcaggaagaagattccgaaggtgccggtgaaggtgaggatatcgacccaagtggggtagaacatgccccaggaggaggggagataatcgcgatggatcgagcagacgatgatgatgaagcgttccagccacatcccgatgctggggaagatgacgatgaacatagcgagccacggtgaacggcggatcgtcttgctccagaaaagctgggggacgacgcaattgaagaacatcatcaactgccaagtgtgccagtagggccccagcatgcggttttcgtaaaagtggtaatactcgttcgggttaccgctgtaataggcgatgaagaattccattccgtagatgtaggagatgaggagcgccatcaagaggacgaagcggcagcacatgtcgatgtggcggagggtgacgaggtcatcgagcttgtagagctggcggatcggcacgaggaggatgatcagcatgcagaagccgccgtagatggcgccgacgccgaagtaggggatgaagatcgtgccatgccagccggggatgacggaggtggagaagtcgctcgaaaccacggtgcaggtggtgataacgaggagggtcgcgataccggcgagcatgaggtagcagaactcgtagttgacccattgccgcgcgctgccgcgccagcccaagcagatgacggcgtagaaatacttgaggaccttgttcttgatgcggtcgcgcatggcggcggcatcggggatgaggccgacgtaccagaacatgatcgagaccgagaggtaggtggagacggcgaagacgtcccagaggagtggactgcggaaattgggccagatggcgttgccgttggggatgggggcgagataccaggccatccagacgcgaccgacgtgcacgccgggataaatgcccgcgcacatgacggcgaagatggtcatcgcttcggcagcgcgattgatgccggaggcccagcgctggcgcgtcaggaacaagatggcggcgatcatggttccggcgtgaccgataccgatccagaagacgaagttggtgatgtcccacgcccagttggccgagttgttttcaccccagacgccgacgccggtgcagatgagatagaggatgccaagtattgtgaacgaggcgaggccgcccgcgatggagacggcaatgtaccaccagagcggggcgggattttccaccacggaggcgatgcggtcgccgacccagacggcgtcgcgatcgttggtgacgtagggctcgcgcgcgatctcgcggcgggcctcggtgatctccgtttcctcgtgccgggcgagcaggtcgtaccgcgccggggccggcttcgtggatggcttgaaataggacatggtggttagcgtgctcggttttacccgatcaacttctccaggttaagtccattcgtggaggcgtgatcgctgcccgccggtttgtcgtcgccctcttttttctccggggcgataaagatgctggtgttgccgatattcgcggcgccgggcatggccatgttcggattgcggacgcgtccaagatacgtggtgcgtgggcgggtgccgagataggcgaggacgccgtaattgcgttcgtcggccttggcgacaacgatcttgctgttgggatcgttcatattgccgaagacgatggcttccgccgggcagacctgctggcaggcgaccttgaaggaatcggtgggcagcgtgatgtcgccggagcccgcgccgttttcgttcgatttgcggagctggccgatcttggcttcctcgatgcgctggacgcagtaggtgcacttctccatgacgccgcgaatacgcacggtgacgttggggttcttctgcaacgcgatgctatcgggcgagcccttataagtgagcggaccatccttgccggcgaacggcccgaggtagagttcgttggtcacgccgaggaccggcagtttgacgttctggatcgggcgatcgttgtagttgaagaaattgaaccggcgcaccttgtaggggcaattgttcgcgcagtaacgagtgccgatgcaacgattgtaggccatgacgttgaggccttcctcattgtggacggtggcgttgacggggcagaccggttcgcatggcgcggcttcgcactgctggcaggccatcggctggatgagcatctgcggatcgtcgagataagagttgtccttcaacgtgtcgtactcaccctggggcggattatcgctggcgaaataacggtcgttgcggatccagtgcatctcacgaccgcgcaggacctggaacttaccgacgatggggatgttgttctcggcctggcaggcgacgacgcaggcgctgcaaccgacgcacgagttgagatcaatgaccatgccccaagcgggacggtctggattgaccgtaggcgagttgagcggcggattgacgtagccctgctcgtaattttggtagcccttggcatcgccgtgcggcgtgtcggtgtcgatgccgatctcctgcacgaaggtcggatcggtatggaatttatcgagcgaggcttcgcggacgaggccgcggccttccatcgaattgtgctcctgcgtgacagcgaggggatacttcgtgtcgatcttctcgaccttgacgccggtgacgaagccgggcgtggtcgaggtgcgcaattggtagacgttgaatccggcgccatcggccacgcggagcggcggggtgacctggttcttgaactgcgttgcctcggtgaggcgctgtgcggtacggccataaccgacggcaatcgtgagcgtctggtcatgctggccgggtgcgatgatgatgggcagttccatcgagcggccatcgggcgtggtgaccctgaccattggataggcggtcatcggatcgacggccatgtaggcatcggtggtgcggggattgaaatcggtatcgggagtatccgcgagattgttgttaacgttcgcgatattgacgccgagtgccgtggccgtcttggggctgatataaagcgcgttgtcccacgtgagcttggtgacgggatcgggcaattcctggagccagccgttgtttgcgtagcgaccatcatcgacactgccgaggatgaaattcagttcgtattcgccggcggcgaggggtttagcgggaggaggtgtggcggaattaagaacgggagttgccccaacaccgtttaggataactttagcggttgaatacccatcgtggacgaaggaatgccatgcatcagcggctctctcgttcggcgtgctgttgatgttaacgtctccgccgcctgcagcaaacgaccccagagtgctgagagtctcttggatatattccgcacccttggcggcaggcaaccccgccagttccgctaaaagttggagttccgagatgccatcataaagcggcatgataagcggctgctgggaaagataagtcccgtcatacgcgagcgaatcgccccacgtttcaaggaaatgcgcggcgggaacgtgggttgtgcttgtggcggaagtctcgtcgacgtagaggccgaggcggatgacctgctcgacctggcccagaacgttatcgagtgcgagctcggcgggagcgtcgaaggcggggttgccgccgagcacgaggagagtcttgatcgtgccttcgccgatttgctcggtaagctcgcttagggtggcgccgacgggtgcaatattggattccgatggtttcaccgtcacgccgacattgccgagagactgattgatcgccgcgaccatcgcgtgaacggcggcgggctgctgactgccgcagacgacgagcgatttgcctgctgcggaggaaaggtccttggccaattcggtgatccacgtgtcgatattgggatcggagaacgcggcaaatgagttcaaggctccgccagatgcgccgactttgctgtaaagcagggtggctaccgcgccgattgcacttgaaggcacgcgcagacgatgatctgccatgccgccggtgagcgagaagcggccttcaatcgcgtaaagacgagacatcgtttcctgggtcttgcccagacgacggcgacctgcggcaaagccggcgatgctttggacggtaccatcggaagcaccgaggaaatcgcaatcgagcgcgacgatgacatcggccttggagaaatcgtaaacgacgggtgcaccctggctggcccacgcgtcatactcggcccagagaagcttcgggaatttcttctgcacttccgtgcgaatgcgtgcccgggtgggcgacgtgctcggctcagtcaaaatggccagaccctcgccgccagtcttactataagcatgcttgaggatggcgagctcttcccagaaatcaccgagcgtgccctcgacgtaatccttgccgcgatccttcgccttgaggacggccttggaacggtccggatcgtagagatcgagaatggcggattggccgaggacatcggtcgcgccgttgaagccggggacgttgggattgccctcgagcttggtgggacgtccgttatacgtcgtggcgatgagcgggatcgcgccgccgcgacgaggcatggaagtcgcgtaatgaagagcattgccgggaacctgccattcgacgcccttggtataaggcacgatgtggagttcggggcgacggcatccggtcaagccaagtcccgccagcgcgatggatgcgcccatgaattgcatgaagccgcgacgggtgacttcgttgccttcaagttccgcagcgccctgcgggaattcgcgttccagtttcgcgcgaaattccggcgtatcggcaaattcctcaagggaacgccagtagcgcttgccggtcttgggagcgggggggtgattaaatatgcgtttcatcggtggcaccccgcgcagtttgtgggcggatcgattttccagtcttttttaagttgagagccaatttcggactgggtgtgtcctgggggcggctcccaatcgagattaaagataggcgattgctcgccaggtttggcggcggcgatgggacgcagtgcattttcgggattgcgatggcactgcagacaccagcccatgctctgcgattcgtgctgccagacgacggtcatctcgttgaccttgccatgacaactgacgcaactgacaccgcgattcacgtgcgccgagtgattgaaataggcgtagtcgggaacgttatggaccttgacccacgcgatcggcactccggtggcccagctgtcgcggaccggcttgagcttcgggttgtccttcgcgacctgcgtgtggcagttcatacaggtctgcgtattgggaacattggagtggccgctgacctcgacgtagctgtgacagtagcggcaatcgagcccgagttggccgacgtggaggtcgtgctgaaacgcgacgggttgcgtgggctgatagccgacgcgcgaatatttgggagtgaaataataccagatggccagcggcgcaatcatgcctacgatggtcagcgcgaagctggccttcatcaggacgaggttggttgcttttggaaaaatgttggccatgggcagggtcggattcgcctaaaaggtgtctttccgaccacgatcgatgtcgatcatgccgtaagttggacaactcattgcgattccccgccttgtggttaccagacacacattgcgcgggcaaccggaattgtaatttttttcgcaaagatttttttgctgcctgtaagggaagctaatgatgtgaaaaaatgagagcgatttgtgacgaaggggtgattttctccggccctttcggacggggaaatctgccggtggtgctcgcgcttattttcaaatcaaatgagtgcaaaaagatgcctgccgatgtacaccaaaccatgaagtttattcgcgcattgctgattctcgtcttattgcagtccaccacctggcttgctcaaggccagatgaacatgactaaccacaacacgcccgttgccgtgacgcaggacctctacgataccgcctaccaaaattttggcccccatccccgcaacgttaaacgggttgggccctatctgtccccccagctatacgaccgcctctggtacaaagtgggccaacccccttcaggtccgcagaaggatttcttcttttgcagtgaaacccctccttccgactactctgttggaaaagccgatatcaaggggaacagggccagagtcaatgtgaagctgacgtggggattgggaatcaagaccgatgtcggggttctcctgaagctgaacaatggagcatggcaggtcgatgatatcgactacggaattttcggccgactctccaactatctctgagaacgcgcacatttatcattagtcatcctgagcttgtcgaaggatcagttcagcgtgtagcggcggtctatgaccgccgtgccttccttccgtggtagcccgcgatctccgagcgcgggtctgctttccgtccgtcgcccggaggtcgacggctaccactgaaaccgaatcgatttcttgtgctaggaaaagcacaaaacaaaggccgatggttttcaccatcggcctttaaaaaacaaggcttttgaaccgaagttcgaaccggtgtgatcgctatggcgacagggaaacggcttgccttatctaactttgtcttgattccaaagacaatgtacaaatcgactttataaaagcaagctaatcaaccggcgtgtagtgccgatacctaaaaggaaggcttctttatatgattcaacccctcgttcggccctttgaaatcgccctggacatcggccacagctccatcggctgggccgtcttcaaaaatggcgagaaatttgacctgctcggcaccggcgttgttttgtttcctgccgacgattgcctagccgtcaagcgccgcgcttatcgtcgtcaacgccgccatgtccgcgccacgcgacagaggatcgaacgattgaagaaactgctgctgcatgtgggcgctttgtccgagacggagttaaacgcgcccggttgcgcatggccatggaagctggcggcagaagttctcagtggcagcgggcgcgtcctgacctggtcggaactgtgggatgtcttgcgttggtacgcccacaatcgcgggtatgatgggaatacgcggtggagccggcaggaagatgctgacgcaggggacaccgaaaaagtagaagccgccaaaagcctgatgcaggaaaagagtgcatcgaccatggcggaaactttttgcgccgtcctaaaaatcaaacccttggccgtgacgaaatcctcaagggagcgttttaaaggcctgaatgccgcgtttccccggcatgtcgtttatgacgaggtaaagaatatcttggaaaagcatttgggcgtgctggcccagatgactccggaattggttcgcacccttgtgggcaacgataaccatcaaaccggggaatgggacgatgatgcttggaaaacaatttctgtttcaggcgtggtcctgcccaagcgttacaaaggcagctatctctttggtcaaagcgttccacgtttcgataatcggattatttcctcatgcccgatcacctacgcgaaggtttttgcgcaggccttcgctgataccaatgaccacaaaaaagccgcgaagaaagctgtccgcgatagcaaagtgcccgtcaagaaatgccgcgaatttctgctttatcgctgggccatgattttggcgaacttgactgttaatatggggcagggcatgcggtcgctctcatcggaggaaagaaaggccatccatcaagtcatgatcaagggtgatcctgcaatcaaaagtgagccggggcacctgaccaaaacacaactcaaaaaggtcgtcatccaaaagaccggggcgttgctgaacaatatcgatacttattttctcacgcctcacgctgaggacgctttgtggttgcgccccgaaaaagcaccgagcggacgcgcgccatacacccggcaagtcatgaaggcagccgtccgcgatgtgtttgagggaaagcatcccaccgaaaagagcaacagcctttatctcagcgacgaaattaagaaggcccagttggaacggacgctggaggaaaagaccaataatcatctcgtgcggcatcgtgttctcatcacgcgccgattggttgcggacatcatcaaatcttacgcagtcgcggatgcttcgaaaatcggacgcatcaccgtggaggtgaaccgcgatctccaggcgttctctggaaagacgaacaaggagatcgagggtgagctcaaccagatgctcaaggaccacggaagcgtggtcaagaaactggagaaggacttggcggacagtaaatatcggatcactgctggactaatccgcaaggctcgcatcgcggaggatttggattggacctgcccttattcccaaaagcggtacggcgccatcgaactggccagcggtgcctttgacaaagaccacattattccgcgctcactaaggccatccgattctctggaaagtctcgttatcacctctaaggcgatcaatgcgatgaaggggaatcgcacggcactctatttcatgcaggaatttgagggcaaggacattgagggagatcttggagtcggcaaagaaaagtcgaacctgaccaccgtggttaatttcaaaaagttcgtggagaaactgagcataaaggccagtcatcgccaggacgcagaccggaaaaagaaaagaaaagcgcttttgctgctagaaaagtacgaagaaaaaggctttctgcccaaagacctgacgcagacctcgcacttggtgcggctcgccgccacggaattggagaaggaattcgacggtatcgaagacaagccgactatcgtctcattgcccggttctgtgacgggggaagtccgaaagggctggaaactttacggctgtcttgccgcccacaatcctgaagtggaaaagcttttggagcgcgccaagacagaggagctcaatgtcaaaaaggaactccgcgatcttacccatctccatcatgcccttgatgcttgcgtgattggttttgcttctcacttcattccgaatgaaggcaatctttgggaggctctcattaaacgtaaccgccagccgcacgaagacgatctcttggttaaaatgggaaaaggccacttcattcgagacgccaaggggcacgctcgactacacgagttctctcccgaattgaagcagcaaatcaccgatcgactgggagaatgccgcgtggtgcagcatgtccccaagcgaatgggcggcctcgccgggttggaagaaaacacgcgtggaatcgtgtccattgaagtccctgacacagaggcgagtccgggtaaaaaatccaaagggccgaaactcaaggaaatttggaacaacaagagcggacagccgcttcctccttcatccgcactcgaaggcgcggtcgttcatctccagcaatacggcccgcgcgatgccaagaaccaggacaagcgcagccgcaaatacacggatgaaaaagccggaaagcttctgggattacgaccggacaacggcgacggaaaattacgtgcgatcaagggagtccgcattgtcagcacgaattttggactcgctctttggcgtaaggacgggaagcccgatggagaagcgcagatgcggataatcgtgtggcgcaaggtctggcctcaactcaatgacattgctcaaaaagagaatggtggtaaatggccgcaggttttcagaaacggacaaaccattcatgttccaaatgccatgggccgaagtgactatcgaggctattggaaaatacgctcaatcaaaattggatgtctcttcaatatgattagagccgacatggtcgatcacaaggatggcgtcagttggtcaaaggaaaatgtatcagtactaagcttgcttcaatgtgggatgaaagctgtgccgtgcggtttaaccagagaatcttaggcaatgaatttgagatgctgctcaaagccacgactgcgccatgtcctaccacatcgtcagcatagattcgccgcaatgttcgctgacttgtcgaaatggtcagcttatttgccggacggaggagggggagaaaaagctacctctggaagatgtggcttccatcatcatcaccagtttttctgcctcaatccacagtcaactttttctggaggcggccaagcagggtgtagcgctgattatttgcgagacgtttcgtccggtgagtcttgtgctcccggccaatcggtcgaccgatacgttgttgacccgggccctgctcaaactttcccagcagcacatcgcccaactttggcgcacgacgattgatgccaagtgcctgaatcaattgacgttggcggagcacctgtcgccagaggacaacggtctggccgctttgcgggaggccgcccatagtcgcaaggcgcacaaggaagccatttgcgccaaacttttctggcaggtctatggccggagccagggggagcccggttttattcgcgagcgcagccaggagggcctgaacagcctgctcaattatggttacgctgtcttgctctcgaccgtcctgcaaaaactgttcggcgtgggactggacccgacgtttgggatttcccacgccacgcgggaacggagcgcgcccttggcctacgatttgatggagccgtttcgcccgtgcgtggactggcgtgtcgtgcagtgggtacggcagaatccgacggcggaatcgttggaagtgactccggaatttcgcaaatgggtgacgggttttcccctcgagcggatcgattatttggacctgacccttgaagtgcgcggttgcatcgagggagtggtgcgtggctttcgccgggcggtactcaaccacaaaccaggcctttatcgaccatggacacagaaaagttcaaaatgggctggctagtcgtcgccttcgatcttcccgtggtcgaaaaggagcagcgaaaagcggccaccgattttcgtaactacctgatcgacgacggcttcaccatgatgcaatacagcgtctacatccgggcctgcgtttccttcgcccggcaggaaacgcatttggaacggctgaagcggaatctgccgcctgatggaaccgtccgggccatctacgtaacgagagcccagtgggaaagatccttcgtcatccacggtcaacctgccaaagaagtctctgcggaggatttgcccgagcagatacagctctggtaaccgacttgtaaagagtcggttaccacgagccattctgctccccccttaattggaatcaaggcaaagccgctccacgatcacttttaagcgcaacgccattctgctccccccttaattggaatcaaggcaaagctgatggcgcacatatcccaaaattctgagaattctgctccccccttaattggaatcaaggcaaagcaacgcctttcgcatcgtgctgtccggtaatattctgctccccccttaattggaatcaaggcaaagcgtcgccgatcttgaattgaaatttatcgaaattctgctccccccttaattggaatcaaggcaaagcaccatcttccgtctttcgccagatgctccgattctgctccccccttaattggaatcaaggcaaagcaccagaaccgcagcaccagagattttataattctgctccccccttaattggaatcaaggcaaagcgtggacgtcatggatttgaaaggtcttgggattctgctccccccttaattggaatcaaggcaaagcagaagcacgccttgccctataatcaggagaattctgctccccccttaattggaatcaaggcaaagcgcaggtggctgctttaattgttaatgatttattctgctccccccttaattggaatcaaggcaaagcctttgtcgagcggtgccatgccctcgttccattctgctccccccttaattggaatcaaggcaaagctagggaaccgtcgcgtttccggtcggattcattctgctccccccttaattggaatcaaggcaaagccaaatgaccatcgcttcacagtcccaagatattctgctccccccttaattggaatcaaggcaaagcgcaggtcacggtaataaacaagtcgtacatattctgctccccccttaattggaatcaaggcaaagccaacgcgaccgagggcttgattcatggctgattctgctccccccttaattggaatcaaggcaaagcaccaatcgaggagagagcctgcaatgcaacattctgctccccccttaattggaatcaaggcaaagcaacgatggggcagggccatccggcgcactaattctgctccccccttaattggaatcaaggcaaagcaagttatgatttattaaatgaaagtcaattattctgctccccccttaattggaatcaaggcaaagcattggtgcgaagtatcagcttctctctaacattctgctccccccttaattggaatcaaggcaaagcaatgacattccgatcacggttacggaagccattctgctccccccttaattggaatcaaggcaaagctgtcgctcagaggcatccctcttttcttgaattctgctccccccttaattggaatcaaggcaaagccggagggcgcaatgccatcatcctttttctattctgctccccccttaattggaatcaaggcaaagccacgacttgagcatcaggaatttcgttagcattctgctccccccttaattggaatcaaggcaaagccatgttattcttttccccacagcgaaggcattctgctccccccttaattggaatcaaggcaaagcaaacattcgttaatgggcaaaattgcattcattctgctccccccttaattggaatcaaggcaaagcacaacgacaccgtccaaaaaactcggaaatattctgctccccccttaattggaatcaaggcaaagcatgatcagagcctaacacaatagcgttagtattctgctccccccttaattggaatcaaggcaaagcatctcgcgtatcaataatctcttgagttttattctgctccccccttaattggaatcaaggcaaagcaacgactcttattccccagaggcaaacttgattctgctccccccttaattggaatcaaggcaaagccctgccgtgaagcgccattccgcaggctgcattctgctccccccttaattggaatcaaggcaaagcacaagtacgcctcgtggagggagtctgtccattctgctccccccttaattggaatcaaggcaaagcaagcgatagtcgctatgtactacaaggcgtattctgctccccccttaattggaatcaaggcaaagctagaagaggaagccgcatgattgccgaccaattctgctccccccttaattggaatcaaggcaaagccgaaaaaacaaccatatgaaatacctgcttattctgctcccccttaattctttgggttgaattcctcgaagtttgcttaggcttgatggggaactcgcgatctccgagcgcggattcgcccttccgaggtagccgtcgcccggaggtcgatggctacctcgggggttgtctgtccgagattaggctatcgggccgtgggcgagcatcatgacgatgtcgcccccttcgaggcgataagtggtcggtggatgctggacgagggagtcgtcggacttcttaacggccaggacgagacattgcgcttcgatgccgcgcagcaattgctgcagcgttttgcgatcgtcaacgccgttggcgacgatggggtgctcgatgatttcgacgccgaggtccttcagatcgtttttgagatggcgaccggtgtccttgaggatgctgtcgagcgacggatgggtgatgctattagcgatctgcatgccaccgacaaacgcgggcaggatgatttcgttggcgccggcctgcttgagctttttctccgtggcggggtcctcggcgcgggcgatgatccgtaaatcgggacgcatgttgcgggcggtgagggtgatgaagacgttgaccatgtcgttgggcagaacggtggcgagcacgacggcgcgctcgatgtgggcctcgttcaatgagtcctcgtcaccggcgtcgccgacgagcgcttgaaaaccgtggctgtgggcaagggcgacccgctcggcattgttgtcgacaatgaggaaggggaattgtttggcgacgagtgcgcgggccagggtttgtccgatgcggccgtaaccgcaaatgatggcgtggccgctgatggtgtcgatgtctcgggatttacgatgttcttccatagcttttcctatttctccttcggtgatgaagcggaccaacgatccgacaaagtagactttgctggcgtctcccgcgatgatgatgatgatggtgatggtccgcagcatagcggtcgagaccggttcgacctcctcgtagccgaccgaaaaaacggtgatgatgaccatgtagaaggcgtcggacagatgccagccttcgagccgataggcggtggtccccatggcgatgacgccgaggaacatgagcaggccgatatagagcccgtgcatcgatttctggagaaagatgcttttggaagggctcgccacgtggccctccaaggcacggggcgtgccatgtttgggtttgccaagcttgcttccccgataacattcacctgcaggtaatgcgcaggtatctcaaatgggctttttcgcgtgacttcatgccaccattggacactctcggtgaatggatagcttccaagtcgctcgcagatcgatttggttggatattgctcgttggattttatttgcgatcgtcggcttctttcttccgggaattgcgcagttgtttactggcaccccagctctgcacgacaacgcgtgggcaactttagtagccctcttttttagcccgctggcagggctgattcccgtttatattgcgcccgaaaaaaggattggggcatttcttctcttcgcttccatcatcatcaccttcgcttggagttctgcggcatctccttctaacgtgccatccagttgttggcttgtttatgtttttaccgacgctgctatttgtatcggtgcgttcttggctgtcagatgggcgcgttaatccgttagtttccagatcgaagtagaagggaagtggaaaaagggctgcaggcatctttaacgattcaaaatgaaactgagaagatgctggctacctcttgctcttttcgtggctacggtcgttcctgccttggcgatggatcctgtttgggagcctgctccgaggtccgatgactttgtggatagcattggcgtttgtacgcactggagctacaaagatacgccttacggaaaagattatgatcaggtgaggcagcgcttgggtgaatccggcattcggtatgttcgcgatggcttctatttccgggagcttgagcttctgcatgcgtttggtgttcacagcacgattgtttgtgatccggaggagggcgatctcaagacgcaaatgacggcgtggaaggcagcccccggcgtgatcgacatgattgaggggccgaatgagccgaataatttttggcttcctttcaatggtggtgagcgaggcaaacgctggccggacgggatcaagctttggcagaacaatctctaccaggccgttcatgctgaacccgcgcttgctgctgtgcccgttacttctcctacgcctattttagaaggcgggggcgcccttgctcctctctccggtttcgatgacgtggcctttcatccttatgcgggcggcaccatgccgtccatgagcgttttctgggcaggacaaaatatctggcgcgcttttgctcttctcggaaaggggaatgaagccaaacctcttgtggccacggagtccggctatcacaattgcctgtcctatcatagagtggctccgggagggcagcccggaatttccgagacagccggtgggaaatatttcccccgccactttgctgaatactggaacgcgggaatcctcaggacgtttacgtatgagttgatcgatgaattggtcaatccggatgatcccgaggcgaacttcggcatgcttcgccatgacgcttctcccaagcccgctttcacggcggtttccaatctgatctcattgctgagcgaaagtcattgggattcgactgcacttcgttgggttcgcgccgacgcccccgaccgcgcttttcctttggcaatagaagggctgtccaatattcatcacacgcttctctcctgtgccgatggaggcatcgatcttctcttgtggcaggaggttccttcatttgatctcgaaacccgcaaggatttgtcgcccgcgccggagcaggtgaccgtgcatctgaagactccggtcgccgccgccctgtatcggcctcttgccggaatccaggttcaaaaaacgtgggaagcgacggacgccatcgtcgtttccgtgccggacgaagtcatcatccttcggttggccggtccggtgatgacaggcactccacccgccgctccgatcgatctttccgtctctgccacggcgacatcggctacgctcaaatggcaaagtcagggtgtaccgccggcggcttttgtggtgagtcggttggggaaatatattgggacggttattccatcagcagacggcttggcgagtttcaccgacaatgggcttttcgccggattgagctttccctatgcggtgcgtgcggttggttctggtgggctcctatctccgcctgcggaagcggtggcccatgcttcgggccattgagcggattggctgcaaccgggtagcaaaacaacgtcgctccgaggtcgacggctgattcggaggaaggcagaccgaactgatccttcgacaagctcaggatgactaatgagatttaggaaggggattatccccttgacatacggtaggttttatcataggttggttccatgaagacgaagaccatcaagcggaagaaggaaaaggccagcatcaccatccgtgattttttcaagcagttccccacagatcaacactgtttggagcacatttttaccattcgcttcggccaaggccatgcctgccctaagtgcgagcgcaaggcgaactggtacaaaattcaagcggaacgcgcctattcctgccaatggtgcggacatcatcttcaccccacggttggcactccctttgaggatagccgcacccccttgcaactttggttctatgccatctatcttttcactacttcccgccatggcgttcctgccaaggaattggaacgccagcttggcgtgacgtacaagtgtgcgtggcgcatgggccatgagattcgtaagcacattacccaagtagatggggagtttcccctctttggccaagttgagatcgacgaaacctacgttggcggtcgcaagccccgcaacacaggtcgaggccgtggggcgcaagggaagacaattgttttcggaatgctcgaacgtggtggccagatcatcaccaagatcgttcccgactgttccaaggccagcctgtatccggttattcaggagaacgtcaagcaaggctccacggttcataccgatgagtttcctacctacaaacttcttaagacgaaaggctacactcaccaagtcgttcgccacggcaacggcgagtacgtgcaaggcagttcgcatgtgaacgggcttgaaagcttttgggctcgcctgaaaaacagcgttaagggcactcatattcacgtttcaaagaagcatctcggtaagtacgccaaggaattcgagtttcgttacaactcgaaggccaagcctatttcgatgtttccttctttggtttcgacttttgcgaagccatcgatttgatgacaccgtgaaaatgaagatggctcgcctcagggtgagtcttctttttttctttcacgaaatgagagagcttattttgttctttggcttctttgaggttcataaactattcattttcttctttcgggaggcggctttcttgcattatatcatcaataccctccttggctcggcgtaggttaaaaaatgcaaatacactaaaagctacggtaaatactgtggcaaaaagaaccccgttgtaagctaggcttaatgcgccaggggaaagcattttaggatctgcaaatagaacagagaaggcgattcctatttcaagcccgaagcacatcgtaaccaacccaacgtaaaaggttgcactgccattcatgttagagatgcttctaagctcgaagcgtgcaacggtataatacctcacatccctcccgctgataacattattgaccaaacttctagaacttgtatccagcccgactccgctggtttctgtgacaacaggcttatccatttgaagcctctttttttgattccgtttcccttaattttccaccgccaatatgggtaagaacgcccgcttggatcgcatttatgaaatgagtatttccacagttggagcaactgattgcaattactggatagaccactccgcccattaactggattgcgccgtttataaactgaattggagtcccaatatgctgaccggcaatccattgcatgtttggctccttgcacatttcgcaatgaggcagacccttcggatttcccttcccccacttcaaaaccaaccacttttgcagaatgtctagttgagtatccgaaaggcgtccgtgcgaataatctggcggctttgaataatccgagggaggggccggtgaggcttgaggcggaggaggctgataatcgggtgcgggcataagccgaccctagccacattaacgacgcactgtcacgctctctgtaccgtatgccgaggggataactccctttaggaatttaatgaggatcttctgcccgaagactgcaccgccgccgggcctgcggcggctacctcggatgcctaaccttgcgtgacgtaagcggggcgctttttggtgcggacgctgaggaatgtgggcaggatttggtgcgagcggatgacggagttcgcccgcttgaggcgtcggctgaggagggtgttgatgccgagcaccgcggcacaaccggcatgaggccagtcggtgagaaattgttgaaggtgctgtacgtcaatatgccagagctccccggccacgatgcaggtcacggtggcagacgtcacgccgggctggaaaacggcaacctcgcccagacaatccccggcgcccacatcatcgagatgcacgtcctggcccgtggcttgggtggagactttataggagccgctcaacacgacgtagagattcaagttcgttacgttttcgcggatgataacctgaccgaccgtcgttggttcgacgctgccgtagctggcgaatcgttcgcgggactcatcgtccatgaaggacagaatgccagtgcggggaagaattaagtcagccatggaaattgatcgcaaacagcgttaacttacgttaggacttaggctatcgctgacgcaaattaattcatggaagatattcccgcctccacttttgatcatgacgctcccgaaggtttcgaggaacttcccccgccattgccgccgctgggaattctcgcacacctgagcgatcggtccctgacgaatctggcctcctacggcacgtatgcgcaatttgccccgggaaccgtcatcatcaaggagggcgacccgcaggatcgtttttacgtggtggtggcgggcaaactggcgatcactgccttggccagcggacaggaagttccgctcagtactgccgaaccgggcgagtgtctgggagaggtcagcctgctggatccaggcgaggcttcggccaccgtcaaggtcaccgagacctcgaccctgtggagcatgaatctcgacgacttgcgtacctatctttccgagcatgccggcggcggcggcgcgctgcttatgggcatggcatcgtgcctcagcacgcggttgcggcaggccaaccagttgatcgccaagcatcgggtcgt

SEQ ID NO: 3994 - DNA, 5027 bp, synthetic construct
  misc_feature 1..5027: note = Synthetic
  source 1..5027: mol_type = other DNA
cgctcgatccgcccgttcatcatgcccaaccacctcatcgtcgaatgggccgaacacgtcctcgagcgaaaaggccgcatggcccggcatttgtgagggcaaaggctgcgataactgccgttctcctttttttattatagagcgataaaaaagccgacgacttacgtcgtcggctttttaacaaggcttttaaaccgatgtgaccgctctggcggcagggaaacggcttgccttatctaactttgtcttgattccgcaagtaatttacaaatcacccagataaaggcaagctaatcaaacgtcaggttcggccgatcttttaaaggagatcagttttatatgaaccaccaagttccgagaccctttgaaatcgcgctggatattggccatagctccattggttgggccatctttcgaaatggagagaaattcgatttgcttggcacaggcgtcgtcttatttcctgcggatgattgtcttgcgatcaagcggcgcgcttaccgccgccaacgtcgccatgttcgagccacgcgacagagaatcgagcggttgaagaaattgctgcttcatatcggcgctttatccgagacagaattgaaccagccgggttgtgcgtggtcatggaagctggcggcagaagtcttaagcggaagtggacgcctgctcacctggcccgagctttgggatgtgctgcggtggtacgcccacaatcgcggttacgatggcaatgtccgttggagcaaacaggaagaaaatcaagaagacagcgacaaggaaaaacaagcccgcggactcatgcagcagcatgcaaagaatacgatggcagagactttttgcgccgtgttggaaatcatgcctctcggtgtcaaaaaatcttcgcgagaacgtttcaaaggcttgaatgccgcatttccgcgtgaggtggtttactcggaagtaaaaagcattctggaaaagcacgcgggcgtgctgccacacttgtcgccagacctcatacgcaccctgataagcaacgataattatttcacgagaacgtgggacgatgatgcctggcaggcagtggccgttccaacggtgcaactgccgaagcgttacagggggagctatctcttcggtcaaagcgtgccgcgctttgacaaccggattatctcctcctgcccaattacctacgcgcgaatacttgccgatacccacgactctaaaaaagccgtgcgcgacagtaaagtgcccgccaaaaagtgccgcgaattcctactctttcgctgggccatgatcctggcgaacatgaccgttaatatgggccaaggagctcgccctctcacagcggatgaaagaaaagccattcatcaggtcatgatccaaggcgatgcccaaatcaaatgtgagactggtcatctcacaaagtcgcaacttaagaaggttgtgattcaaaaaaccggagcattgctgaataatatcgatgcctattttctcacgccccacgccgaggatgcgttgcgattgcgtcctgatccattgccttccggtcgcgcgccctacacgcgacagatcatgaagcaggcgattcgggaggtatttgaagggaagcatccgaccgaaaaaggcaattgtctttatctcagcgacgacatcaagcgggcccaactgggacggacattggacgagaagacaaataatcatctcgtacgacatcgtgttctaatcacgcgccgcttggttcacgacatcatcaaatcctatgtgggcggtaatgcctcccaagttggacggatcacgattgaggttaaccgcgacctgcaagcattttcggggaagacgaacaaagagatagagggcgaacttaaccagatgctcaaggaccacagcagtgtggtcaaaaaactggaaaaagacctggcggagaccaattatcgcatcaccgcgggcctcatccgcaaggcccgtattgccgaagatttggactggacctgcccctattcgcaaaaacgctatggggctatcgaactggccagcggcgcttttgacaaagaccacattattccgcgctcgctccgccagtccgattcactggaaagtctcgtgatcacatccaaggcgatcaacgcgatgaaaggaaatcgtacagcactgcaattcatcaaagaatttggcgccaaggatatcaatggcgatctcggagttgggaaagagaagtcgaatttatccagtgaatcaagcttcaaaaagtttgttgaaaagctgaataccaaggcaagccatcgtcaggacgcagatcgaaaaaagaaacgaaaagctctgcttttgctcgaacgatatgaggaaaagggctttttgcccaaagacttgacccagacgtctcatttggtacgtcttgccgctaccgaattggagaaagaattcagcgacttggaaaataaacctcgagttatttcactgcccggctccgtaaccggcgaagtccgaaaaggctggaagctttacggctgtcttgctgctcacaatcctgaagtacagaagttgctggagcgggccgagacggaagaaatgaatatcaagaaagagatgcgggacgttacacatcagcatcacgctcttgatgcctgtgtaatcggctatgcatctcatttcctgcccaacgatggaggcctgtgggagattttgatcaagcgcaatcgaagaccggatgaaactgatatgcttatctcacgagatattttttcgcgcgacagcgaaggtcgcgcgcgcttgcgcgaattaagttcctcttcaaaaaaacaaattaccgatcgcctggcggaatgccgcgtggtccagcatgttcccaagcgaatgagtgggttggtaggtctgaaggaaaatacccacggtattgtggcgattgaagttcctgagaaagagacgggaacaaacaaaaagaacaaggagccgaagctaaaggagatttggaataaccaagacagcaatcctattcctgttctcgataagctggatgggatgatcgttcaccttcaacaatacgggccacgagacccgaagaatggcaataaacgcaagcgggaagccctcaaacaaagtgccctcaaattgcttgggctacgtcctgaaaacggcagcggcaaattacgtgcaattaagggagtaagaattatttcggagaactttggcctggcgctctggcataaagatggacattcggaaggcgaacaacaaatccgtgttattgtgtggcacaaggtttggcctcaactcaaggcgattgccgtgaaggaaaatggcggtaaatggcctgaggttttgagaaacgggcaaatcattcatgttccagtcgccaagggtcagagtgactatcggggctactggcaaattctatccattaaaaataataaatcgggactcgcattcaatatgatccgaccagatatggtcaaagagcgcgatggcgtggattgggccggcatcaatatatccgttaataccttgataaaatgcggcatgaccatcataaacagcacgctaacgggagtttcccttaacatgtagacgctgaccggtggcgttagcacacaaccctatctccatgtgtcctaccacatcgtcagcatcgattcaccgcaatgttcgctaacctgtcgaaacggacagcttatctgtcggactgaagagggagagaagaagcttcctctggaagatgtcgcttccattattatcacaagtttctcggcgtcgattcacagccagctttttctcgaggcggccaagcaaggcgtggcactcattatttgcgagacttttcgcccggtaagtctcgttctgccagccaatcgctccaccgatacgctgttgacccgggccttgctcaagctctctccccagcatgtcgctcaactttggcgcacaaccatcgatgccaaatgcctcaaccaattgacactggcggaacatttatcgccaaaagacgatggattggcagcactgcgggaggccgccaatagccgcaaagcacacaaagaagctatttgcgccaaacttttttggcagatctatggtcggagtcagggagagccgagttttgtgcgcgagcgggcccaggatggcttgaacagcttgctcaattatggatatgccgtactgctctcgactgtcttgcaaaagttgtttgggttaggattggatccgacctttggaatttcccatgccacacgggagcggagtgcaccgttggcctacgatttgatggagccgtttcgcccttgtgtggattggcgtgtcgtacagtgggtacgacagaatccgaaagcggaatccctggaagtgacaccggaatttcgccgctgggtaacggggtttccgttggaacggatcgattatctggacctgactcttgaggtgcgcggctgcatcgagggggtggtccgtggctttcgccgggcggtcctcaaccacaagcccagcttctataaaccatggacacagaaaagttcaaaatgggctggctagtcgttgcatttgatcttcccgtcgttgagaaggagcagcgaaaagcggccaccgattttcgccagtacctgatcgacgacggctacacgatgatgcaattcagcgtgtacatccgggcctgcgtttcgtttgcccggcaggagacgcacatggaacgcctgaagaaaaatctaccatcggaagggacggtccgggctatctatgtgacgcgagcgcagtgggaacgatctttcgtcattcacggccagcctgcaaaagaggtctccgccgagacacttcccgagcaaattcagctctggtaaccagcttgtaaagagctggttacactgagccattttgctccccccggatttggaatcaaggcaaagcagcattagtggcgccacgacgggcagcgtgattttgccttccttgaaatcgtcgccgacattcttgccgagcttggcggaggagccgccgtagtccagcgcatcgtcgatgagctggaaggcgatgccgagattggcgccaaagccgcggcaggcggcgat

SEQ ID NO: 3995 - DNA, 9776 bp, synthetic construct
  source 1..9776: mol_type = other DNA
  misc_feature 1..9776: note = Synthetic
caggattcgaacctgcgaccacctggtcccaaaccaggtgcgctaccggactgcgctacgccccgatgctctgcctttgcaacattacccaatgctttatctgggtgaggcgctttggctttgcggctgcaaagttaatcatttgtcgcgatacttcaaaatttcaggcgaatatatgtcaggcagcgcgcaaaaaagaatgtcgggacagatgcagaatggcctcagagagggcgcagttcgccggtaacggagtcgatcacatacccggctacccgtatgtcagcagccataaggggatgattgcggatgaggtctactgtctggttgactgattgcgccacatcgtcgaagccgtggagccatttgtcgaggtcgatgccgcaatgacgcatcagtgagatattgctttcgggcacgccgcgctctttcatcagatgcagcatctcggaagcgtccatgccctgcacgccgcaaccggtgtggcctatgaccattatctcgtcgacgcctaattcgtagacggcgacgagcagcgagcgcatggtggagtcaaacggattggttatcgtgcctccggcgttcttgataatcttcacgtcgccgttacgcagtccgagggctgccgggagcagttctatgagccgcgtgtccatgcaggtaactatggctatctttttgtcgggatatttggatgtgagaaatttctcatacagcttttcggctacaaatttcttgttgtggcgtaagatttcttctatcatgattctggcatggttttatccgttgttgtatcgcaaagttacgtcatttcagcgagagtgccaaaagcgagcctctaaaatcttggggcaacgggccggagtgttcaaactctatgtcggcgcatacgttttaatattagcctcacggatgtggaggctttcaaccctcagttgattatgttccacgatatactattctttctacttggcctggctctgattgtggcaggcggcaactacctcactgacggagcaacagtcattgcccggaagatgcgggtctctggtcttgtgatcggccttacggtggtagctttcgggtcatcggcgcctgacatggtggtatgcattatgtcgacagtccggaatcattcgcagctggcgctgggagatgtggtcggagccaacattttcgatctccttctggtggtgggcattgtggccgtcataaggcctgtcgcaatttcggctgatatgcaatggaaaggattgcctatgcttgtgctcgcatcgcttgcgcttttcttctgtggcgacgacaggctgtttgacggcaagccttacgatgtcatcgaccgcacggacggcctaatgtttcttcttttcttcgtaatattcatggtctatacgttcgacataagccgacggacaccgacatctcctgccgtaaaccgctcagccccgattcagacggccggtcaagcggatgaggcgccggtaagcccccgccagctcatgattgccatagtaagcgtagtggcgagcctcgcggcacttttctttggcggcgactggcttgtagacggggcatcggggatagcacgtcgcgcagggctgtcggaaggtctcatcggactgaccatagtgggattcggaagttcggtgccggatcttgttacatcggtggccgcagccgtaaagcggcagcccgggcttgccctgggcaacgtggtgggtgcctgcgtgttcaatatcttctttatattgggcgtctgtgccacagtcagaccgctcaatgcaggcacggtatcactcttcgatttctctgcattagtggtggccgctgttgctgtctgggtattcggagctctcacaggaccgaaagtaatcagtcgccgtgaaggctgcatcctgataacgctctatgtcatctatgcggcaaagctgatcctggacattctggggcgctgatgctttttatctttcttgagtaagtgtcgtaagtggtataaattcactctgccacatataaaaaatgttcccacacggtctgtgcgggaacgtaggaataatttccttcggcatatagccttattgtggtaagatgtagaaatatctttttagtgtcgcttcgattattttctgcaaaaataatgcagatttttcatatatccaaattttttattaattttgtgtgttaggaaatactttttaacttgatattttaactcatccactgatatggctaccaaaacattaggtatcgaccttggcaccaactctatcggctgggccattgtggagaaccaggaaacatcgaaacgacttctcgaccgaggggttaatatcttccaggtcggcatgaaagtcgagaagaatgtcgaaagcccaacggtttccaagcgcacggaagcccgcgcttcccgcagaaaatatttcagacagcgttgccgcaaaatcaagcttctcgagattcttgtggagcagaaaatgtgtcctcctctctctgatgacgatctgaagctgtggcgcaccaaaaagcttttccctctcaatgaagatttcatcgaatggatacatacctccgataacgatgaccgcaacccgtatcacgaccgccaccgctgcctccatcagcgcctcaacttagacgatgaagccgaccgattcactcttggccgtgccctttaccatctggctcagcgacgcggtttcctcagcaaccgcaaggaccccggcgaaggaagcgacgataaggatagcgagaccggcaaggtgaaaaagtccatatccgagctctcggccgaaatgaacgcctgcggctgcgagtatctcggcgattatttctaccgcctctatggcaccggcacacgcatccgcaaccgctatacggcacgcaaggagcactatcttgcagaattcgaccagatctgtcgcacacagcagctcgacgatgcactggtgcgccgcctcaacaatgccattttctaccagcgtcccctcaagtcgcagaaaggtagcgtcggacactgcacattcgaaaaaggcaagccccgctgcaatctttcgcatccggcatttgagcagttccgtatgctgcaggtactcaataatatccgcatccgccgtcccggcgatgccgaattccggagccttaacgccgaagagaggcagtccgccgagccactgttctatcgtaagtcgaagcctaaattcgaatttgccgaaattgccgccgccatagccggcaagaagacgccccgtgcctttcgcgagtcagccaatcccgacgccgtcctcttcaattatcccgatacatttactgtaaccggctcccccgttaccgcacgcatccgcgaggcattcggtaatgactatatggccgctctgcgtcgcgactgcaaaatcgccgatggcaaatccgattcgcagctggtcaacgacctttggcacgccctctattcattcgatgatgaagacgctctgcagaaatggctcaccgacaactacggactctcggccgatgccgcccgcaagcttgccaaaccgttgccccaaggctacgcttcgctcagtctcaacgctatatcaaagatactcccctggctgcttcgtggcatgcgctacgatcaggccgtgttcctcgcaaatctcaaagcagtgctccctgccgatttatggaacagtcctgacgaccgcgaagccgtggtcgaggatatagccgccatcgtcgatgattattcctcaaatccactccgcaaggaatacacactgcgccagttgatatgcgaccgcctgctcgagatacccgaagtggaaccccggcgcctatcccgtctctatcagccttcggtcgtcgaggcttatccggttgccacagccgacgggcagggacgcctcatgctcggctcgccccgcaacgacggcctgcgcaacccggtggtgatgcgcgcgctcttccgtctgcgccatctcgtcaatgccctcctcgcatcaggcaaaatcgaccgccacaccatagtcaatgtggagatggctcgcgagctaaacgatgcgaaccgacgtaaggctatctacgactacgagcgtaaccgcgaaaaggaaaacctcgcctacgccgctgaaatagcaaagctctatcgcgaggagaccgggcgaacaatcgaacccaccgagaccgacatacagaaataccggttgtggaaggagcaggaaggcatctgcctctataccggtcagcagattggtgtggccgactttatcggcgcggacccgagattcgatatcgagcacactgtcccgcgctcgaagaacggagccgacgccctggccaacaaaacgctctgcgaatgtcgcttcaaccgcgatgtgaagcaggccctcataccggctcagctccgcaaccatgccgaaatcctcgcccgcattgagtcactcggctggaacggtaagatagaatcgctccgcaagaagatttcatccctcagccacaagcaacgggcgaccaagaaggccaaagacaggaacattgttgagatccatctcctacgtatggagctcgactactgggtaactaaaatcaaggcgttcaccatcaaggaagtcaacggtggatttgccaaccgccaggccgtggatataggcataatcagcaaatacgctatcccgtatctccacacggttttcgagaaggtcttcaccgtcaagggtgccaccacagcagagttccgcaagctctggggcctccaggatcgcaacgagaagaaagtgcgcgatactcacctgcatcattgcatcgatgccatcaccatagcctgcattggccgcaatgaataccagaactgggcccagtatcaggccgatcaggaacgctataggtggctcaaaggcgccgaacctgtattcccgatgccctggcccggatttgccgccgatgtaaggaatactatggccgaagttctggtgaagcatatatcgcagcccgacatgatacgccagaccaaaaagaagttccgcaaacgcggaaaggtgcagtatagcgaccgacgcgatgaggagggtaaccccataccgctatatctccagggcgacacggctcgagctaggttgcacgaagatactcttctcggagccatcagagttgatggtgaggagaaatacgtattacgcaagtctctcgccacgcttaaggacgagaaagaggctgccaaaatcgtcgatcccgtcgtgcgcgccaaagtgcttgatgccattggccgcctcggtttcaaggatgccatggcctcgaccatctacatgaacgaagcgcttaagatacccatccgtaaagtgcgcgtgtttacctcggtcaccaacccgctcgacctcaagcagcagagattcgagtcgaagcatccatataagaatatggtgcacgttgacaacgactccaactattgcctggcggtctatgaaggcatcaatgccaaagggaaaagaaagatgcgtttcaaagtcattacaaatcttgatgcagccagaaaactcaacagccatgcggctgtgaaggaagacatcattccgctctccgacggcgacggcttcgaccttaaatatttcctccgtaccggcgatatggtactactctatgagaactctcctcaggagctttatcaggccgatagccgtgagcttcagcgacggctctacaaggtcagaggattagataaatatggaaggatgaaattgatttcggctacggaagcccgaagaacaaccgatttgcaaataaaaaaaggtgcttacaaatcaggagaaattctaaggcctttcatcgggattacatatcttcagttcaatgccatgatcgaaggtgtcgacttcaagctcggactcgatggcgaagtaaccttcatgcggtaatccactaaacaactctccttatgccaaagagaacaatcgttatcgaaagtccctgttggctctcgcttcgcagttgtcagatggtcgtctcatttcccgaagatgagcggcctccggcaattgtgcctgtcgaggatatgggctatcttattgtcgataatcagcaggctcacctcaccatgccgctcctcgccgagctcgccgccaacaatgtcgccgtgctcgtctgcgataataagcacaatccttgctcgatgttgctcaaccttgattcgcacaacattcagggcgaacgattccgcgaacagcttgaagcctcacagcctgcaatgaagcaggtatggaaactgattgtagaacggaagattctgaatcaggcggctttgctgcgcaaatataagcgtgtcgacttgccgctgccggatctggccaaaagcgtcagaagcggcgataccgacaaccgtgagggcgtggccgcccacatctactgggcacgccttttgggcgaggatttcgtccgctcccgtttcggcgatggccctaacgcacttctcaactatggctataccgtgcttcgcgccgccgtagcccgggctatctgcggcgcgggtatgcttcccgtaaggggaatacaccatcgcaaccgctacaactctttccccttggccgatgatctcatggagccttaccggccatacgtcgatgatgccgtgatggaattgctcgcagaccgcggcgagcaactcgatacggaagccaagaagcatctattgggcgtattggtgtgtgatgtggtagtcgacggccggctgcatcccctttcgcaggcattgcagcttacctgcacttccgtcgcggcatatcttgccggaagagccaaaaagctagctctcccttctttcaagtaggggggtgtatcaagattcaaatatttgatacacctccgccttccgaagcgaataataccgcgtaagcggttcctttgcagataacctgcggaaaatcaacacaaattactcaacaaccccttgcgggttgtttctccaatggaacaccaccgacttaacgcctatcatatcatgtggctcttcgtaatgtttgatttgccggtgatgagcaaaatccagcgtaaacgggccgcgcagttccgcaagaacctcgaaaaagacggtttctgcatgtggcagtattccgtctatatccggcattgcgcctcaaaagaaagtatggaagtccacatacgccggctcaaggcccttgtgccccccgaaggaaaaatcagtgtcgtccagatcaccgataagcaatatggcaacatcatcaatatctggggcaaaatagaaaaaattcacaagcccgtccctcgacaattggaacttttttagtaactttgccgcagaaaaaggctattctacatggccgcttcctgtactacgccgatttttaaagcgtcagcagcctggtaacctgttgatttcgagccaaatgcgcgatataggttgtggtttgatgtagaataaagatattacacaaccgggtcgctcacgtggattacaagctctacgttgtggtttgatgtagaataaagatattacacaacagatgcccatgcaaaggtcaccggctgatagttgtggtttgatgtagaataaagatattacacaacggatgcggcgagaatcaacactaaactccgttgtggtttgatgtagaataaagatattacacaaccgtggacctcgaaacctatcagctcgtaatgttgtggtttgatgtagaataaagatattacacaacagaacgagtacaatgcacctaaagctcaagttgtggtttgatgtagaataaagatattacacaacaacttgggcgtaaacttgagggggaacagcgttgtggtttgatgtagaataaagatattacacaactaggatcgatggcacaggacgcgcggatgtgttgtggtttgatgtagaataaagatattacacaacttaagacctgatttcaatgggacccaacgggttgtggtttgatgtagaataaagatattacacaacacggcatcggcatcctgcacactttacgcagttgtggtttgatgtagaataaagatattacacaactctatcccggcgcacgtgtcaatgtcgagggttgtggtttgatgtagaataaagatattacacaacacaaagacgagatatatacgtttcgtggggttgtggtttgatgtagaataaagatattacacaactctgcatctctttttcctcgttgcgaagatgttgtggtttgatgtagaataaagatattacacaacaatactttgaccctgaaatatgcaggcaagttgtggtttgatgtagaataaagatattacacaacacaaatcccaatatggcctgccgtgctcgtgttgtggtttgatgtagaataaagatattacacaactgtccgtcatactgtcttcattccattggagttgtggtttgatgtagaataaagatattacacaaccgttgaaacggtgagcgatgaagcggatgagttgtggtttgatgtagaataaagatattcacaacgtatgagcaataacttccaatcaacattcatattgtgccgatgagttgaaaacagtcgtctatttgtttgtatttcccaatattcccacatctccgattaatgactgatttatatacaaacaaactcaatatttcctcccaaaaatgcggattttagccaaacaaaccacgctatttagggctataaaacaccaatggccaaacaaattatattttgcttgaccattgattatcaggtggttatgtaaaatttaatgcttaatactcctcttcgttgaagaagaagtcgtctttggaggggtagtcgggccagatgtcttcgatgctttcgtaagtgtcgccttcgtcttcgatctcctgaagattttcgatcacttccatcggggctccgctgcgcagggcgtagtcgatcagctcttctttggtggcgggccatggtgcgtcttcgagtttcgacgccagttcaagtgtccaatacattttttatgtctttcgttttttgtttgtttcggttgatatggcgggcgcccactggggcgccttttgcgcagcttcttttaaaagcggcgcaaaattataaaaagctgtggagaaaagcaaatttatctgacgagaggtgcgcggcagcgttggtgagtggtctgcttcagtctttgtgccagactatttcgctgatgccggccatgaagttgaagtatctggccagtatgaagaggtagtcgctgaggcggttgaggtatttgagcagattcgggtcgacgtatgtttctcgcgagagtgtgattatacggcgttctgcgcgacggcatactgtgcggcatacgtgtgtcttggcggcgagcatgcttcctccggggagtacgaatgcgtttactttaggtgtctgttcgtcgagggcatcgatccagccctcaagctggcgtatgttgtcttctgtgaggccccatgcggggggtgtctgtccgtcgggtacttccgaggcgaggtatcctccgagattgaagagcatattctgtatcttgaggagctgccctttgatttcgttgttgcagttggcatcggagagaacgcatccgaggaatgaggaaaattcgtcgagtgtgccgtatgcttcgaggcgcacgctgtctttgccgacgcgctgaccgccgacgagagaggtggttccggcatcgccggtgcctgtatagagtctgcttttttccatagtgtcttagttgtaatcgtaaaagtgtaacgcacggcaaggcggattgttgtagaggggtgatataaaatggaggagagggggcaggtggtttgtgta

SEQ ID NO: 3996 - DNA, 24419 bp, synthetic construct
  misc_feature 1..24419: note = Synthetic
  source 1..24419: mol_type = other DNA
ccaccacgtcgatggcatgagcaccgacgatggcctcctcatattcaaattcatgaccaaacttctcagcgatagcatccatcactgccacgccttgcttcataatctctggtccaatgccatcacctggcaataccgcaatctttagtttcatatttttatatacctatttattttgttcgttttccacaatattcagcatcttgaatgttgccttgatggcagcctccgtctggtcggcatcgagtcctcgtgtacgtagcaggccgttgttatgatgccaagagatgactgtctgcacgagggcgtcagtgcgtccgccagggggtatggtaacggtatagttggcaagtatggggaatgttctgtcgagatacttcttatagatgtaacgcagtgccttgacaaaggcatcatattgtccgtcgcccgtggctccagcctcatattgcttaccgttgatctccaccctcacattggcaccaggcttcagtccgtaggcggtagacaccacatagttgatcagcttcaccttgtcgctctcagtgtcatgcttcagcacgtcacttacgatatacggcaggtcgtcttgtgtcacaatctctttcttgtcgcccagttcggtgatacgctgagtcactcttcgtgtctgttcgggagtgagttccagccccagctcctcaaggttcttcatgatgtttgccctgccagagttcttgcccagggcgtattcacgttttctgccaaagcgttctggcacgaggtcgttacagtacaggttgttcttcttgtcaccgtcggcatgcactcctgccacctgtgtgaagacgttctcgccaacgatgggctgattgggggctaccgagataccgctatagctctccaccaccctgctcacctcgttgagtctgtcctccgcgatgtttgtcttggcatggaactggtctttcagtatcacctgcacactggcgagtggagcgttgccgcatctctctcccagtccgttcaccgtcacatgcagtcccctggcgccgctcagcaccgcagccagtgagttcgacaccgccaagtcatagtcgttatgtccgtgaaagtcaaagtgctgatcggggtatctcttcagcatctttctgaaatattccacacattgcagcggattcatgatgcccagtgtgtcaggcaacatgatgcgtttcacgttggtgcctatcagtgcgtccaccatctggtagacatactcaggcgagtccttcatgcccgagctccagtcttcaaggtatacattcacgtcaatgcctttcttgtcggcatattccagcacctccactatctctcttatatgctcttcgggcgtcttcttcagctgttgcacgcagtggcgcagcgaaccctttaccagcaggtttatcacctttccgccacagtcggcaatccagtctaccgacctgccgccatccacgaatccgagcacctcaaccctcttcagcatgtcagcactgtcagcatacttacatatcatgcgcacagcatctttctcaccctcagacactccagccgacgccacctctatgcggtctacgttgacatcacgcagcagcatacgtgctatcatcagcttctcgtggggcaagaagctgacgccactcgtctgctcaccatccctgagggtggagtccattatttctataaagcgataatcctgcactacaacctaaaaactaaaaactaataactaaaaactaaaaaacacccttctcccacgcctcggtcttgtccttgttctccaccaggaagtcaatatcgtcaagaccattcatcaggcagtgtttcttgtatccgtttatctcgaaatgctcacttctgcccgtcgccttgttggtaacggtctggttgggcaggtccacctccacctccatcttcgggttctctgctatgctagcgaagagctccttcaggaatggttctgtcaccacaacaggcagtacgaagttgttcagttcgttgttcttatgtatgtcggcaaagaacgagctgatgaccaccctgaaaccgtagcctgcgatagcccatgcagcatgttcgcgcgaggagcccgatccgaagttcttaccagccacgaggatacatccaccgtaggttgggtcgttgagtacgaaatcctttatcggattaccatccttgtcatatctccagtcgcggaagagattgtcgccaaagccagccttgtcggtagccttcaggaatcgtgctggtatgatctggtctgtgtccacattctctaatggtagtggcacacatgtacttgttattatgtcgaatttctgtttagccattgtcaattatcaattatcaattgtcaattaaagaagttctctcggatcggtgatcactccggttaccgccgccgctgctgcgactaatggcgagcatagtatggtgcgcgaaccaggtccttgtcgtccctcgaagttacgattacttgtagacacgcagtacttgcctgcaggtatcttgtcgtcgttcatggcgagacaggcagaacatcctggctgacgtatagcaaagcctgccgcttcgagcaccttgtcgagtccttccttgcgaatctgacggtctacagcccacgagccaggtacgagccaggcgatgacgtcctctgccttcttcctacccttaacgatgctggcaaaggcacggaagtcctcgatgcgtccgttggtacatgctccgaggaacacgtagtctatcttcttaccaatcagtttctcgccagccttgaatcccatgtagtcgagtgctttctcaaatcccactccgccctctgtcggtatagcctcggtgataccgatgcccatacctgggttggtaccgtaggtgacacgtggctctatgtcttctccgctgaaggtcagctctttgtcgaatacagcatcgtcgccgctcctcagcgtcttccagtatgccacggccttgtcccactcctcgcccttgggcgcatattccttacctttgatatattcgaatgtcgtctcgtcgggagccacaaaaccgccacgtgcacccatctctatcgataggttacacagcgtcagcctaccctccatcgacatgtcctctaccacctgtcctgcatattctacgaaatagcccgtagcgcccgaggtggtaagcttcgacatcagatagagcgccacgtccttagcgacgacgcccttgcccagtttaccagtgatgttgatgcgcatcgacttcggtttctgctgtagtatacactgcgacgccatcaccatctccacctcactggtaccgataccgaaggctacagctcccatcgctccgtgggtcgaggtgtgcgagtcgccacagacgatagtcatacctggcagcgacaaccccttctctggtcccaccacatggatgataccattgtcgggtgacatcattccgaagtgggtcagtccgaagtccttacagttatatgccagcgtgtccacttgcttcttcgataccggatcctcgatgggtttatcctggtcatgtgtcggtgtgttatggtcgggcatgcagtatatttgtttcggacggaaacatttcagtccgcgtgccctcatgccgtcgaaggcctgtggtgatgtcacctcatgacagtacatgcggtcgatatatagctgggtgggaccgtcctcaacgatctgcacgacgtgtttgtcccatattttatcaaaaagagtattcatcttcttttatttcttaaacttgttgatacaatcgatatatgcctcgacgctggcggttacgatgtcagtattggcaccgaagccatagtatacgtttccgtcgtattctacctgcatgtgcaccttacccacgtcgtccgagcccttcgagatggcttgtatggtaaactccttgagcgtcatctgcttcatgatgatcttcttcagggccttgatagccgcatccacaggaccgttaccgctggcagcagcctcaaacttctggttcgagatgtccagtcctatcgatgccacactcttcacacccttacccgttgtcacctgcaggaactccagcttcacggcatgagcctcagcggtgtcggcaccggcaagcatgagcacgtcggcatcgttgatctccttcttctggtcggcaagctgcaggaacttctcgtatatcttgtcgagcttctcctcgtccacgtccacgccgttcacgctcaggcggtgtttcagcgccgcacgtccgctgcgtgccgtcagtacgatgctgttgtcgtcgatacccacatccttcgggtcgatgatctcgtacgtctgcacattcttcaatacaccatcctgatgtattccgctggagtgagcaaaggcgttgcgacccacgatggccttgtttggctgtacgggcatgttcatcagcgagctcaccatacgactggtaggataaatctttgtggtattgatattagtgtcaatgcccagtcccttatgacatttcagtatcatggctatctcctcgagcgaggtgtttcccgcacgctcaccgataccattgatggtcacctccacctggcgcgcaccacccatcacaccgttgaacgtgttggctgtcgccatacccaggtcgttgtggcagtgggtagagaggatggctttgtcgacaccgtcgacatgctccttcaggtattttatcttctcataatactcctgtggcagacagtagcccgtagtgtcggggatgtttaccaccgtggcacctgccttgatcactgcctccaccacgcgtgcgaggtattcgttctccgtacgaccagcgtcctcacagtagaactccacgtcctcgacaaacttcttggcatacttcaccgcagccactccgcgttcgattatctcctcacgagtagagttaaacttgtacttgatatgcgaatcgctcgttccgataccagtgtgtatacgcttgtgcttggcaaatttcagtgcctcggcagccacgtcgatatccttctgtaccgcacgtgtcagcgcacagatagtaggccatgtcactgccttcgaaatctcaatcaccgaattgaagtcacctgggctggagataggaaatcctgcctctatcacgtctactcccaactgctccagtgcctttgccacctgtatcttctctaccgtgttcagctggcatccgggcacctgttcgccgtctctcagcgttgtgtcgaaaatgtaaagtctgtcgctcatttgttactatattattatttattatctttaaactctaaactaacccaaagagcctttcccacgttggaagtgagaaaggctcttcgagttttgctatggctaaacctactggcacgcatcatcacttccaaccgtttttatgcagtcgaagaccaataataatgctcaataggtttgcgttttgatacattttttcttaatttggttgcaaaggtacactttttcaagtaaaacgctaacattaacgccaactttcttcctacaattaactattttttaatcttctctcctttctcacctcttacctctcacctcttacacaccacagcagctacctgctcagcgatagccttcatacccttcaccgacggatggccacttatcttgtcgatatccttgagttggatatatgtgatgccatagtggtcgcagatggtctttgtcgactcggtgatgtcagccctcaggtcgttgttgatgatcacgtatatatccacgttgggatgatggtttttcagccagtccagcatatatgccatcgccggacgataggtatagaagtcgccatactgccatccctcatacttatattcgcccacaggctcaccagcccagctgtcattcgttccgccaaagatcaggatgatgtcggggtcgcccagatttctcatcctctttatgaacgtacgcggactatagtcgttgccgtcgtacccctggtagcctatggtagcaccgctgtacgagttgttcacacacaggcgcatcccattattctttatcagctgccaccaccaagtgtcctgcacacggttcacatccgtcttctccggagcgttcttagcgtaataccacagttcgttggtctcgggcgtcataaagtcctcaaacgtagaataggagtcacccagtattgacaccctctgtgcattggcagtaagaccaatgctacacataattaataataaatagtatttcatgttgagtttttagtttttagttttttgtttttagtttttcgtttttagtcgttatctcgaaatatcattatatcggcattctgaaaatccccttcaacgttctcagaacggacttgactccgcagctggcttttcggggttcatcgcgtcgctgtaattttcgccattaccgccattgacacgacttcccactatctcaccacctatctctggtggtgctggagcagagaacctcatgtcctcaggattagcaaactgggtatattcgctcctgaagttgagcagtacggtgtcggtcttacccttacggtgcttagcaatgatgatctccgccttaccctttgtaggtcgtcccttatcgtcctcatatatatgatagtattccggacggtgtacgaagagtaccatatccgcatcctgctcgatggcaccagactcacgcaggtcgctgagctggggtcgcttgccgtcagccgtatctctgttctccaccgagcggttgagctgagagagcgccagcacaggtatgttcagttccttggcgagtcctttgagcgagcggctgatgtgcgacacctcctcctgacgactgccgaagcgcatgccactggcgttcatcagctgcaggtagtctatcatcaatgcctttataccgtgctcacgagccagtcgacgagccttggtacgcagttcgaagatcgagaggtttgccgtatcgtcgatatacactggagcaccctccatcttatacatgttcttatcaaaccgctcccactcgtcggtagaaagttgtccgttgagcagtttcgagccaggtatctcacacacattggatatcagtcggttcaccagctgtacgctattcatctccaacgagaagaaagccaccggttcacgatagtctatcgcaatattcttcagcaggctcaacgcaaacgaagtcttacccatagctggtcgacctgcgatgatgacaaggtcactcggctgccatcccgaggtgatgtcgtcgagttcatgatagcccgtaggcacacccgtcagaccgccactgttcttcgaagcctccatcagtatgcggttagcctctggcagtatgtcgccgatgtgcttatagtcctgcaccatgttcttctgcgagatttcgtagagcgaagcctccgccctctgcatcaggtcgtccacatccaccgtctcgtcgaaggcgtcaccctccaccattgaggcgaagtgtatcagctgacgagccataaacttctgcttcagtatcttcgagtgatactctatgtgtgccgagctcgccacctgagcactgaggtccacgatatacgcaggaccgcccacctcctcgagagtgccatccttacccagctgttgagccaccgtcatgatgtccacaggctcctcgttcacgttaagcttttgtatagcgtggtaaatcttctgatgcttagagtcatagaacgtctcaggctgcagcaactcggcaaccaccgagaatgcatccttgtccaccatcagcgcacccagcaccgccctctccatatccaggttctgcggtggcagatgaccatacgtattatctatcggcgctgcctgcgcccttctccgtctgcttgtattattattctctgccatttgttatctaattctgttacctcctcaatactctctccttccaaaaatcatcgtacccactctcaccattgtcgagccatgtctcacggcgataggatagtcgtcgctcatgccccacgacctctgacagaagtcatcgtcatcagcaaaatagtctcgtttcacctcatcgaagaagtcgcttgccgtctgaaactcgcgagccacctgcgcctcatcgtcagtattggtagccatcatcatcagtccacatatcctgacatgctccatccctcgccattcgccgtccttgagtagcgtccgacagtcgtcgggagacaggccatacttcgtagcctcctcagcgatatgcagttccaagagcaccctgacagtcctgccacattttgcagcctgcttctcgatctctcgcagcagcctcatcgagtccaccgcatcaatcatcgtaatatacggtactatatacttcaccttgttcgtctgcagatgacctatgaagtgccattctatatcctttggcatctcgtcatgcttcagcctcagctcctgttcatgactctcaccgaacacacgctgaccagcccgataagcctccatcaccacctccacgggatgatacttgctcaccgccaccagtcccaccccttcgggcagactcgccttcaccgcctttaagttctcagctatcgacatttttttccgtaaaccaaaaactaaatactaaaaactaaaaactaaatacaactacgcaccgtgctcaatcacgtccattattttcgtctcattgatggcagcgatgacatagtcattcatcgtcgtgcccatcacctcctcaatgttcttcaccgcaccgttgagcgaagccgcctgtaccagataatatgcgtttgagcgcttctccttctccgtcttctcgtcgatggtgataaactgcagtttcgtcttataccagcggtcgtcgttagtgttctccgagaagaatatctcaccataagttgtcggggtgatagccttcacgtcgaactcgccactgatatatgccgacatctcctcagtgatcttctcctcagcctcgccgaagctcatagcctcaaccacgtagctctcactcaccttcttaggctgtccgtcctccatcgtcttgtcatatttcaccttggtttcaaaccataatgatgtcttacttctcattgttctgttttttgttatattatattggataattgccgacaaagatactgttttattttcaaataaaaaatagaaacaacaaatatttactcaactttcgcaagttgagaggagttaagggagttaaaggagttaaaggagttaaggacaaatgttttacttctttaatctctactcctatagggaatataattcacgtctatttatgaaataaaaaagaggagtaactatcacagctactcctctctccttacactattttctgtttgcatttctttgaggtgcctggcggattcgaaccgccgtagacggttttgcagaccgttgactaagccactcatccaaggcaccaaagtcataaagcgagtgcaaaggtaatgcatttccgtttaacctccaaattttatcatatatttttttgcgaacaacctcaccattcactatctgtgcaggcatatagcactaagaacctaacccctatgcgaaagacattccttaccctttgtgccgccatcctcaccagcctgcgctccatcgccaaggaggagcagaaacaaggcatcaagcccacactgacaatgtggagatagaaaaagaaagggcgagtcaccccgcccatttgttttcacaacggaatgtttccaaaggcgagagctgaggaaacaatatcagtttactctgccgagaccaagaaacttcttcaagtcattgaaaataatccttattgtgaattgctaaatttcgtgtggcaaagatagaaaaaaacatgattttcatttgtttaatacatttatttaccatatctttgcatacaaataaaaaactcctacggagtacgcaggagtaagaagtcttcggcttatagccttgttgtgaaaagtctttcactttcgtatcttggctgcaaagataaagtatttgtttgaaaaaaccaaacctaaatcataaaaaatggataatattttaggaatagacctgggaaccaattctataggattgtctttacgaaacactaacttcaatggaagtattcagaatcaacttgaatactttacatccatcatatttccttctggtgttggaaaaggtaaaagtggtgaattttcgtacgcagcagaacgaacgaaacatcgctcctctcgccgattgtatcaagcacgtagatataagaaatgggaaactttaggccttctcattgagaacgattactgcccactatctatggaagatttggaaaaatggagcaaatatgataaggctaaaggattaaaacgtcaatatcctattcatgcgaccaactttgagcagtggatacgattggatttcgatggagacggaaagcctgattatgcaaatccatatgaactgagagccgagttgatggagaagcagtttgattttacaaaacagatcaatcgatacaagttaggtagagcattgtatcacatagcacagcatcgtggtttcaaaagtagtaaaggtgaaactataaaggagcaagaacaaaatgaaaaagacaatatacaagactttgatttggctgaagctctaaaaaagtcagaagaaaaaaaatctggaaaactttcagaatacatgaaaaaatacaatcttcctaccgttggttgtgcctacgcacatttgaggaagaatggtattcgtgttcgcaatagcatataccaagcagtacgttcacaatacaaagatgaaataaaacagatttttgaatatcaaaatggattagataagaatagcgatttctataaaagactattgagtgagaagaagggagaaggaacaatcttctataaacgaccattgcgttcacaaaaagggcaaataggctattgcactcttgagccaaacaagccacgctgccctatcagccatcctgaatttgaaaagtttagagcctggtgtcttattaataatatcaggtttggtgaagatttaaaagagacgctcacacttgaacaaaagagggaactattccacgaacgattcttactgacacgttcttctttcaaatttgaagaaataaggaaatggatagaacgagaaacctttatgcgcctggattataaagcaaaaaccatcaactacaaagacaagacaaacgtttcaggatgtcctatttctggccggctgaaaaatcttcttggcgaagactgggaaaaatggatgtgtaaaactggcatcacgaaagtaataaagcaaaagaaagatggaaaatatacagaaaggcaagttgagattgggtattcttcatatgatttatggcatatttgtttttcctttgatgaaccagagaatgttgagacatttgccaaagaaaaactgcactttgacgataaacaagcaaaacaacttgtgcgcatatttttcgctattcagcaaggctatagcatgctgagtcttaaagctataaagaatataaatcgtttcttagaagaagggctaatatattcggatgccgtattattagcgaaactgcctgacatttttaaggacagatgggcaattgaaaaagatgcaatcgtttcacaaattgaccttgtcatagaaaataatagaaaacaaaaacttctattcaacatcgtaaacacgctaattgcaaactacaagtcgttgggctatgatgacgaaatacaattcaacgaacgttttgctgaccataacactacttacaaactccagccatcagattacaatgacatcaaaactgttacaatcaaagctattggcgaaaaaacttgggctaagaaagacgaagaaaagcaaaaggctattttggaacaagtagctgtcctataccaaaacttttttgcatcagagcaacgtgattactacaaattaccaaaagtagctgacgatttagctaaactgctacacgaaaaatataattttctacaagagaaagatttgaagaagatctatcatccgtctatgatagaattctatgcatctgcaaaagagcagcaccttgacgatgggagatggatgaaactccttggtagccccgtcattggtgcatttaaaaacccgatggcaatgcgagtcctgcatgttctcaaaaaacagattaatgacctattgaaagcatctttaataaatggtgaagaaacacgcattgttgtagaaactgcaagggaactcaatgatgcaaatatgcgttgggctattgaaacatatcaaagggaaagggaagcagagaataaggaatacgaaaaaattctaaatgaatatttcccgaaccgcaatataaatgataaagaaatagagcaagcaaggctgatgtgtgagcaacacgacatacctgaaagtgatattttacaacaaaaagaaaaaatagataaagacaaaactctgaaatctcttatctacaaaaaagatctaaccaaataccgtttatggttagagcaaggatgccgttgcatatatacaggtaagatgataaatattacaaacctattcgatgagaatgcttatgactttgaacacacaataccaagaagtctgtcatttgacgattccttggcaaacctaaccatatgcgatgcccattataaccgtacgataaagcaaaaccaaatgccaactcaacttgctaattatgataaagatgctaatggttatacagctattttgccacgtcttcaaccttggattgacaaagttgaacgcttaaaagacaatgttgaattctggaaaacgcaatcaaaacgtgcacaagacaaagacaggaagaaccaatgtattcgtcaacaacatctttggaaaatggaattagattattggaaagccaaggttgatcgatttacgatgacagaggtaacttcaggctttagaaataatcaattgaacgatacccgattaattacaaagtatgcttatcactatctgaaaacggtattcaacaaggttgatgtacaaaaaggtaaaataacctctaatttcagaaaaatccttggagttcaaagtacagatgataaaaaaaatagagataaacattctcatcacgctatagatgcgactattctaactatgattccatctgctgctcaacgcgataaaatgcttgaaattttttataagattcaagaagaagagaaattgcatagagacacaactgttttaaagaaagaactgagtaaagagataaaaaaatgtaatttaccaacaaatgtatccttaatcgctccatttattgaaaacaacatactaatcaaccatgtttcaaaggaccaaacacttacacctgcacacaaacgcaagcgtataagaggcaaaattgttccattaagagatgcagatgggaaaatcatatatgaaacaaatgcggatgggactgtaaaaaagaataaatacgggcatcccataccaaaagctaagcaatggattacgggtgatagtatacgtggacaattgcataaagattcattcttcggggcaataaaatacccgataatagataaagaaggaaaaccaacaagaaaaaatggctcattcatttatgagaaagaatctaatggccaagacgtcatatcgatggttatgcgtgtacccataacaagtttcactaaggaagacgaactaaagaaaatcgtcgatcctactattagagcatctatcgccaaaactattgcaaaaagaaaagaagaaggaaaatcttttaaagctgcaatagaagaacccatttggctattaggcaaagatggtaatgaaataaaaatagataagaatgggcttcccatatcacctatcaggcatgtccgttgtaaggttgcagcaggacggggattctttacaaaagataaggctattgaagttaaggagcaaacttatccttcaaagtatccatacaagaatatatactatgcacagaatgatgggaactacttatgtttgctgtacgaaggagttaagaaagggaaagtcgtgagacagtttaaattcataaactattttgaaacaatatcacttggtataaaaaacactaacagtctatacagtgagccatatttccagaagattgaagatagaaaaactgaattaaaactatccgcagtcataaagactggaacacacatactaatgtggaaagatagtccagacgaattagaaagcctaacaaacgaacaattaagtagaagattgtttgttgtatataaattcaatttaaaaggtgcaaactgcatatatcttgagaaccatcttgaagcacgaaatgaaattccccaaaaagaagactatacaatttttgacactacaaaataccaagctagattaaccttagtcgcaaatggtttcaattgcctaattgaaaatcgtgacttcaaaatcaatgcaataggtaatatcgaatggttatgagcaacataaaactatttcaagataaaaagatacgttctgtttggaacgatgaggaagaacaatggtatttctctgttgttgatgtggttgaggcattgacgaatagcaatgatcccaagcaatacatcaagcgaatgcgttcacgtgacgaagctcttaattccaactggggtacaatttgtaccccccttgaaatgatagctattgatggtaaacggcgaaaagtacaaactgccaacgtcaaaggcttattccgcatcatccagtctatcccatcccccaaagcagaacctttcaagcaatggttagcacaagtgggatatgaacgtatgcttgagattgaaaatcctgaacttgctcaagaaaggatgaaagaactctatgaaaagaaaggttatcctaaggactggatagacaagcgactacgtggaattgccatacgacagaatctgactgacgaatggaaaaaacgaggaatcacagaagaaaaggattacgccattcttacagctgaaatatcaaaagcaacgtttggcatgaccccttctcaatataaagagtttaaagggttgactaagaaaagccagaacttacgcgaccacatggatgatcttgaactcatcttcaccatgcttggcgaaagagtgactactgagatttctgaaaaagaacaacctgaaacattcaaggagagcaagaaagtagctcaaagaggaggtaacgttgctggcatagcacgcaaggaaactgagaaagaattgggaagaagcgtttctaatccaaacaattttctccctccgtctgaacagaagaaacaattagaatagcctatgatcaagaagaccttgtatttcggcaatcctgcctacctgtcactgaaaaacaagcaactggtagtaaagctgccagaagtggaaaagagcgacatgcctgacgtgatcaagaaggagagcatcaggactgttcctattgaggacatcggcgtgatggtgctcgacaatcaacaaatcaccatcacacagggactgatggcggctctgctcgacaacactactgctgtcatcacatgcgacagcaagcggatgccaacaggacttctgctacccctcgagggacatacactatacaacgagcgatttcgtaatcagatagaagcctccctaccccttcgcaaacaactgtggcaacagactgtgaaagctaagattgaaaatcaagccttctgtctacaaaagaacacgccaaagtcacatgccccactacatgttatggctcgcgacgtgaagagtggtgatcctgacaactatgaagcgcaggctgctgtctactactggaaaaacatcttcaaggacaagcctggtttcatccggtcacaagagggtgaagcaccaaacaacttgctcaactatggatatgccattctgcgaggagtggtcgcccgctcactggtggcaagcggactgctacctgtctatggcatccaccatcacaatcgatacaatgcctattgcttggctgacgacatcatggaaccttatcgcccattcgtcgatgaccttgtgatagatgtcagaggacgtatagaagttggcgagaacctgacgacagaactgaaacgtgagatgctcggcatacccgtcatcgatgttcgcatcaatggcaaacgcagtcccctaatggttgccgtaagccagactactgccagccttgccaaatgtttcagcggagaattgagaaagatcagttatcctgagtttatatgattgaacgactaaacgaatatcgagttatgtgggtgcttgttatgtacgacctgcctactgacacaaagaaggagcgcaaggctgcagccaagtttcgaaaggagatcatgggtgatggtttcaccatgttccaattttctatgtacatacgccactgcgccagcatggagaacgctcaggtacatataaaaagagttaaatctttacttcccgagcttggacacgtcggaattctatgtattaccgacaaacaattcggagatattcagattttctcatgcaaaaaagagaagaagcccaatgccccataccaacaacttgaacttttctaacagcgagagcaaagtgatgcttgcatcagctctgccgagtcgtgacgaaaagtcatcaaggataattatttttgaaaagaggattccgacattttgtcgaaatcctctttctttttgcacttcatttttcttttctggtcaacaaccttttctcctgattaccagaaagatacccatttcaagttgtttatacctgtgcaaagatacgaaatttttagctaatcacaacccgcacaggtgagccgtgcgaggcaaagacgttgtttatacctgtgcaaagatacgaaatttttagctaatcacaacaaagccaatacgtgcgcatgcgtgcgcggagttgtttatacctgtgcaaagatacgaaatttttagctaatcacaacgtttattgacttcttgcctttgttggctctgttgtttatacctgtgcaaagatacgaaatttttagctaatcacaaccattgccaacgcactagcataatacgtctggttgtttatacctgtgcaaagatacgaaatttttagctaatcacaacctcaatcggctttgatagattaggatgattgttgtttatacctgtgcaaagatacgaaatttttagctaatcacaacatctacctttatccttggtgattgagtaccgttgtttatacctgtgcaaagatacgaaatttttagctaatcacaacttaatttaatttgttatgaaaaaagtattagttgtttatacctgtgcaaagatacgaaatttttagctaatcacaaccgcgggcgtcgtattccgctgcaatcttgcgttgtttatacctgtgcaaagatacgaaatttttagctaatcacaacctgcaacataatcgggttaagatagttcgggttgtttatacctgtgcaaagatacgaaatttttagctaatcacaacggacgaggtgcacaagaccgcccaggagatgttgtttatacgaaatttttagctaatcacaacatggtcggttttggtacgtccaggagcttgttgtttatacctgtgcaaagatacgaaatttttagctaatcacaacttgtttcgttctaataaaaaagaaaagtgtgttgtttatacctgtgcaaagatacgaaatttttagctaatcacaacaaagtttggattatttataggaattaaatagttgtttatacctgtgcaaagatacgaaatttttagctaatcacaacctccagggttacgagcagcatagtcggcaggttgtttatacctgtgcaaagatacgaaatttttagctaatcacaacttcaaggatggcaacttcattttcatcctcgttgtttatacctgtgcaaagatacgaaatttttagctaatcacaacattcgtcacccatgtagtcgtagacccacagttgtttatacctgtgcaaagatacgaaatttttagctaatcacaacatgctgcgagtcctgtcttatcagtcttacgttgtttatacctgtgcaaagatacgaaatttttagctaatcacaacatcgaagtttattctaacccatgtcgacttgttgtttatacctgtgcaaagatacgaaatttttagctaatcacaacagtggcatacttattagtgttgtttatacctgtgcaaagatacgaaatttttagctaatcacaaccacgccaccgccaccacgaccggcaccgacgttgtttatacctgtgcaaagatacgaaatttttagctaatcacaacctgtagcagaggggatgacgagagaggccggttgtttatacctgtgcaaagatacgaaatttttagctaatcacaacatatgttgaacttggagttgttctgaacagttgtttatacctgtgcaaagatacgaaatttttagctaatcacaacaccacctccgcacatgggcagctgagcatggttgtttatacctgtgcaaagatacgaaatttttagctaatcacaacagactaaagacaatatggcaacacagataagttgtttatacctgtgcaaagatacgaaatttttagcaattcacaaccacgctgacgggcaacggattcgtgtatagttgtttataccagtgcaaagatacgaaatttttagcaattcacaacacacgtgcgcgtatcaaggaagtgcgcgtcgaagctttacgcgaaggcttcaaacaatgcttcaaggacaaggattttgccaccatcctgctgctcggtgacaagattccgcagaacatcctcaccgaagacgaggtgctgctgcaatactatgacatcgcccagatgaggtcgtaaacatgaaattgtcgcatggatgttaagaaaagtgttgagtcggccaactgacggaataggattcagccaactgacgggatgaaaatcagccaactgacggaatgaaaatcagccaactggcggaataaaatggcaaaacattttgatattcaataaaaaagaactatctttgcagcatcttattattaacagatatggatattgatataacgtataagaaaagaattgccgacaaattgctacaggagcaattagaggctgcaggggtagtactgatagagggatcgaaatggtgtggcaagactacgactgctgagcacttagcacaaagtgtgctgtacatggatcatccaaagaagaaacaggaataccttgtcttggcagaaaacaatccggaactgcttttcgaaggagcagaaccgcgattgttggacgagtggcaaatagctccacaattgtgggacacggcacgttttcttgctgacaggcgaaaagggaccggccactttatatttacaggttcggcagttccagcagatagcagtaagattagtcatacgggaaccggacgttttgcctggataaccatgcgcccgatgagtttgtgggagtcggaagagtcaaacggcagtgtcagcctggatggtctttttggtggtcaattcaaggcatctactgccccagacccgtcactcgaagaggtggcttatatgctatgtcgtggtggatggccggcatctatagacatgaatcggcaagcagccttgaagcaaccaaagaactatgtggatgcagtttgcaagcgtgacatatcgcgtgtggacaatgtgaaacgtgatgcctcttttgcattacgactgatgcggtcgtatgccagaaatcaaggtgggcaagtgcccattagtgtcatgtattcagacttgtcgtccaacaaagatgactcgttaagcgaagagactatatcatcgtatatcactgctctaagaaaaatattcgttattgaagatatgccggcatggaatcctaacctaaggagcaagacggccatccgcacgtcggatactcgatattttgtggatccctcgatagctacagcggctctcggagtcggtccaaaagatttgatgaacgaccttaatacctttggcctactttttgagacaatggccatacgcgatttgcgtacttatgcggaggcgcttgacggtgaggtttttcattatcgtgacaagaatggactggaatgtgatgcagtcgtccatcttcggaacggcaactatgggcttatagagataaagttgggcggagaaacccttattgaagaaggtgcagcaaatctaaagaaacttgccgacaagattgacacaacaaaaatgaatgccccttcattcttgatggtgctaacagcagttggtgcttatgcctatcagcgtaaagacggggtgcttgtggtgcctattgagtgtttaaaagactgatgagatacaggggcaaggacatagagctgattggcgagaaaatggtgttcggaagacgaacagcatggattcgcttggtggaagacaacagcttccagcaagtgttatgggatgatattgtcttcgatgaagatcatcatcaggatatttctcacatccgctttatagctttggctactcgtatcaaagaggaaatcgcacaaaaacgcttactggctccatacgaaagcagtcttattccattgccacatcagattctcatactggagaaactgatgaaagctccacagacccgcttccttctggcagacgaggtgggtatgggtaaaaccattgaagcaggattggcactaaaggaactgaaacttcgtggcgaaattaaacgcacgttactcatcgttcctaaatctgctatgctgcaatggcagagtgaactgcaacaacacttcaaggagcagttccatatctacgactctcaactcatcaactccatggctgcgatgaaattctatcagggttgtttatacctgtgcaaagatacgaaatttttagctaatcacaacgtattctgtgatgttttcctcgatgatgctgcgtacagcctgctctacttcgggtgacgagccgaggaaacgccgtcgtggtatgcggattgtggaacctgctttcttgagtgcgaggaacttccagaactcagcttcgtcggagagttgtattgtgcgtttgtcgttacgtcggcttccgtctttcttgcgtccgaaagatccagttgcctggtagtatttgtgccagaagaaccgcttcattcgcggtgtgactacgatttctcccccgtcgttatggatttcggcgtatgggaggtcggtgtaaaagatgacggagttatcggttgtcctggacttgatggaccgtctgagctgtcctgtgtcgacgaggatgtgccctcctgggcgtgttggcgactttcgtcgctgccatgcctgggagaagaatgcctgtcgctcgaagttctggtcgaactcgtcggtcatctccacctgaatgtctcggaggatgtttttgatgattttctgtatattttcgttcattttgtttggaggttgggaatttttttgtacctttgcagatggaataagcattggatgtgtgggctaaccttgcaaacgagcataagatgtcgccatcctgtgcttattcttttatatcgttaacagaataaaggtaatactttacaattattcgaccattgcgtaattcttcaacatcctttgctgttgtttatacctgtgcaaagatacgaaatttttagctaatcacaacagtcccgctgcgataaagataggtatattccctttaaccttcaaggtgttaccttccgcttgtagaaagatcttttccaccgacgagacagcagccagttccattgcgtcgacattattctttagagttagagtattattttccagtgccgtgagtttatcccatggagcatcgcctgccacctccgcaattttctcgagcagagcccccagcgaatcaggagtgatagagttctcctgtgtctccagtctgaaggcattgataagttcgtgtagttggtatctatccattgttgcaagttaaaagattttttacttgcgacaaagttacagaagaacaatgtgcggtaaaaagacaaaattaacactttaactgaaggctttctcatgtaagatgagtacctttgcagacagataaatcggaatttgaatgaaaaaactgtggagcatatttttggtcatattgctttcaccccaaatagtgaaagcgcagatttcatttgacccaggtgaaggatgtctgaatgttgttgatttcaccgccggaaaaggtttcggtgggtctggcagcaacagtatcgcagcccaatatgttcatgaaggctttatcaatgagcaatttagtatcgggggaggagtcggttacagttatctcaatagttatcactcctcagccattccgcttttcttcagcacccactacttcttcttggatcaacgattcactcctttcgtgaatctccgagctggcgtgtatttcggagcagaagagagtattcaacctgatgtcagcctgtatgtagcacctagtgtcggagtcaaagtgcatatcacgcctcgcatcggcatactggcatcagttggctacgatggatatctcgtaaaggctcttgattctgtcaagaacaattaccaaaccaagatggcgtcaggtctgggcattagtgtaggtttgtgttttcaaataccgggatggtagctcgttgaaagaatctaacggctaaattccaatttatggaaatagaaaacaggcctaatccgaatgaggcttttccgaatcctaatattccaagcctctgtttcattaaaaacgtagtgaagaacccacgtatcatcatcggtgactacacctactatgatgacgtggatggtgcttaccaattcgagaagcatgtcactcatttctacgacttcataggtgaccggctgattattggcaaattctgcgctattgccaaggtcaaggaagggaagaaatatttgaagaaataatcccatgaagaaaaaaatacgtcttttatccattccattcgtcttgttggcggcatttctcagccttggcttcctgccattcctgttattgcccatcatcatcctcttcgtgaattatctcgtagacagaaaagagagcaatcccgtggtgcaagggatgaaaggaaggcttttccacagcgtggaagaagtggaactgaaatatgggaaacctgacagcgtggtggtgctcaatgccgcgaaggcaaacgagatttccgatgtggtcctttcataccccgagcgtggcatcctcgtagtggcaggcagagagattcccatggacgacattacgggcatcgcaccgaagaacttggcgataataccttatgtcgtcgacgagtacgccgtggtcatcaacacgaagaatcccgcagaaccggtcatctacctccgtgtgggatacgacatggggtatgcccgggaggttgctacgcaaatccatgaaatactaaagtcttctgcggcacaaaacaagaaatagaaccatcggtgataatcaccaaccccctcttctgcttcctgatccagaagcgtgatcatacacgggtagcagactttcctataccttctgcaaagttttcttttttatgttcaccaacgacgcaatcataaacataatgcagaacaatgtaatgtgtagcgtaaggtcagtgaggttgaagcgtaaggtcacggaggttagggcgtaaggtcactgaggttacagcctaaggtcacgaaggttacagcctaaggtcacgaaggttagggcgtaaggtcacgaagggtacggcctaaggtcacgaagggtacagcctaaggtcacgaaggttagggcgtaaggtcacgaagggtacggcgtaaggtgcgtgagactatggcgtaaactatttgacccaaagttggtacaattagacccaaagttggtacacttttaccaaaagttggtactaaaaagacccaaattttgcacagacgacccaaagttggtacatttttcacctgtaactaattaagtatcaagtcgttatcctaccctataatctatatatataaatatatatagagaattataattgaatgataaataaatgatataagaagaataaaaaattctacttgatgtcgagtagcttgtgctgttgtaaggagagctgccaatggggattgcgcaggatgtagtctacgcactgacgacggatggcagcattgcgctgggcgtcgcctgtgtcgcagggttgcagacggtattcgtgggcgcggatgccgcagtcggtgggctggtggatgccatcaaagatgaccttgacctcgctggcttgggtgagtaccaccctaccttcgtcagtgaaggactgcttgggtgagacggtgacccagtcgatgcctggtggcagaggacgggtgccgttggtctcgatggcgacataatagccggcggcatgaagggcatcaaggagtggagggtctacctgtagggagggctcacctccggtgaggactacaaagtggc

SEQ ID NO: 3997 - DNA, 24368 bp, synthetic construct
  source 1..24368: mol_type = other DNA
  misc_feature 1..24368: note = Synthetic
ccaaatgactcggtcgcctttcaattgttgtctgaaaaaatcgttcataaatgattaaatcaacttatcggatcatttggcaacgacaaaaaggggttacaactcgatagcgtttacagacgacgcaccgccgctttgaatttttcgccacggtcttcgtagtttttgaacaaatcgaaacttgcacagcacggtgacaacagcaccgtgtcgccctcgtgcgccacctcgtaggctttttgcacgcactcctctaccgattttacttcgtacatcgggcaagtgcagtggtcgcgccaaaagtcgaacagttttttgttgtccacacccataaaaatgagcgtgtgcactttttcgcgcacgagcatctctatttcggaatagtcgttgcctttgtcggtaccgccaagtatcagcaccacaggcgttttcatactttgcagcgcataccagcacgaattgacgttggtggctttcgagtcgttgatgtaacgcacgccgcgcaccgaagccacatattccaaccgatgttccacgccttgaaattcggccagcgacttgcgaatggtttccttgcggatgttcacgatttgcgccgccaaacccgccgccatcgaattgtaaacgttgtgcgtgccacgcagcgccaactcctcgatgggcatcgtcatatcgttttcgggaagcggtgcggttatcgtcaaatcctgctccacgacaaaggccttggtcgtttcgctcttttcgagcgcgaacggcagcagttgcgctttgatgttgcgtttctcgatttcggctttcagcacaggatcgtcgttccaaaagatgaaggcatcttcgggcgtttgattctgcagaatgcggaatttcgagtcgatatagttctgaaatttatagtcgtaacggtcgagatggtcgggcgtaatgttcagaataacagacacatcggccttgaaatcgtacataccatcgagttgaaacgaactgagttccagcacatagtaatcgaaatcgcactcggccacctgccacgcaaaacttttgccgacgttgcctgccaaaccgacgttcaggccttcgtttttcaagatgaaataggtgagcatcgtggttgtagttttgccgttcgaaccggtgatacagatttttttggcgtgcgtgtatcgcgaagcaaactctatttcggagatgatgggcgtgccttgtgctcgcaactgcttgacaatcggagccttttcggggataccaggacttttcaccacttcgtcggcattgagaatcaactcctcggtgtgtccgttttcctcgtacgcaaaaccgcgtttttcgagttcggctttgtattccggtttcagcgcacctttgtcggacaagaacacctcgtagccctgtttcgccgccaaaatggccgtcccgacaccgctttcaccaccgccaagaattactaatcgtttcatagttttattgcaatttactgttgttatctgatttttaatgtcaatatggtcaacgccgccaaaatgatggttacaatccaaaaacgcagcgtgattttcgtttcgtgatgcaactctttcgagccttgaaatttgaccgtacacgtcgggtcgattcgtagtacctgctccatcgaggtgcggaaatggtcgtgaatgggcgtgcgtttccacaaacgtttatgttgtccgcgttttttgttgaacgtatagtagttgcgttgcaaaatcactgacagactctcgacaaggaatacgccgcacaaaatcggcagcagccactctttgtggattatcacggccgacaccgctatgatgccgccgatggtcaaactgcccgtatcgcccataaaaatttgtgccgggaacgagttgtaccacaaaaatcccaccaacgcgcccacaaatgcgctgagaaaaaccaccaactcttcgctgccgggaatgtacatcacgtcgaaatagtcagcccaaacgtaactgcccgacacataagccaacactatcagtgccacgccgatgatggccgaattgccggcagccatgccatccatgccgtcgttcagattggcgccattggacacggcagccaccaccagcaccaccatcagcacaaaaaacacccaacctgcccaatatttatagggtgtgcccaaaaagttgaacatatcggcataattgaagttgtgatttttgacaaacgggatggtggtttgcgtcgatttgacgctcggcgacttgtacacgacctccacattgttttcgatgcgtgtcgtaacaacttcgttcatcaccgtcgccggactataacgcagcgtcaacccgacaatcaggccaagcgttacctgagccgcaatcttccaccaaccattcaagccctctttgttgtgtttgaacgttttgatataatcatcgacaaagccgagcagtcccagcagcaacgtagtgataatcatcaagataagataaatattttccaattttccaaccagcagacacggcaacagcaccgccacaataatcaccacgccgcccatggtaggcacgccttttttttgcgtgttgaacgggtcgagtttttcgtcgcgctgcgtttcggagatgttgcgccgtttgagcaatgcaatgaaatatttgccgaaccaaacagcaatcaccaacgcgaaaatggcagccaacacggcacgaaacgagatgtagccaaacatgcctgcgcccggcacatcaaacattttgttcagataatcaaacagatagtacagcatagattttacattttatcgttcaacattcaatgcgttacgcaactcctcgtggtcgtcgaaatggtgtttcacgcctttgacgatttggtaattttcgtgtcccttgccggccaccaaaatcacatcgccgctttgtgccagcgcacatgccgttttgatggcttcgcggcggtcggcaatgaccaacacactgcgtttttgcacatcgtcgagcccggccagcatatcgtcgagaatggcttgcggctcctcgtcgcgcggattgtcgctggtcaaaattacgcggttgctcgctttgacagcctcgcgtgccatcatcgggcgtttacctttgtcgcgattgccgccacacccaaccaccgtaatcaaattgccggcacccgcacgaatatcattgatggtagaaatgacgttgttgagggcatcgggcgtgtgcgcataatcgactatggctgtaacgccattgcctcgtatggcttcaaaacgtccgcaaaccggctttagcaaactcaactttgtcagcacttcgagttcatcgtagccaagcaacacggcagcaccaaacaccgccgacaagttggaagcattgaaccgccccacaaacgacatcatcacctcacgaccattcatctcgagcaacatgccctcgaaagagttttcgagaatgcgcgttttgaagtcggccattccccgcacagaataggttttcttttgcgccgcacaattttgcaacatcacttcgccgtttttgtcatcgagattggtcaatgcaaacgcgtcgtgcggcaaatcgtcgaaaaagcgttttttggctttcaaataattatccaccgttttatgataatccaaatggtcgcgcgtgaggttggtaaaaatgccgcccttgaaacgcaatccggcgatacgccgctgatcgaccgcatgcgaactgacctccataaacgcatactcgcaaccggcagcaaccatgcgtgccaacagcgcattcaactccaaggcgtcgggcgttgtatgagtagatgccacagcctcgtcgtccacatagttgcacacggtggataacaatccgactttgcagccgaaactccgaaaaagttggtagagcaacgtagcgatagtggttttgccgttggtgccggttacacctaccagcgtgagtttttgcgacggacaaccgtaaaaattcgatgccatcacgcctaaagcctcggcactgtcggccgtttgaacatacacaactccctcggcaggattttcgggcaaggtttcgcacacgacagccaccgcgccctgcgccactgcttttgcaatgaaatcgtgtccatcgacagccgtgccgcgcgtagccacaaacacatcgcccggcttcactacacgcgagtcgaaacacaagccggacacttcgcaatcggttgcgagcgctttgctcaacccgacattctccaataacttactgattttcatatacttatttatcttaattccaatacaactgtttggccgcgccgagcaacactgccggcctcgaccgactgttgcgccacactgccacgcccatacatctgcacacgcaagcccactttttccatcaaatagacagcatctgtggcgcccatacccacgacattcggcaccgtttggtctgacaccttcagcgatttcagcatcaactgatcggtgccatttgccttactccaagccgtcgagccacccgtccacgccacgtccaactcgtcgagagcctccgttatcgatgtcgtcaaaccatctttcaccatcgggacggtgttgcatggcgcatccggcgacaaatgttgtttttcggttcgcaaatagatgcgttcggcaatttggcgggctaccggtccacacatcgtaccggcatcggccggttccaccggtttgcgcatcaccacaatcagcgaatatttcggtttgtcggccgggaaatagccacaaaacgttatctgatgccgcaccggcgcatttttccaatattctatctgcgccgtgcccgtcttgccggccaaagccaccaccgacgaattggctctacgagcggtgccatcggttacgacagcccgcagcatcatacgaatgtcgcgcaacgtgcgcgaagagcaaattttcgaattgacagtttcggtcttaaacgaatcaaacacacgcccattctgcccaatcgacttcaccaacatcggtttgacatacttgccatcgttggcaatggcgttgtaaaaagccaacgtatagatgggcggcatacccgtttcgtagcctatcgacatccacggcaaggtcgttttcgaccaacgcacaccggcgtcgttcgggtgacgcacatcgggcgaaggggtcttcacgaggtcgaattcgagcggcttgccgacgcccattttgtacagtgcatcgacaaaatcgcccggtttgtctttatagtaatcatcaatgacgcgcgacatgccgatattcgacgatttggcaaacacttccgtcatagtcagtacgccattggcgtgcgaatcggtcattttgcgaccatacatcacccactcgccgtcgcctgtgttgattttgtcgtccggcttgacaatgttgttttccaacgccaccatcatcgacattgtcttaaaggtcgaacccggctccggtcgcgaataaaacagtatatcgtccgtttcggcatacacgcccggcgacacacgactcatattcacgcacgccttcaactcgcccgtagccacttccattacagccacgcagccctgctcggcgctgaaccgcttcagttgttccacaaacgcgctctcggcaatatcctgtatctcgatgtcgatggtagtggtaacatccaaaccatcttcaggctcaattatcggcacataagcagcataactgcccaaatgctgatactgtcccaaaccgggtgttccgcgcagcaccgaatcgaaagccaactccaaaccacttgcgccacccttttcggattgaccgtaaatgctgccaatggtgcgcgatgccaacgacccaaacggtttgatacggcgcacatatttttcggatatcagaccgccacgcatctgccccttgcggaacaacggaaactgctgcaactctttcaaatcgttatacgaaatctgctgcggatagagcggcaaccgacgtgcttttttgacacttttgctttggtgcgcctgcataatcatgcgcttgtactctgccggcgtgcggtcgccaaacttctgcgacagacaccaagccaacgagtcgatctcctcgcgcagatgccgcccgccgttcgccttcagatattcggtttgcgtatccatatacacccgatagaatggcaccgtgctagccatcagtttgccatcgtacgaatagatattgccacgcgtagccacaatctcccgattcggagtctttttgtccaactccagcaattcgtcgcgcttaacagtctggataataaacattttacccacaaccaacacgaaaagcacaaccataatcacatagataatggccatacgaaacactatcggttttttactcttcggcatctttttttctactccggcaaagcgaaacaaaaaattactctatctcgacggcaggctcgcgaggcaactgcaacgcgctaccctgctcctgcaatttattcaccacacacgattggcggctcacctgcatcaactctttcgacaacaacaacgatgtatttttcacatcgaccaactcttttttcagcgtttcaacacgacgcaaatcggcctcgtgcgcgaacctattatatacaagcaacaacgacagcagcaccagcatcacgccatagagcacctgccgacgcacaaaatcgcgctcgagcacatcgcccgacgtaatttcgcgccaactcacatgcgggcgctcagcccaaccgcgcgacaacttcactttcaaatccttcaacgacattgcttattctcccacacgttcggccacacgcagtttggcactgcgcgcacgcggattctcggccacctcttcggccgaagccaccaacaccttattattaaccgccgcaaatggcgccatcatattgccataaaaatcgcgctcgccgcgaccatcgcaactgcccgttttaacgaaattcttcaccaaacgatcttcgagcgaatgatacgtcagcaccgccagccgcccgccggggcgcaacacttcggccgtctgcaccaacaacgcacgcaatgcacccatctcgtcgttcacctcgatgcgcaacgcctgaaacaccttagccgcctctttcttgtcgcgctcgcgcgggaaaaacggccgcaccacttcgagcaactgcgccacagtagcaatcggagccgcaacacgcgccgccaccaccgcgccggcaatacgacgcgcctgacgcaactcgccataataaaaaaacacatcggccaaacgcgcctcgtcgtaactattcagcacatcggccgccgtgagcaacgcccgccgattcatgcgcatatccaacgctgcatcgaaacggaacgaaaagccacgttgttcatcatcgaaatgatgcgacgacacgcccaaatcagccagcacaccatcgaccttatccacgccgtaatagcgcaaaaaattcttcaagtaacgaaaattaccacgcacaaatgtaaaccgctcatcgtcgaacgcattggctgcggcatccaaatcctgatcgaaactcaaaagccgcccatgcgcaccaagttgcgacagaatggcacgcgaatgaccgccgccaccaaacgtcgcatcgacatacacaccatcaggtttgatacacaaaccatcgagcgtttcggtcaacatcacaggcacatgatactccattcgcaactcctcaatcatttaccgacggccgcttcatcattttagccgacagacgtttagcaaattcggccgacgacatgcgcgactgttcatacgccgctttgtcccacacagccatacgatccaacatacccacaaacagcaccgacgacgacgcgccaatctgctgcaaataacgtttaggcagcaacacgcgcccctgcgcatcgatgtcgagccactcagcatcggacacaaactgcatcagcagcatctgatcctcgggattccactcgtccaacttctccttaaaatcggccaccttgcgattccaaactccctcgggatacaacaccagacaggcattgtccgggtcgatgcgcatcacaaggcgctcgcgctcagcctcaggaagcaatttacgatacgccgaaggcacaaaaacacgccccttggcatccaatttcgcttcgctatttccaataaatgtcgacatttttgcatactaattattcgggtgtaaagttacaacaatttttcaattccccacacttccccaccaataaacttatcaacagccttttagacgaaaatcaacagaaatcgacaacttttcaacaactaatcaacacctcaaaagaaatcataacaaactatcaatcaatcgaaaacaaaacaagcagcatcgagatggttgaaagtggggaatttttcgccatcgacagtgaaaacaaccacccaaacacgctgcatgcacaaaattgcacatcgacattaaacttttttataaaaaccttttgccatacaaaaaaaatgtcgtacttttgcagattgaaaacaaaacgcattatttcaccgtcgaaagcgcgcagccgccgtaggcaaaacaaaatgtaacacattggctatcaagaaaaaagacgaagaccagcaccgtattaacgaacaaattcgcggcgtgcgcgaagttcgtttggtgggcgacaatgtcgcaataggcatctatcccatagaaaaagcgttggctatggccgacgatcaggaactcgaccttgtcgaaatttcgccaaatgcgcaaccgccggtctgcaagattatcgactaccaaaaatttctgtatcaacagaagaaacgcgagaaagagttgaaggccaagacggtgaaaatggacgtaaaagagattcgtttcgggccgcaaaccgacgaccacgactacaatttcaagttgaaacatgcgcaagagttcatcaaagacggcaacaaagtgaaagcctacgtctttttcaaagggcggtcgattctgttcaaggagcaaggcgaagtgctgctgctgcggtttgccaacgacttggccgagattgcaaaagtcgattcgctgccgacgctcgaaggtaaacgcatgattataatgctgtcgccaaaaagtaaaaaatgacactttttattcattaactaaaattatattactgaaatgcctaaattgaagactaattccggtgccaaaaagaggttcgcccttaccggaacaggaaaaatcaaacgtaaacacgctttcaaaagtcacattttgacgaagaaaacgctgaaacaaaaacgcaatctgacacacaccggcctcgttagccgcgtggacgccaaaagcgttaaagcgttgctcgccaaccattaaactttaagtaaagcgaaaattaacattagtgattaaccgaatgttcagccccgcaagattccgatggaacgctaacattcaaaaaacaaaaaaattatgccaagatcagtaaatcacgtcgcctcgagagcgaaacgtaaaagaattctgaaactcacacgcggttacttcggagcccgccgcaacgtttggaccgttgccaaaaacacttgggagaaaggtttgctctatgcttaccgcgaccgcaaaaacaaaaaacgcaacttccgtgctttgtggattcagcgtatcaacgctgccgcccgcttggaaggtttgtcgtattcgcaactgatgggtgcgttgcacaaagcaggcatcgccatgaaccgcaaggtgttggccgacctcgccatgaaccacccggaagcattcaaagcgattgtaaaacaagcagccaacgccaaataaacaggcgctgacaagcaaacaacatgcagtccactccacaacggggtggacttttttttgtatgcactattgacagcgacacaaaatttttatatatttgcacattgaaaacaaaactccaaaatcatgatttttttttgaaaaagagagcaaaaaaaatcccccacggagtacgcgggggtaagatactcttcggcttatagccttattgtgaaaagtctctctttgtatcttcggtgcaaaggtacgctaatttttaataccgaccaaataatatgagcaaaattttaggacttgatttaggaacgaactctattgggcttgccattcgcgacactgacaatggaaaaaatttagaggaacaacttgagagatttgccgtaacacgtttcaagtcgggcgtggggaatgggcaaagcggcgaattttcttacgcagcagagcgcacaagccatcgttcaccgcggcgcttgtatcaggcgcggaaataccgcatttgggcgaccttgaaaattctgattgaatacggatattgtcctttgtcgatggatgatttagagaaatggagcaaatacgacaaagcgaaaggactgaaacgccaatatccggttaacgccgaaaaatttgaacaatgggttcgattggattttgacggtgatggcgacatcaaatatagcagtccgtttcaactgcgtgccgaattgatggaaaagcagttcgatttcagtaatgaaaccgaccgatttaagttggggcgtgccttgtaccacattgcacaacgacgcggatttagaagcagcaagggcgaaactataaaagaacaggagcaagccgaaatcgatgccaatcttgaaaatgaaattgacctttcgacagagttgaaaaaatcggaagaaaagaaatcgggcaagttggtttcttacatgaaagaacacaatctgccaactatcggttgtgcatttcaccacttggaaaaatccggcatacgtgttcgcaacagcgaatatcaagccgtgcgctcgcaatataaagacgaaataacagccattttcagttttcaaaacgggctaaacattgatagcgatttttataaacgcatcattagcgaaaagaaaaatgaaggcaccattttctacaaacgcccattgcgttctcaaaaaggtttagtaggcaaatgtacattagagcctaaaaaagcgcgctgcccaattagtcatcccgaatttgaaaagttccgtgcatggtgtttcatcaacaatattcaatatcggaaaaccactgatgacgattggcaaaatttgacaatggaacaaaagcagaaattgtatcaagataaattcttgcgtaccaaaagtcatttcaaatttcaagaaatcagagagtggattgaaaaagagattaaagacgacacacgcgcatacatattggaatatacacagaaaaaggaaatgcgcacaatcaaccacaaggacaatacaagtgtgtccggttgtccgattaccggcagattaagaaatctgtttggcgaaaattgggagcaatggactttgcaaacaagccacgaacgcgcaaaccacaaaacaggagaaatccataccataacatacgatattcatgacgtttggcacgtttgcttttcgtttgatgaaccggaatttgtggaagaatttgcgagaaacgaactgaattttgatgctcaacaaaccaaacaacttgtttctgtttggggcgcaatagcacaaggatatgctatgttgagtctgaaagcaatccgcaatatcaatcggtttttactgaaaggcttgatttacacggacgctgtgctattagcaaaactgcccgaaatttttggtgataaatggtcggaaaatgaaaacgatgttgtagcacaaatagacgacataattgcacaaaacagagaggaaaaacagatatacaacatcgctaatgcgctgatttccaattacaaatcccttgattatgatgacgagttacaatataacgaaaaatttgccgaacacgattatcaatatgagttgcagccgtcggactacgacgatgtaaaaaaagtaacgattgaagccattggcgaaaagacgtgggcaaacaaaacagaagcagagcaaaatgatattttgtcaaaggttgcagcactctaccaacaatttttcttttcgcaagaacgcgattatttccatttaccaaaattggcagatgctttagcaaaatatttgagcaaacgatttgcattcctaagcgaaaaaagtctgagtaaaatctatcatccctccatgatagcatattacgcaccggcaaaagaacaaagaatagaagacgggcgttatatcaaattgctgggcagtccggtgattggtgcgttgaaaaacccgatggcaatgcgcgtgttacacactttgcgccgacaaatcaactatatgctaaaaaacgggtttattgacgaagacacacgcatagttgtggaaacagcccgcgaactaaacgatgcaaattggcgttgggctatcgaaacctaccaagaagaacgagaaaaagaaaacaaagagtttgaaaaaataatcaaagaatacgattcgcaacgcaatatcacacacgaagaccttgacaaagtacggcttttggcagagcaatacgacattccggaacaaggagaaatacctaacgacaccccaaaaagcaaaaagaaaaaggaaaaaatcgaaaaggctaatccttacaaaaaagatattgctaaatatcgtttatggctcgaacaaggatgccggtgtatttataccggtaacccaatcaatatgggaaccttgtttggcgacaaccaagttgatttagagcataccattccacggagcatttcgttcgacaattcgcttgctaacctcacggtttgcgaggctcatttcaatcgtaccgtgaaaaagaatcaaattccggcacaattacaaaattatgacgaaattttggggcgcatccaaccttggataaaaaaagtggaaacgcttaataacaacatcgaatattggacagcacaatcaaaacgagcacaagataaaaccagaaaggactactgcattcgccaacgccacctttgggaactcgaattggactattggcaaaagaaagtaaatgcgtttacaacgaaagaagttacaagcggattccgaaacagccaactaaacgacacgcgcatcattacaaaatacgcctatcactatctgaaaacagtattcaacaaagtagaagtacaaaacggccgatatactgccgacttccggaaaatgcttggaatacaaagcatcgacgaaaagaaaaaccgcgacaaacattcgcaccacgctattgatgcggctgttttgaccatgattccggtcgccgccaaacgcgacagaatgttggaacttttctatcagatagaagaagacgaacaattacacaagaacgttacaacaaaaaaagagaaactgcgcaaagaaattgccggttgccaactcggtaaaaatgtttcgaccgtcaccgaaattattgaacaaaatgtattggtaaaccttgtcggcaaagaccaaacattgacacctgccaaacgaaaagcacgctcacgaggcaaagagatatttgtaacaaacagcaagggcgagaaagtaaacaaatggattacaggcgattgcattcgaggaaaattgcataaagaatcgtttttcggagcaataaaaatagccaaaacagacgaacaaggcttcctaataaaagaaaacggaatgttcgtgtatgaaaaagatgcaaatgggaacgacataattagtatggttaagtatgtcccgattaatagttttaaaaacgaacaagatttgaataaaattatagacccgtttgtaaaaaaatccattctgcaagttcttgcgaaacgcaaacaagaagggaaatctttcgaagcagcaatagcagaacctatttggcttttagacaaagattgtaatgaaataaaacaagacaagaaaggaaaaaaattatgtccaatcagacacgttcgttgtagagtttcagcagggagaggtttctttacaaaagacaaagccattgaagtgaaagagcaaacttataagtccaacaaagattacaagaattattattacgctcaaaacgacggcaattacctatgtctattgtacgaaggactacataaaggcaaaatcgaacgccaatttaggctgatcaattattttgaagcggtacaattaaaaatcaagaatgcaaacgatttatggcaagagccgtatttcaaaacattaagaaatgggaagaaacaatataatttgtctgctatcatcaaagtggggacacatgtattaatgtggcaaaacacgccagatgaaatttacgaattatcaaaaagccagttatcaagtagattatttgtagtatataaatacaattcaatgggttctaattttatctacttacaaaataatattgaagcaagattggataatgaaataaaagatgatgatgcaacatttaatagtggtagatatcaagcacgattacatttagttgcaaataactttaattgtttgatcgaaggacgcgattttgaaattacacctatgggagagataaaattctatgattaaacgcacgctttgtatcagcaattagagatgttttgaacaacaaaatctgcacactatgcacaaaaaattccacccgttcgggtggaatttttatttctgaaacaagctataacacgttgattttgtgaattttacgcacatcgtattgtttcagacgtgcaaagatacaaaatttgagagcaattcacaacttctttcaccgcagagcaaatacgcgcgttcgtgcaaagatacaaaatttgaaagcaattcacaacagaatacacgcgtaccaagtagagagttaaattgtttcagacgtgcaaagatacaaaatttgagagcaattcacaaccaaggtgcgtcagtacgatggtaagccttaattgttttagacgtgcaaagatacaaaaattgagagcaatttacagccgttaagactgcctttttttttatttttcgatgctatctaaaaaatcaagataaccggcggcgtgtccgatactgtttttaagtctatcaaattcgttttgacaaagaattacacgtgtttcttggccatcaacccaaaaaaattgctcgacatctttttccaataattcgctgtcgatgtggtatttaacacgatagcacttgctaacggctaaatttctgtcatcacggagttttgcttgctcgcaccactcgatactcatcttgtcaatggcaattctcttgtcatattctgacgtgtccgattgtaaaaactccgatgtagcatagtaatcgcgttgctcttggtcgaatgctaaattttcattaaatctttcgatacgataatcaagcacctgttcggaggtgatgctgtcgattaactcactttcgacaaattcgacttttactttctcattgtcgattttctctttgacgaaattcataatcatttcgtccgtttctgtttgacgtgtgcaagcgcaaaacaatgatagtgcgcagacgcaaaaaattgatagttttttcatacgatttttatttaattggttaaatacggcgcaaaaatacacttttttttctaaaaaatgaagcaagtacttcattttttaattgtttcagacgtgcaaagatacaaaatttgagagcaattcacaacggtatttattactattaaacagagtattgaattgtttcagacgtgcaaagatacaaaatttgtcagcaattcacaactattattgaaaacaagtttttcgctcgcatattgtttcagacgtgcaaagatacaaaatttgtcagcaattcacaacgaaaaacgcattttaatgagtttttagccaattgtttcagacgtgcaaagatacaaaatttgtcagcaattcacaacttactcacgttgtttaaggcgttagttgctattgtttcagacgtgcaaagatacaaaatttgtcagcaattcacaacaagatattatttgcaacaatagaaacgagaattgtttcagacgtgcaaagatacaaaatttgtcagcaattcacaactgtgctgccaattataatgaaagcaaacatattgtttcagacgtgcaaagatacaaaatttgtcagcaattcacaacaacatgttaaatcgtattgccgtcagtggattgtttcagacgtgcaaagatacaaaatttgtcagcaattcacaacactaccacagaatttttcttttaatttatcattgtttcagacgtgcaaagatacaaaatttgtcagcaattcacaactcattcgcctttgtccctaagaccttgtcaattgtttcagacgtgcaaagataaaatatttggcgtaggtgcattttatcgaaaaaaatcctcacagcacgctgcggacggcctgcaaaataggctcaatgcttaaaccgctgcctacggcgccctgcatccaccggttgggggtcagccgcccctgacgatagatgcgcgcatactccgccgcccactgttcggccgtagcgcatgttgccaaatgctgttccaactggaattgcacgatagaacctatcggatagttgggcaaatacatgggcgcattgaccatgtgcgaatagatggccaacaaggtacaatcgggttcgccaagcaccggtgcgtaataggcattccacacctcgcgcgctatgcgcaacgtattctctttcagttcgttggcggtagcgtcgggatgcgcatacaaccactgccacatgcgcatatccacaagactgacacccattatttcgtacatgctccaaaaactatccagcacttgcaagcggtgcgtgtcggcagtggcattcgccgtgccgtgcggcaacaacgccaagtcgcgcgcttggaacaagaaggccgatgcttcggtaaagccggtattcggaacgcccgcaagtgagtaataatcaatatcatacaaatcgagaatcatctcgacattgtgtccgaactcgtgcacggctatgttgtagcctttgtagtccatgccctcggtgccgatgcgtgtgcgcaggcgtgcgggttcgttgcgccccaacgccggccaagcatgtcccgatccgcgtgccggctccaccacaatgtggctgccgatgcgttgcgcttcgtcggcggtgaatcccaagcgttgcaacaagcgcggcatgtcgcgttcgaaggcttcggcatcgggatacaagtgccgcgtctgctcggtcagttcgtcctgatcgagtgcggcgcgcgctttgaacccatcgtaccaaatgtcgtacgggcgcaacgggcggcctaaccgttcggctatgacggcgcccacctgcgccacttcgggcgacgacagcagttggcggaacagcgaatcgacctgttcgagcggtatctccatctgttcgtcgaaattgcggacaatggccgtcggtgcttgcggacaataggcatcggcctgacgatacgcccgaaaatgtgccaaaatccgctcgtaacgcgtgtcgggttcgggtgccaacgccacttcgccgccatcggcacagcacacattggcatagggtttccaatcgtatttgtcgctattgacgacagcctgtggaatagtctgattcacaatacgttgcatcacacagtaaatcatttcctgacgttcgtgtgccaatgcgtcgggggcgtaattggctttcagttcgtcgcgcaagttccaatgcgacaacagcgtcaacggttcgttccacagccgtcgtccgtcgtcggtcatcagtttgttcatgtggatattgtagtcggcgatgtagttttcggcatcggcataggcctgattttcggcttgtgccacggtggccggcacgcgtgtcgtgaagcggtcgcccatgcgtgcataggcccattcgcggcgtgtccggcaagtgcccggcgcatctttttcggcgagcgtatagtgcgggaaattgatgatggtcaaaaacgccaatttgttggcaaacatatcatcgctgaagtgcgccatcgggctgtaggcgctcatgatgtaatcggccgttccgggctccggtacattggtcagttgggtaggtttgagcaactccaccgtcagcatatcggccgattcgctgcaacgttcgaaaatgcgttccaactgtgcaaagagtgcagcgcgtgcggtgtcgtcgggacatacgtttgcgagtacgaacgcccgaaaatcatcgacagagccgtcgtcggcagtccaaagcgccgccgcttgtgccacgccgcgcgccaccactgcactatcgacggcagcatgttgcgccacaatttgtcggacgatgtcatcgaccacttcgtccgttacgaatgccgtttgtcgcccgcatgcggcgagtgcggccaagcctatcaatcccataaacaatcgttttttcatgtcggtatgttgttttatttgttcacttgcggcgtcggtccgacgcatttcggtatgcaaaaatacggattatttcccgatttttagcattttcggcaaaaatagttgcaaaaaaatttgttttgtacaaaaaaacgtcctatatttgcagcacaaaatttatcagcaattcacaataaggattattccgttgtgaaaactaccagaatggccaagttgtttcttggtcgttcttttttttgcggcatcacacaaaaaaaacgagcggcgcaatgccgctcgtcgtgtgtcagacagacagatttattttgtctttttggcgttcgttttgcgtgccgcgcgatagtttgaccgccctttcgatgcgttttcggggttggcgatgatggctttgcaggcctcctcggtcagtgccgctgcatcggtgcctttgggcagtttgtagtttttgttgtcgttcacggtatgaatgtacgcgccaaaacgcccgttcagcacctgtatgtcgccaaagatgtgaatgactttgttgttgtcggcttcgcgcttggcggcaataatttcgagtgcgcgttcgagggtcagtgtcagcgggttgtcggtttttggcacggagtagaacgctttgccgtgtttgatgtacgggccgaaacgtccgtcggccacaatcaggtcttcgttttcgaattgtccgatattgcgcggcagtttgaacaactccagcgcctcgtcgagcgtgatggtgaagatactctgtccgggttgcaggtcggcgaaacgcggtttttcgtcgctgtcggacgatcccaactgcgccaccacgccaaaacgactgattttggcatagaccggtttgccggttttggggtcgtcgcccagatagtgttcgccgggtttggtgccaacggcttggtcggccaccagcacctctttgtggaatggttcgtagaaattaccgatattttgattccaagcaatttttccggctgccacatcgtcaaattcttcctcgacattggccgtgaagttataatccatgattttggcgaagtaggttgtcagaaaatcgttgaccacgatgccgatgtccgttggcgacagtttgcctttttcgaccgacggtttttctttccgcatctcgtcgctgatgccgttggcatccaatgtgagcacgcagtagtcgcggggttcgttcacgatttcgcgtttatcgacatattcgcgcgccaagatggtcgagataaacgagttgtaagtggcggggcgtccgatgccgagttcttccatctttttgatgagcgtgccttcggtgtagcgcggcggtttttgtgcaaaacgttcttgtgcaatagcggttttcagcgtcagcgtttgctgcgtcagcgatggcaacagtgtcgtttgttcctgttccgagtcgtcgtcctgcgattcgatatagacacgcaagaagccgtcgaaggtcagcactttaccctcgacaacaaactgttcgtcgctgccgtcgatgtcgatagtaaccgtagtgcgttcaatttcggcgtcggccatttgcgaggcgatggtacgtttccaaatcagttcgtagaggcgttgttcctgcgccgttccggcgatggtgcgattgctgatgtaggttggtcggatggcttcgtgcgcctcttgtgcgcctttcgatttggtgtgatattggcgtactttcagatagttttcgccgatatttgtaacgatttcctgtttgatggtgttgatggctaacgaactgaggtttagcgagtcggtacgcatataggtgattttacccgactcgtagagtttttgtgcgatgcgcatggtttgcgacaccgtaaagccgagttttcgcaaagcctcttgttgcaaagtcgatgttgtgaacggcgctgccggcatctttttggccggatgtttttcgacgctgacaatgcggaattgtgcgtgttggcacatttcgaggaattgtcgggcttcgtctttggtggcaaagcggtgttttagttcggcttgcaattcgcagggttgtccttgtgcatcgcgtgcggcgaacacggccgtaacccgaaacgatggcgttgcctgaaagttttggatttcgcgttcgcgttccactaccaagcgcgccgtaaccgactgtacgcgccctgccgacagacccggtttgatttttttccacaacacgggcgagagttcgtaacccaccagacggtcgagtacgcggcgcgcctgctgtgcgttcaccaagttcatgttgatgtcgcgcggatgttcgatagcctccaatagtgccggcttcgttacctcgtgaaaagcgatgcgccgtgttttggcgggatccaactgcaattcgttgaacaaatgccatgcgatggcttctccttcgcggtcgtcatcggatgcgagccacactctttcggcactctttgcggcttttttcatctcggccaccaattttttcttgtcctcggacaccacataggtcggtttgaaattatgattgatgtcgatactcagacttttgtcgggcaagtcgcacacatgccccatgctcgacatcactttgtaatcggggcctaaatgtttttcgatggttgggactttcgtcggcgattccacaataacgagatttttcatacaacaagttttatttttttgcggctgcaaaggtaacaacattttttcaggtttacaccctttttaagcgatattttttgaacaccctttagggtgtaggtctgccgaaatgagttttgtcattcgtcggagaattgtaccaacacgtttcgatacgaattgaaaatcttcgatttcgacacaaatccgacatagcgtccttcgtcgtcgacaacaggcaaattccatgcgccggtatcttcgaacacgtccatcaccttgcccatcggcatatttatattgacgcgcgccggcacggcaatcatcagtttgcgtacgctgaaacggtcgtacaaatcgggacgaaacatgatgttgcgcacctcgtcgagcggcatgatgcccaccaacacacccgtttttttgttcaccacagggaacacgttgcggctggaatgcgaaatcactttgaccaattcgcccaatttcatttcgggatagaccacttccatgtcggtttcgaggaaattgcccaattccaacatcgacagcacggcgcggtctttgtggtgtgtcatcaactcgcccttttgcgccaaacgcatggcatacaggctgtgaggctcgaacaaaataattgtcagataggccactaccgaggtgataatcagcggaataagcaattcgtaactatttgtcaactcggctatcaggaatgtgcctgtgagtggtgcgtgcatcacgcccgacattaggccggccatgccgacaaacgcataattttgactcgggatgtcgaatccgaacaggttcaacgacgtagccatcacaaaaccggtgaggctgcccacaaacaggctcggtgcgaaaataccacccgtgccgccggcgccattggtggccgccgatgcaaaaatcttgaaaaaaactatcaacccgagatacagcaccaccgcccacatttcggaacgataagcatacaacaaactattgttgaacgtggtcgaagcatcgcccgtaagcagttcggctatggtatcgtagccctcgccatacaacggtggaaacaagaatatcagcaagcccaacatcgcgccaccaacgacaatctttttgtacggcgattgaaggcgtttgaaaacccgctcgaggcgattcataccgcgcgtgaaatagagcgacaccaaaccgcacacaataccaagcaatatgaccaacggaacgcgctcgaaagcaaacggcaccaacgcatcgaaatggaacaacgtctccttgcctaaaaacaggtacgaaaacatggtggccgtagccgccgatatgagcaatggtgccaccgaagtcatggtcatgtcgagcatcaacacctcgaccgtgaaagccacgccggcaatcggcgcattgaaaataccgccaatggcaccggcagcgccacagcccaccagcaacatcagcgttttttggtcgaggtggaaggcacgtcccaaattggagccaatggccgagccggtcaacacaatgggtgcctcggcaccaaccgaaccgccaaaaccgatggtaatggcgctcgccaccaccgatgaccacatattatgcactttgatgatggccttacgttgcgatatggcatacaaaatttttgtaacaccgtgactgatgtcatctttcaccacatagcgcacaaacagacttgccaacgtgatgccaagcgccggcaacgccaaataccaatagttcagttcttcgacagggaaaagcgacgtgatgccacgctgaatcaatgcaatgatgcttttgagtacaaaggccgccacagctgcgcacatacctaccacaaaactcagtatcagcacaaaatacgactctttgatgtgctgttcgcgccatgtcagcatcgacatgtacaactctcgccaatcaatttttttcattctgtacaacaatgtttttctcgggcgcaaagatataaaaaaaatggcattccgtaatcagaacaccattttttatctgaaacatgccgtgtttttacagcacgccttgcgccatcatggccttggctactttcataaatgcggcgatgtttgcgcctttcacataatccacatagccatcgggttgtgtgccgtatcgtacacattgtgcatggatgttgcccattatttcgcgcaatttggcatcgacttcgtccttgctccaactcaggtgcatggcgttttgcgtcatctccaagcccgacaccgacacgccgccggcgttggccgctttgcccggcgcatatagaattttagccgtctgaaacactttcacggcctcgggtgtcgaaggcatattggcaccttcggacacggctatcacaccattggcaaccaacgcacgcgcatcgtcaccgttcagttcgttttgagtggccgacggcaaagcaatcgtacatttctcgtgccacggacgcccgcccgccacatatttgcaaccatacttttcggcatattcgcgtatgcgaccgcgatacacgttcttcagttcgaaaatgtaatccaatttctcgcgatcgatgccgtcggggtcatagatgtagccatcgctgtcggacatggtgattaccttgccacggagttgaaggactttttcggccgtataagtcgccacattgcccgaccccgaaatgcagacagtttgtccttgcaggtcggtgatgccgcggctctgcaacatattcatcaggaaatagatattgccatagcctgtggcttcgggacgaatgagcgaaccgccaaactcgacacctttgccggtgaatgtgccggtattttcgcgtgccaattttttgtacataccatacatataggccacttcgcgaccgccaacgccgatgtcgccggccggcacatcggtatcgggaccgacatggcgccacaattccaacatcaacgcctgacaaaaacgcatgatttcggcattcgacttgccacgcggactaaaatcggaaccgcctttggcaccgcccatcggcaaagtggttaacgcatttttgaacgtctgctcgaacgccaaaaatttcagaatcgacggacacaccgacgcatgaaaacgcatgccacccttgtacggaccaatggcattgttgtgctgaatacgataacccatattggtttgcacacgcccttggtcatcgacccaattgacgcgaaacgacactatgcggtcgggaatgcaaagccgctctatcaaattaactctctcaaattcagggtgttgattatatacgtcctctatcgacgccaacacctcgtgcaccgcctgaatgtattccggctcgttcggaaaacgacgttgcaattcgtctatcactgtctgggttgtcatacttttattttttttgcaaaagtacaagaaagaccgttatgttgtatcattttccgccattttttttcaaccgacacaaaaagacgcacaaaaaccgacaaaaatcgtcatttcgtttcattatatacatttttattactatttttgcacgattttttcaa

SEQ ID NO: 3998 - DNA, 24290 bp, synthetic construct
  misc_feature 1..24290: note = Synthetic
  source 1..24290: mol_type = other DNA
ataacgatgtcctcgtccttgccgatgtagtccaccgccgccccgacggcaccctcgacatctacgaggtcaaatccggctccaccctcagcgagacatacaaacgggatgccgccctccagcattacgtcatcgcccactgctgggaggtaaacaagttctgtgtggtgtataatgggatgtccgacaagtcggacttgtcggacaggtcggacaggtcggacaatttcaaggttgttgaccttaccgacgagctggccgcccagcactccgagatagaaaacaatatagctttgatgaaagaaatcctccaacacggcgaacctgccacccccacaggccagcactgcctggagccttacgcctgcccttaccagcactactgcgcccaaggcatccgccaaatgtcgctcttctgaatcatcgccacagatcggccacagcctcgtcatagcggcgcagcgacccgctcttcataatagccttgtactgcttcttgtccggcaacaccgtctgatactcccagaaggcatgcagccgggccaatatctggctgtcgccctgcaacgccgacacagcatgggcatatatcctcgcatgcatttcgcgcaccacagcaagcggctcccgacccgacaacatccatggacgtgccaacaacccccgtcccatcatcacccctttcagcttaggccatcgctgcatcaccgattgtacatcttccagcgaaagcagatcgccattatataccacccgctgggtacacgcctccacaaatgcaccaaaagcctccctgtccgggactcccttatattgctgtctcccgatgcggggatgcattgtcacatgcgccagcggcattgcattcaacacaggcaacagccgcaggcactcgccggcatcctcctgaccgaggcgcatcttcaccgaaaaaatcatctcgccacgctgtcccatctcttctgctatcgctgccagacgctcttcctgcatcagcaatccgcaccccctgccggccttcacctgcatggggaaggggcatcccatgttcaagtcaatcctattccagcctgccgcctgcacagcgtcgcacagccgtgcaaactcatccctgtcgcgggctataacctgtggcacagtggccacaccctcgttgcgccggaaatcgatgtcgcgcaaatcctttttgcgcacctcaccgccctccaaccgcacaaagggagtgtaatactcatccacccctcctgccacctcgcaatgcgcacgcctgtattcacagtcggtataaccttgcagcggagcaaaggcaacgtatggcatcacggcttcgggcatcagaacgagtagcgcacatgcagcagcacctgccaagccgagaggaggtcgctgtacacattccacttgggtttgttgaaagtatatacaccgtccttgtattccagaacggtctggctagtaagctgcttgtaggtcccccactcgctgttgagcagattggccacattgttgatgtcggcacccacctccaacgtggttcggcgaccgttcacatcgaaataaaactcctggcacaccttcaggtcaagacggttatgccacggcgtcagcatggcgccgcgcttggcgtactcacccctgtgacggctcagataagcatcgttggcaataaacgcaccgtattcggcacggttctccacactgctgaaaggcatcccctccagttcctcttcggtaggcacatatagcagacgcgaggcgttgataccacccacattgttcatcagatacgaacagcgggcatagccgacgctgttctccatcccgatgttatacccttcgtagaacaaccctagccgtgtagccgtgcgacggccttcgaacagcgtatagttggccgaagctatcagcctgtgcggcgccacataggcggtaaagcccagttcgggacagttgtcgccgtccactgtgctggtctgcgacagagtatatacagcgtcgccgccgccatccgacaccgacagcgaagagctgaaggtataggcagccatcacgtccaggccaaagccgaaatgtttctgaagctgtgccaccaccgacaggtatcggccatgcaatccatcaacgttgtggagccggtagcccgacataccattggccacactctcctgttggtaagccacgcgtccacgcggctcgccgggcaggtgcagcgaatcgcccggcacgtagccgagcgtggtcgacaccacctcgttgtaattgtacgacaggatgccctccacggtgcctttcacgtcccagggcagtttgacatccaacgccagcgaactcttccaactggtgggcatcttcaggttcttgtccagaatcaccggactcgaaggcagcaccatgtttccaccgccgggcacactgtttacaatctcctggcggctggggctgaacggcatgacggggttctgggtctgcgtgttggcaacatattggtacaacatgacattagagttggaaatggcattcaccaaccacacattaggtatacggccagtgaaaagccccgtgccaccgcgcagcaccaccttgcggttgcgggtcacatcccagttgaaccccacacggggcgacacattcacctgcaagcggggcatgtcgccgggattcagcccttcgaaggtgctgccgggatgttctgccacaaactgtgcaaaaccggcatggtagttgtcgttggcaaaacggatgacgggcacctcgagccttagtcccgccgtcagcttaaagtggcggctgaactccatctcgtcctgggcataaagcgagggctggagataattgaacacatactcgggcagggccatgtggtcctcttgattggcaaaagccaccatgaacagcaacgggttgcgcttgttgacaaagctgtcccacgagtcgaacacataccatcccgcgccgccgggcatatacacattgcgaatattgctgtactcgaactgcacgccagccaccatcgtgtggacgccggaattatatgtcaactcatcggtcacattgaacgtgctgacgctgttggccgtcatataggtgaaggggtccagtccgaaagtggtataggaggcatacttgcgactgccgtcgctactggtgtaaggctcaagaatgtccaccgtggggaacaggtcgccgtaatggctgcgcggctcgttctgatacgaccaggtgacacgcagattgttgttcccattgccgccccacagacggctgtccagctctgccgccaccgacgtgaaatcctgattcttatagaaacgtgccgactcgaacatcatcgaatagttcgacagtcgtccctcggaatagcggttgaacgaataccgcttgccgtcgacaaagaaggcagtgttggtgccgcctatggtgctcatagagttcgacgcatcgaaagtggtggtgtgcgtatggctgaacctgacattgaatttgttgttgctgtttataatccagtccagacgggcaagaaagcgatagtcggaggcatcgaccgaatagttctgatagcgtccggggtcatagccatattcctttatcaaataattcctgatactgtccatgcggcccaccgtgggacggttgtagccgttgccgccccaggcggcattgctgtcggcacgtgcctgagcagatgctccgggcactttctcgggcgtatactctgcattcaggaagaagaacagcttgtccttgacgatggggccgctcaacgtaaatcccgcaacgttgttcaacgtattgctttgcggcagcgccacgtcgccaagatgccgccccctcagccagctgctgttgtaataatcatacagcgaggcatgccactcgttgccgccctgcttggtgaccatattgatggctccacccttaaatccgctgtgcctcacatcgaagggggtgatactgaccgaaatctggtcgatggcgtcgagagagagcggattacccccggcaggaagactggagccgatgccgaaagcattgttgaacgaggcgccgtccaccgtcaccgacgagctgcggtagtcgccgccgcccaccatgaagcccctggaggtgctgatgctctgcggcgtgagccgcatcacatcgtacagactgcgactggcggtaggggtagccatgaggacggaattggtgatatttgtcgaggcccccgagttctgcacattcatattggagtgcgtggcctggtccacaaccactatctcgtccaacgaggtgcttgtcatcttcagttcaaaatccaacaccacacggtcgcccagcggagccgtcacatcactcatcaccaccgtacgatagcccatcagctcaacccttatattgtaagggcctccggccactaccccgttgatacggtaactgcccttggcattggtgaaaccgtggtactgcatccccgtgggcacatataccgcagtgacgatggcatcggccaacggaccgttctcgtcgtttacactgcccacaatagacgatgtggtggtctgagcccctgcgggcaacgaaatcaataatcccacaaagagtgccaaaatggctcctactctacttttcataacgattctaatacaacaataaatgtctataagatactatataacagttaattacttgttaaacccataccatgggcgaggtacaaagatacaaaaaataaactacaccaccacaagcgattcgggaattaactattattaaaaatcttttgcaattctcagcacaacgctgtaccttcgttcaatcttggattcttgatgctacgttacagcttcgttttccgttatagtgacggataacgagcctgtaacgatccttgatcgagcggatattgaacgacgttagtgtgacaaaaaaaacgtcatcgaagttgcgctccgatgacgttgtagatgatatgccgcgatgcgacagcctatcaatagacggggaaggctatctcgcgttcgatgacttggtaagccacgttgttgcgatagatggtctggcgcacccagttgtcgtcctcgtcgtactcgaagacgtagctgtgcttccagttgaggtgctcgtcgtagttgaacgaggagagctcgatgaggttgtcgtggtcgtcgtagtaataggtggtgagggccacgagaaaatcgtcggcatcataaaaacgccactcgatgcggttgccgtggctgtcgtacttgtagaggtaacgctgcatcagctcgccgtcgcggtcgtagaattccatctcggtgttgttgccggcgtcgtcgtatttgtagacgcgcttctcggtcatggtgccgtcgggggcaaagctctgctcttcgacaaggcggttgttctcatagcgcgaggtctctttcttggtcatgtggtcgcccataaagacggtgcgctcgatgcggttgccgttcttatcgttgagataggcggtgcggccggtgagctccttggcgcggttgtactcgttccaacccagggcatagccgtggacgtcgaagtaataggaataccaggtgtattcgccgtccttggtgcggtatttgtcctggaaattgccgcgtttgtcgaaagtgatggaatcgatgcagacaagctgacggccaccgttgcggccaccgtggatgtcgtaggtgtattctatcacatagacggcatttccgttgatgcccatctcctgacgggacgatttgcggggtttattaccggcaaaagcactgccagcgaccagcaataccaacgataaaacaatgtatttcttcatgttacgaattattatacaatataaaagtcgttgcaaagatacaaatttttctttacataaaacgtgcttgtttataaaatattgcgtggaacagcctttttcttattccacatgccacgtatcccggttagtttttgtttcatgacagcgctgaccggcacagctttttattgctccttggcctccttcttccttgtccagaaaaagaagatagcggtggcaagcagcgtgatggcggcgccgatggtgtagccgagccagcgggggatgacggcccccagaccctctttctcggcaacgaacaggaagcagcctgtgaccatggtcatgaacatggcggggagaagggtgaggatgtagggcttgcgcttgaggaagagatagacggtgatggtccaaagggtgacggtggccagcacctggttgctccaggcaaagtagcgccagatgacgtcgaagcctttcgcgtcgataagggagtagaccagcactgcggcagtgatggcaaagatgggcagggcgacgaacagacggtttttaataggtttctggtcgaagtggaggaagtcggccacgattagacgtgcggaacgcagggcggtgtcgccgctggtgatggcggcggagatgacgcccaacacacagatgacagcgatgaccttggggaaccatgtattggcgatgacacccaccatggcattgccgcccaaggtggctccggtctcagggttgacggtgagttgctgcagctgggggtcgtgatagaagaccgtggcggcagcggcccagatgagggctaccacgccttcggtaatcatggcgccgtagaaaacggggcgcgcctgacgctcgttggtcatgcagcgcgccataaggggcgactgggtggcgtggaaaccgctgatggcaccacaggcgatgctgatgaacatcatggggaagatggggttgtgggcagcatcgggatgctggttctggaggccgtcccaaagctcgggcagcggcggatggtacacgacgaaggcaatgacaatggccacggccatgccgagcagcaggaatccgaagatgggatagattttgccgatgagtttgtcgatgggcaacagcgtggcgatgagataataggcaaagatgatacccacccaaaggaagatgttccagtcgggggtgaagttgctgttgagaagcacagccggtgtattgacaaagacggctccgacaaggatcatcaggaacaccgtgaagaagcgcatgaactgcttggggccgttgccgaggtaggcgccgtggatttcgggcagggaagctccgtccctgcggatggagataaaccctgcgataaagtcatggacagcacccgcaaagatgctgccgaagacaatccacagaaaagaggccgagccgaactgggcgcccatgatagctccgcagatgggaccgacaccggcaatgttcaaaaactggataaggtagatgcgccacggcttcatcggcacataatccaccccgtcggggtgcgccactgcaggagtggcccgtttcggatccaccaccaaaattcgctcgataatcttggaatacaccaaataaccaagcactaaaagcactattgcaataagaaaagtaaccataacttaatcttttttggggttgcaaagatacgatttttttttgataatttctattttcataattcaaatcccaatttttcttcgtatctttgccaaacgaaatcaaattaatcattttactatgaaaaaatcattatttattgtcgcaatggcagttatcatggccactggagcctctgcccaagaaacaaaaaaaccaaccaaaagtcagttcaccatcaacacccgtgcatggtcatccaactattggtccaccctgctctacaacattgcacgcgatgctgtgacctatcttgtcttcgacaacaatcccgcaattgaggccgctatccccaacgccgacctcgccttccccatcggcatgggcaaagagggatttgctagccctaacgacatctatggtccctaccaccgtgccttcggaacacccttcaaacgccttggcgacttcagcataggtctcgatgcctcctgggtgccctcgcttgtaggcgtctatgccggtgcctactacaagagccaggaaatatgcttcatggccaacgaccagaacctgcgcggcaactacttccagccccgtgccggactcgtgattggcggtcagcgcaccgccctcgaggctggtgttttctacgacttcaccgtcggctgcaccggcacctcgcaggttttcggcgcccccaacaaagacatgattgcaagcggcttgggcctcgactttgccatctcctacgccaacaatgccaactcccgcaaagtcttgctcatgttctccatgcccctccacaacttcctcaacgaagactacaccggcggcatgctgaaaggcaaggtacgcaaagtaggctacctcatgctcacccaccgcatcatcttctaatcccataccggatatcacaacacatgcccgcgcaccccaagcgcgggcttgttttattctaacccaaatcggtcttgaggaactggatgagagaaatgcgccagggtttcatgggcacataggccacaccgtcggggtgtgccacggcgggcgtgggacgatcggggtcgacttcgacaatccgctctataaccttggaataaagcagatagccaagcaataacagcacaatagcaagtagaaacaattccataataatatgattttttgaatctgtaaagatacgtttttttcagacatggcgacctattttcatcaagtgacccattgcaatgcctgtaccgccatcgaaaaagcataatccccaatcggtcatttggccgattggggattatgcttggcatctctggcatccccgaacaattggtatagacttgcacaatccaaataggcagtaaggggtatcaatttggatttgttcaatttgcgtatgttgagaaagtaaatattcgcatgccccttttaatagaatcctcgtttttcaaaaaaaagcattaattttgcatagtcaatacataaaactaacagaagatgaaaaagaccttattaattgtaatcatgacagttctgctgaccgcaggtgcttcggcgcagacaacgagaaaacaattcacattcaacacacgcacatggtcgaccaactactggaccacgcttttgtacaatctggcccacagtgcggttgtccactttgccttcgacggcaattccaccgattcgttgattgtagagtccatcctgcccagttccgacctagtgttcccgataggcatggcaaaagccggctttgaggcaccgatgcacgacatttacggaccttaccaccgtgcattcagcaacccgttcaaacggataggcgactacggtatcggcttggacatgtcgtggaaacccgtgagcatcggactctatgccggtgcctatttcaaaagccaggagatatgcttcatgcctaacgacgagagcctgcgcgggttctacttccagccgcgtgccggactggtgatgggcggcaacaaacacgcccttgaagccggcgtgttctacgacaaagtggtaggctgcggcggcacctgggaagcccgcaacaaagagatgctgcagagcggttggggcctcgactttgccctgagccgcaccgtggccaaaggccgccacaaaaccatgctcatgttctccatgcccctgcacaactttttcaacaccgcctatgccgacggctcgttgaaaaacgtgcaccgccgcgtgggctacatcatgctcacccaccgcgtagtgctctaatcagccctgcccaaccctgttggcacaagccgccaacacgtcaagcaatagcaagcccgtaaccgcaaaggcagttccgggcttgctttattataaataaaaaaaaggcaagtcacgattaacatttaacaccttcatccagcatattattcagaaaaaagttgtatctttgcattttcaaaaaactccctaatattgcaaaaacagtgcaatctattatataaaaatgggagcacgcaaacgcgcaactcccgaggaatcttcggcttatagccttattgtgaaaagcttaaaaagcattgcaaagatacaaacaaaatctgaaacagcaacaaaaaaaacactatggcaggaaaaatattaggtatagaccttggaaccaactcaataggattggccgtcagagacactgacaatggggataatattacagaccaactagaatattacacctccataatattcaaatcaggagtggggaatggagacaaaggagaattctcatacgcctccgaaaggacccgataccgctccattcgccgactataccaatcgcgcaaatacagaatttgggctacattaagactacttatcgaatatggttgctgcccccttactaatgaagagcttgaccaatggagcaaatacgacaaatccaaaggcttgaaaaggcaatacccaattaatgccaccaaattcgagcaatgggttcgtctggacttcaactatgacggaatacccgaatacagcagtccttatcagttaagggctgaattaatagataggctgattgactggaatgaccaaaccgacagatataaatttggtcgagccatgtaccacattgcacaacgacgaggtttcaaaagtagcaaaggcgaaacgctgaaagaagctaatgaggatgaggacagctccactatcgacataagtgaggccatgcagaaatcggaagaaaaaaaatcgaaggttcttgaagaatatatgagaagccacaacctgcaaacagtaggatgtgcttttgcccttttggaaagagatggcatacgagttcggaacagtgaatatcaagctgttcagaaacaatatcgtgaagaagtagacgtgatatgcaaacgccagaatatacacctaaaagatcccgaactatacacgcgccttatcagcaccaagaaaggagaagggaccatattctaccgtcgccccttgcgctcacaaagaggtaatgtcggggagtgtacactcgaaaaagggagacggcgatgccccataagtcatcccgactatgaggagtacagggctctgacctttatcaacaatatcaagttccgcctcgaagaggatggcaaatggctgaagttatccaacgagcaacgcaacaggcttttcgagaaactattcacacgcgccaatgccacctttaaattcgaagaggtaaaaaactggattgcaaaagaataccctggacacgatttcaactacaagaatcataccatcaattaccccgactatactactgtgtctggttgccctgtcatcaatagacttagcaagataatgggcaacgaatggcgtaccgcagtaatagagaccgacaaatgccgcaccaattacaagactggagagattcacactatcagatataactacgaagacatctggcacctgtgctataacagcgacgattacgaagaacttgcagatttggcaaaagtaagaatcggtctaaacgaagaacagattggcaacatcaaacggctatggagcgtattgcaggaaggctacgctccattgagtctgaaagcaatacgaaatatcctcccattcctccgcgaagggatgatatacagcgaggctgtagccatcgccaagatacctgacattatcggcaaggagaagtggactgaatgcaaagagactatcaacgaagagataaagcgcatttcagcaaaggcttcaacactacgcactgaatacaacattgccaacacccttatcgccaactataaatccctgtccattgaaaaccaaaaggcctatagagattatcattacaaattggatggcagagacaaagaggatgttctgaaatgcatcattgactccatcggactaaaagtctggaacacattacaactagaagaacaacagttcatccaagaaactgtagaaagcctttaccaacaattcttctcatcgacaaaacgagattactacaaactgccccaccaaagcgatgctcttaaagaatacctctcacaaacattccccgagataacgcccaaagaaaaatgggatgccctttatcaccactcccaaataagtctttttccacaccaaaaagcaataatagacgatattgatggttgcataagaagctattatcaattagggactccaaatataggttcgattaagaatcccgtagctatgcgtgccctacacacactaaggcgtgcagtgaacgagttactaaagcagggtatgatagacgaagacactcgtgtggtggtagaaacggcacgagacatgaacgatgccaactggcgcaaggcaatagagaggtaccagaacgaacgcaaaaaagagaacgaccttattaccaacataataaaggatttcagacccaactattcagatgacgatatagagaaaggacggctactattcgagcagatcgaatcaggcgactttaaagaaccctacattgacaaatacgccaaagcatcgcgaatccaaaaggagaaggctgagagattcgctctcgaccttcagaaatacaaactatggaaagaacagagattccgctgtctttacacgggagatgccataagtataacaaaactatttgacgggaatgcagtggatatcgagcacaccatcccacgcagtatatcgttcaacgattccttgacaaacagaaccgtctgctcaactcatttcaaccgagctgtaaaaggaaaccttatcccgacacaattatcaaactacgaagaaaccaaagaacgaatcaagccatgggaagaaaaggtggagcattgtaagagccaaatagaactgtggaaaaagaacgctcgaacggcaaccacagtcgaccgcaaggacgaatgcattcagcagaaacatctttgggagttagaattggactattggcaaaccaaagtcaaaaccttcacaatacaaaaagacgaacttgaccttggtttccgcaacaggcagctcgtagacacacgaatcatcactaaatactcattccactatctgaaatcggtcttcacgagagtcgatgtccaaaaaggccgcatcacagctgacttccgcaagatattgggagtacaaagcgtcgatgagaaaaaagaccgtgcgaaacattcccatcacgctgttgatgccacaattctcaccatgattcccgtcgcagcaaaaagagaccgcatcattgaactattctaccaagtgcaagaagctcctgatgaggaaaaagcatcactttacagtaagttgtctgatgaaataaaatcttgccgattgggcaatatttcaaaccttgtagagacaatcgggaccaacattctcataaaccacatctcaaaggatcagaccctcacccctgcaaaacgcaaattaaggattcacggcaaaatacaatacaaagacaagcagcacaaagaaccatactacgtacaaggtgactgcatacgcggaagtttacacaaagatactttctatggggcaattaacaatggggacaatacgcttcgtttagtagtgcgtaaaaaactaacaagccttggaataaaaaacaataaacccatcaaagaatataatgataagtacctcgaaccaattgtagatattggcttacggaaagcaatttctattcaggtacaacaattcatgaaagagaaaggattaaccttctccaaagcccttgaagagacatattatctcctcgacaaagaaggaaccccaataaaaaccgacaagtatcaacaccccatttcccccataagacatgtgcgctgctatgttaaggctggagtcggttatcttaaaactgacactgcacttcatattaaagagcatacttatacttcaaagaatgaatacaaaagaacatactatgcacagaacaacggcaactacatttgcttattatacgaaggaattgtaaatggacaggaaaaaagaaaaataagacccttaaatctttttgaagtgtctcaattacatcttaccaacactgaagtattattccatgaacccgaattcgccctatacaaacacaaaaaagagttgcctctaaaagccatcataaagaaagggacccgaatccttttttatgtcaaccaaaaagaggaattaatggacatggataattgcaaactaagttcaagattatacacggtttataagtctaatattaatagtggtacaccttacatctacctccgacaccatcttgaagcaagggaagaaaaagactgctataagcaggaatttgccacatcatacgattcccatcgttatatagcatatctttctgtcacagcagataatttcaaagcccttattgaacatattgattttgagattgacccattggggaacatcaccttcaaaagcaatcaatagtcatgattaaacggacactctgtttctccaacccagcctacctgtccatgaagaaccgacaactgtcagttcggttggacgaccacgacggcgagactggcaagcaaaccaccattcctattgaggacattggaatggtagtattagaccacccacaaatcacagtcacccacggcctgatggcagcactattagacaacaacgcctctgtcatcacttgcaacaatagccacatgcccgtgggactgatgctcccgctagaagggcacaccgtacagagtgagcgattccaagaccaactatctgcctcagttccattgcgcaaacagctatggcaacagactgtgcagcagaaaatcctcaatcaggcagccttactgaatgaactttatggtacagaaaacgggaatatgctccaatgggctgcagatgtccgttccggtgacagcaccaacctcgaagggcgagctgctgcttactactggagccagatgttccctgacataggcggattcaaccgtggacgcgatggactatatccaaacagctttctcaactatggatatgccatactgcgtgctgtcatagctcgggcactggtcagcagtggactactcccaacattcggcatccaccaccacaaccgatataacgcttattgtttggctgacgacattatggagccttaccggccctacgtggaccgcctcgtagtggctaccattaagcagcacccccgcacagcagaagtcaccacagacataaagcgctcactactctcgatccccaccctagaagtacacatcagcaaccaacgcagtcctctaatggttgccgccccgcagaccacggcatcccttgcacgctgttttgctggcgaaatacgcaaaatatcctatcctgacatgtgatggaccgcttttcagaataccgcatcatgtggttgcttgtattcttcgacctccctaccgataccaaaaaggagcgcaaagccgcagccgactttcgaaaacatctcttggctgacggtttcactatgtttcagttttctatttatgtacgccactgcgcaagtcgtgagaacgccgaagtccacctcaaacgcgtccgatccctcctgccccaatatggccaagtggggtgcctaaccatcaccgataagcaatttgcggacatagagctctacatttgcaaaaaggaagtcccgcccaatgcgcctggacaacaactggagctattctgacatcagaataagaaaaacactcatacataataaaaaatcccgcccaactggacgggattttttatttcattgacatgttctgggacattataattcaggcagatactcatatcgtagtgtttatcgtaagtgtcaatgtcctctttttaagcaattcacaaccaactgccatccctcaacaacgaaatgaatagtgtttatcgtaagtgtcaatgtcctctttttaagcaattcacaacggcaacagactttcaacccacaccggcacaagtgtttatcgtaagtgtcaatgtcctctttttaagcaattcacaacttcttaaggtgcttgcctatgccataggaaagtgtttatcgtaagtgtcaatgtcctctttttaagcaattcacaacacgacagcgacgaagccggacaggagaacaagtgtttatcgtaagtgtcaatgtcctctttttaagcaattcacaactgaagtccattttgtccattcgatggaaaagtgtttatcgtaagtgtcaatgtcctctttttaagcaattcacaaccctgtcgcacagctgcgacagtgacattgaagtgtttatcgtaagtgtcaatgtcctctttttaagcaattcacaacgtgcggatgccgtggcattcgcggtcgaaagtgtttatcgtaagtgtcaatgtcctctttttaagcaattcacaaccctgctcaacgcgggaatatccaacacgcaagtgtttatcgtaagtgtcaatgtcctctttttaagcaattcacaacgggcttcctcggcatcgactacgttcttgaagtgtttatcgtaagtgtcaatgtcctctttttaagcaattcacaactaaagctcaaggcagaatagaccctaaaaaagtgtttatcgtaagtgtcaatgtcctctttttaagcaattcacaactcagcatattcttatttgacggtaatttgagtgtttatcgtaagtgtcaatgtcctctttttaagcaattcacaacactcgttgtacttttgattgctcatgatagagtgtttatcgtaagtgtcaatgtcctcttttttgcaatttgcaactggttaattatgaatcggagtactcggagtgttctgaataatcagaggtttgttgggttggtcggcggtgggcaagttggggaaatctgattattcgaatggttctgagacggttggattcattggttgtttcggtagtttatacgactttggtacatacgttcttttatgccaccctctttcacgaaacgggtttgcattgtgaccagcaacttgtgaagcatgtatatcgcctgatggatgagcgtgatgcagaggttggctatttcttcatcgttcatgcgctgtatggtggcagcatacgctttcttgatctcctcactacgtgcatattgtcgcatcttctcatagcgcggatgaagaggcccccactgctgcatgtttcgcaccctaaggtaatcctcgtagtcgtcgagcagttcttccagactggctttggctacattggtcagtttgatctctgtctcgcttgatgtagcagcggcttgattgccctccgctatattctgtttgccgctgcgcgcggcttgaaccatctggtccacggtgcggtcgcctttagacaggtagtgctgtgtgaaatagtaggtgatgtcgtagaccatctcggtgacttgatagacccgaaggtttcgataatggccatgctttgggaggaaggttactggggaggtcggagggttctgattattctgagtaatcggagtactctgagtattctgagtaatcggagtactctgattactctgagggctctgagtgctcttgggggttgagggggtctgattattctggttcatggggaggctttttcttcacagctccacttcttggcggaattcggggatttccacgcggttccagcccacttcgtttagggtgtcgcggaaatgctcttgtgtggcggcttcgccatgaacgaggaaaatctttttcagacggcgcttctcttggcatccgatatagttgatcatctcgctgtagtcgccatgacctgagagggactcgatgcggcgcagttcggcacgcacctcatataggtggccaaagatggaaacggtcttatcgccccgcatgatgcgagccccaagggtcttgggttcgcagtatcccacacaaaggatggttgttgtggggtcgtcgatatgattggcgaggtggtgcttcacccgacctgcttccatcatgcccgaggcggagatgatgacacagggtttatgtcggacattcaaggcctttgaggcctcgacggactggatatactgcaggcggtcgaacccaaaggggtcggggtctttcttcatgtattggaggatggaggggccgaagcactcggtatggagacgcatgatgttggtggccgagacactcaggggactgtcgacaaacacatcgatgtcgggcagcaggtcggcggtctcgaggcggtcgagggcataaataatctcctgtgcacgtcccacagcgaaggatggaatgatgagcttgcctttcttcttggtgcaggtgtccaacacggccatcagcagttcctgctcggcatcctcgatggtcgtatgcagacggtcgccataggtggattccattatcagataatccacttgcgggaatggttcggggtccttcagaatgcgcttgttgtaacgtcctatgtcaccggtgaatcccagtttgatggtgcgacggccgtctttgatttcaagatacacacaactgctgccgaggatatgtccggcatcgaaaaactcgacggtcacctcgccttcgatattgaactgcttgtgataaggcacgctgatgaagcagctcatgcactcctgtgcatccttctcggtgtagatgggctccaccgggggcagattctggtccttgcgtttcttgttgaacgtgtgggtatcggcctcctggatacgtccggcgtcggccagcatgatggcgcagaggtcgcgcgtggcgggagtgcacagcacggtgccgcggaaaccctccttatagatatagggaatcaaacccgaatggtcgatatgggcatgtgaaagaatcaagtagtcaatctcggcagggtcgaagccgaggtcgcggttcatggcatcggtctccagacccttgccttggtacatgccgcagtcgagcaaaatattcaatcccttttttgttgtgataaggtgcttgctgccggtcacttccctggcggcacccatgaatttcagtttcatacctatagtgtatttctatgtttcaactcaataataatcatttccatacagcctcacaccccgttctgggcgggagacaacaacaaagcaaagatacactttttttttcaaatcgtaacaatccgctcatcccttcggagagtgagaaaactcgttcaatagaaaaaaatgcgtatttttgtaatgacgaatggggagcggatttccgcacaacccactatatattagcaaataatactaacacaatatggcactgaaaagagtaatggtactgactgggggcggcgactgccccggtctcaacgccgtcatccgcggcatcgtaaaacgggcctcgcaagagaaagactgggaggtgataggctgcatcgagtccttcaacggtgtgctgcgcgagcccaccgagattgtcgaactgaacgataaagccgtcgagggcctccagatacagggaggcaccatcctcggcaccaccaacaagggcggcccctttgcctggcccgtgcgccagcaggacggcacctggaccaccgtcgaccgcagcgacgagatgatacgcaaactgcgttacatgggtgtcgacgctgtcatcaacattggaggcgacggctcccagcgcatctccttgggtctggcacagaaaggcctcaacatcgtgggcgtgccaaagaccatcgacaacgacctctcctccaccgactacaccttcggtttccagaccgccgtgcagatatgcaccgaggccattgacaagctggtgaccacagccgccagccacaaccgcgtcttcatcatggaggtgatggggcgtgatgccggctggattgccctgcactgtgccatcgctggtggcgccgacgtctgcatcattcccgaaatcccctatgacatcaacatgataaaggagaagatagagcagcggtacaacaaacgccacggctactgcatcatcgtggtggccgaaggggccaaacccaaaggcggcaccaccgtaggtgctgaaagcagtgaagtgggctaccagcacatacgcctgggcggcataggccaccagttggctgccgacctcaaggccgccggagtggagcacgacatccgctgcaccatactcggccatctgcagcgcggaggcacacccgttgccttcgaccgcatcctggcctcccagttcggcgtccgcgccatggaggaggtaattcgcggcaactacggccagatggtggcctaccgccaccccgacatcgtcgccgtgcccctcgaagaggccgtccgcgcccagaacctcgtcgaccccaacggcagccttgtccacaccgccaaaggcctcggcatcgagttcggtcagagcgacccctgctgatacattattattcacacaacgaatactcattgaagataatatcatgaaaacaatgaaactcatccttgccgcgaccatcgtggcactgaccgcagccggttgctgctcgaagagcaacgcccccaagacgctggtgctttattattcactgacaagcaataccaaagccgtggccgaagagatagccaatcgcctcggtgccgacatcgaggagattgtctgcgtcaacccttacgacaccaacttccaagcctgcatccaacgatgcatgcaagagcgtgagcaaggtgtactccccgacatccagcccgtaaaagccgacctcagccagtacgacatcatcttcatcggctatcctgtctggttcggcacctatgcaccgcccgtcgccaaattcctcaacaatgttgacctcagcggcaagaaaatagtccccttttgcacctttggcagtggtggactggaatcaagcattgccgacctcaaaaccgaagaacccgatgccgaaatcctgcccggctacggtgtccgtgccgcccgtatggatgccatgcccaaggaggtggagcgattcctgattgccagaggcttcatcgaaggcgaatacacaccgcttgcggacttccccgagcagcatgaagtgtccgccgaagaggctgccatcttcgacgctgccgtcgacggctatcccatgattcacgcccaagccgtcaccgtagcctcccgtgccctgcccaatggcaccgaatacctcttcaccgccgaagaccttccccgcgaggataagcccgacatgccccctgccggcaagatgcaggtctatgtcaccgttgccaacggccaagctcccgtcttcaccaaagtaatccgataaaagacatccttatcatccctttcgcgggctgcctgtgagcagcccgcgatttcatttttaaaaaaaagaaaaaaaatcattaactttgcactttcaaagattggccatggattagaataatatcatggtatatcattaagattaaacgaattgaatacaacatctatttttttgcatacaaggctaatcatctttattatattaaaaaaagaggggaaaaaacatatcataataaatcaataattaataaacacaaaaaaatgcataacaacaagaaaagggagtatacctctcccgaaatggaaatcctgaacgcccgcgttgagcgcggctttgaagcaagtgcagtaaccgacaacacgcccagaggcaacggcaacgagttggtcggagacagcggcaacaattacaacaacgctattttcagttgattaaatcgcaagaaaaatgaagagaatagcagtatcgtttttgtcgcttttgaccattgcaggaattgtgagctcctgccagaaagaccaacatgccggtaacggcagcaagtttaccgccaccatggagtcctgcacttccagccaaggaaagactgtgctggacggcagcatgcttaattgggttgacggagaccaaatcaaagtgttcggttccagtaatgccgaaggtgtctatgccgctgttgccggtaccgatgacgccaccaccgccacattcgagaatgtagaaggcgatgccggttcacccgtgttccacgccatctatcccgcttctgtggccatgaccgccaccagtgtaaccctgcccgccgagcaggtgactgtcgatggttcattgaccggtttccccatgtacgccacctcggagaacaactctctccaattccagaacctgtgcggtatcctgaaattccgcctcaccaagagcgatgtaagcatcagcagcatcagtgtcaccaccaccgacgccaccaacggcaacttcactgtgtcatacgacacagagaacaagcccgtcctgaccagcaccggctcggcaaccaaatacaccacaacgctgacctgcaccacacctcaggacatcaccaacggcgtcgacttctatatgtatctgccccaaggcaactactacggcatggagattgtcttcaccacatccaccggactgacttgcactaagacagtgtcggccgaaaaccacatcgacatagtgcgtagccaatacagcaccctcaccctttcgggaaccaacctcgactttgtgccagacggtacactgagcggactcttcaccattaacagcaacggcgacaaagtccgctttgccaagggaaacctgcagtaccagcccagcaccgatacctggcgctttgctgaacaccagtatgattacattgcgcaatgcaaccagtctgtcgaccccaccacctacaccggttggctcgacatgttcctctgtggtacgggcgacgacatgagtgccacctccgcaacagccacaagcgcagattttaccgattggggttcctatcccatcagcaacggcggtgaaacaggcggactgtggcgcaccctgacatacaatgaatggtactatatttttgtgaacagccgtggtaattcagtgggatcttccggatttccttttggtcctggaaaagtgaatggaattaaagggattattcttttgcccgattcatttgtgacacccgatggcatagatttcacagcattcacgataagtaatagtgaaggctggaacacaaatgtttatacctctgaagaatggactgccatggaggatgccggagcagtgttccttcctgcagcagggtgctacctctccaccaccctcacccacgagcaagtgaaaggatattattggtctaaatctcgagcaatctccagaattcctcaattcgctttcttttccgaccatgatggtttcttttatcctctcgactggaaaagaaaatatccaaacaccctccactattcctgctcagtccgattggtttgcgaacagcaataggcagaataatcattcaaccccaaaaggagtccttgccaatatgcagggactcctttttctttgctgccggtcattattgccccataaaccatatatcccttctgaaaaaagcacatttccgacacattaccacaagttcaccaacgatatattcataaaaaatcgtgttattatttcacgtatctgtgtataattcaagaattatatgtatatttgcattttgcaagcaactatacaatatatcacgcaagtgatgtattgtcagtactttatatagacacttaggacataaaaacaataataatggaacctaaaaaaataaaatcagccctcatctccgtctactacaaagacggtcttgaagacatcgtcaaagccctcgaccgccaaggcgtcaccatctattccaccggcggcacacagaaattcatccaagaactcggcatcgaacccgtagccgtcgaatccctcacaggctacccctccatcctcggaggccgtgtcaaaacgcttcatcccaaagtcttcggcggcatcctcagccgtcgcgacatgtactccgacggagagcaactgacacaatacgaaattccggaaatcgacctcgtcatcgtcgacctctaccccttcgaagccaccgtggccagcggcgcccccgagcaggacatcatcgagaagattgacatcggaggcatctccctcatccgtgccgccgcaaaaaacttcaacgacgtggtcatagtccccgccgtcaaccactaccaagaatttctcaacatctacaccgagcaggacggtgccaccaccctcgaacagcgccgccgcttcgccgcctacgccttcaacgtcagctcccactacgacaccgccatcttcaactacttcaaccgacaggagcagctgcccgccttcaaactcagcggctcacacgccaacaccctgcgctacggcgaaaacccccaccaaaaaggctgctactacggcgacctcgacgcctgcttcaccaaactcaacggaaaagaaatatcatacaacaacatcggcgacatcgacgcagcctgtgctctgatcgacgactacgccgacaccaccttcgccatcctcaaacacaacaacgcctgcggcctcgccacccgtcccaccctgctccaagcctggaccgacgccctggccggcgaccccgtctccgccttcggcggc

SEQ ID NO: 3999 - DNA, 24290 bp, synthetic construct
  source 1..24290: mol_type = other DNA
  misc_feature 1..24290: note = Synthetic
cttgccgatgtagtccaccgccgccccgacggcaccctcgacatctacgaggtcaaatccggctccaccctcagcgagacatacaaacgggacgccgccatccagcattacgtcatcgcccactgctgggaggtaaacaagttctgtgtggtgtataatgggatgtccgacaagtcggacttgtcagacaagtcagacaagtcagacaagtcggacaggtcggacaatttcaaggttgttgaccttaccgacgagctggccgccaagcactccgagatagaaaacaatatagctttgatgaaagaaatcctccaacacggcgagcctgccacccccacaggccagcactgcctggagccttacgcctgcccttaccagcactactgcgcccaaggcatccgccaaatgtcgctcttctgaatcaacgccacagactggccacagtctcgtcatagcggcgcagcgacccgctcttcataatagccttatactgcttcttgtccggcaacaccgtctgatactcccagaaggcatgcaggcgggccaatatctggctgtcgccctgcaacgccgacacagcatgggcatatatcctcgcatgcatttcgcgcactacagcaagcggctcccgacccgacaacatccatggacgtgccaacaaaccccgtcccatcatcacccctttcagcttcggccaccgctgcatcaccgattgcacatcttccagcgaaagcaaatcgccattatacaccacctgctgggtacaagcctccataaatgcaccgaaggcctccctgtccgggactcccttatattgttgtctcccgatgcggggatgcattgtcacatgcgccagcggcattgcattcaacacaggcaacagccgcaggcactcgccgacatcctcctgaccgaggcgcatcttcaccgaaaataacacctcgccacgctgtcccatctcttctgccatctcggccagacgctcctcctgcatcagcaatccgcaccccctgccggccttcacctgcatggggaaggggcatcccatgttcaagtctatcctattccagcctgccgcctgcacagcgtcgcacagccgggcaaactcatccctgtcccgggctataatctgtggcacagtggccacaccctcgttgcgccggaaatcgatgtcgcgcaaatcttttttgcgtacctcaccgccctccaacctcacaaagggggtgtaatactcatccacccctcctgccacctcgcaatgcgcacgcctgtattcacagtcggtataaccttgcagcggagcaaaggcaacgtatggcatcacggcttcgggcatcagaacgaatagcgcacatgcatcagcacctgccatgccgagaggaggtcgctgtacacattccacttgggtttgttgaaggtatatacaccgtccttgtattccagaacggtctggctggcaagctgcttgtaggtcccccactcgctgttgagcaagttggccacattgttgatgtcggcacctacctcgagcgtggttcggcgaccgttcacatcgaaataaaactcctgacacaccttcaggtcaaggcggttatgccacggcgtcagcatggcgccgcgcttggcgtactcacccctgtgacggctcagataagcatcgttggcaataaacgcaccgtattcggcacggttctccacactgctgaaaggcatcccctccagctcctcttcggtaggcacatatagcagacgcgaggcgttgataccacccacattgttcatcagatacgaacagcgggcatagccgacgctgttctccatcccgatgttatacccttcgtagaacaaccccagccgtgtagccgtgcgacggccttcgaacagcgtatagttggccgaagctatcagcctgtgcggcgccacataggcggtaaagcccagttcgggacagttgtcgccgtccaccgtactggtctgcgacagagtatacacagcgtcgccgccgccatccgacaccgacagcgaagagctgaaggtataggcagccatcacgtccagtccaaagccgaaatgtttctgaagctgtgccaccaccgacaggtatcggccgtgcaatccatcaacgttgtggagccggtagcccgacatgccattggccacactctcctgttggtaagccacgcgtccacgcggctcgccgggcaggtgctgcgaatcgcccggcacgtagccaagcgtggtcgacaccacctcgttgtagttgtacgacaggatgccctccacggtacctttcacgtcccagggcagtttgacatccaacgccaacgaactcttccagctggtgggcatcttcaggttcttgtccagaatcaccggactcgagggcagtgccatgtttccaccgccgggcacactgtttacaatctcctggcggctggggctgaagggcacaacggggttctgggtctgcgtgttggcaacatattggtacaacatgacattagagttggaaatggcattcaccaaccacacattaggtatacggccagtgaaaagccctgtgccgccacgcagcaccaccttgcggttgcgggtcacatcccagttgaaccccacacggggcgacacattcacctgcaagcggggcatgtcgccgggattcaactcgtcgaaggtgctgccgggatgttcagccacaaactgtgcaaaaccggcatggtggttgtcgttggcaaatcggatgacgggtacctccagccttagcccagccgtcagcttaaaatagcggctgaactccatctcgtcctgggcataaagcgagggctggagataattgaacacatactcgggcagggccatgcggtcctcttgattggcaaaagccaccatgaacagcaccgggttgcgcttgttgacaaagctgtcccacgagtcgaacacataccatcccgcaccgccgggcatatacacattgcgtatattgctgtactcgaactgcacgccagccaccatcgtgtggacgccggaattatacgtcaactcatcggtcacattgaacgtgctgacgctgttggctgtcatataggtgaaggggtccagtccgaaggtggtataggaggcatacttgcggctgccgtcgctactagtgtagggctcaagaatgtccacagtggggaacaggtcgccgtaatggctgcgcggctcgttctgatacgaccaggtgacacgcagattgttgttcccattgccgccccacaaacggctgtccagctctgccgccaccgacgtgaaatcctgattcttatagaaacgtgccgactcgaacatcatcgaatagttcgacaggcgcccctcggaatagcggttgaacgaataccgcttgccgtcgacaaagaaggccgtgttcgtgccaccgatggtgctcatcgagttcgaagcatcaaccgtggtggtgtgcgtatggctgaacctgacattgaatttgttgttgctgtttataatccagtccagacgggcaagaaagcgatagtcggaggcatcgaccgaatagttctgatagcgtccggggtcatatccatattcctttatcaaataattcctgatactgtccatgcggcccaccgtgggacggttgtagccgttgccgccccaggcggcattgctgtcggcacgtgcctgagccgatgcaccgggcactttctcgggtgtatactctgcattcaggaagaagaacagcttgtccttgacgatggggccgctcaacgtaaagcccgccacgttattcaacgtattgctttgcggcagagccacgtcgccgagatgacgccccctcagccaactgctgttgtaataatcatacagcgaggcatgccactcgttgccgccctgcttggtgaccatattgatggctccacccttaaatccgctgtgcctaacatcgaagggggtgatactgaccgaaatctggtcgatggcgtcgagcgagagcggattacccccggccggaaggctggagccaatgccgaaagcattgttgaacgaggcgccgtccaccgtcaccgacgagctgcggtagtcgccgccgcccaccatgaagcccctcgtggtgctaatgctctgcggcgtgagccgcatgacatcgtacagactgcgactggcggtaggggtagccatgaggacgaaattggtgatatttgtcgaggcccccgagttctgcacattcatattggagtgcgtggcctggtccacaaccactatctcgtccaacgaggtgctcgtcatcttcagttcaaaatccaacaccacacggtcgcccagcggagccgtcacatcactcatcaccaccgtacgatagcccaacagctcaacccttatattgtaagggcctccggccaccaccccattgatacggtaactgcccttggcattggtgaaaccgtggtactgcatccccgtgggcacatataccgcggtgacgatggcatcggccagcggaccgttctcgtcgcttacactgcccacaatagacgatgtggtggtctgagcccctgcgggcaacgaaatcaataatcccacaaagagtgccaaaatggctcctactctacttttcataacgattctaatgcaacaataaatgtctataaaatactatataacagttaattactagcaatgtccttacaatgggcaaggtacaaaggtacaaaaaattaactacaccaccacaagcgattcgggaattaactattattaaaaatcttttgcaattctcagcacaacgctgtaccttcgttcaatcttgtatccttcatgctacgttacagcttcgttatccgttatagtaacggaaaacgaagctgtaacaatccttaatcgagcggatatcgaacgacgttagtgtgacaaaaaaaacgtcatcgaagtcgcgctccgatgacgttgtagatgatatgccgcgatgcgacagcctatcaatagacggggaaggctatctcgcgttcgatgacttggtaagccacgttgttgcgatagatggtctggcgcacccagttgtcgtcctcgtcgtactcgaagacgtagctgtgcttccagttgaggtgctcatcgtagttgaacgaggagagctcgatgaggttgtcgtggtcgtcgtagtaataggtggtgagggccacgaggaaatcgtcggcatcatagaaacgccactcgatgcggttgccgtggctgtcgtacttgtagaggtaacgctgcatcagctcgccgtcgcggtcgtagaattccatctcggtgttgttgccggcgtcgtcgtatttgtatacgcgcttctcggtcatggtgccgtcgggggcaaagctctgctcctcgacaaggcggttgttctcatagcgcgaggtctctttcttggtcatgtggtcgcccataaagacggtgcgctcgatgcggttgccgttcttatcgttgagataggcggtgcggccggtaagctccttggcgcggttgtactcgttccaacccagggcatagccgtggacgtcgaagtaataggaataccaggtgtattcaccgtccttggtgcggtatttgtcctggaaattgccgcgtttgtcgaaagtgatggaatcgatgcaaacaagctgacggccaccgttgcgaccaccgtggatgtcgtaggtgtattctatcacatagacggcatttccgttgatgcccatctcctgacgggacgatttgcggggtttattaccggcaaaagcactgccagcgaccagcaataccaacgataaaacaatgtatttcttcatgttacgaattattatacaatataaaagtcgttgcaaagatacaaatttttctttacataaaacgtgcttgtttataaaatattgcgtgggacagcctttttcttattccacaagccacgtatcccggtttgttgttgtttcatgacagcactgacaggcacagctttttattgctccttggcctccctcttccttgtccagaaatagaagatggcggtggcaagcagcgtgatggcggcgccgatggtgtagccgagccagcgggggatgacggcccccagaccctctttctcggcaacgaacaggaagcagcctgtgaccatggtcatgaacatggcggggagaagggtgaggatgtagggcttgcgcttgaggaagagataaacggtgatggtccaaagggtgacggtggccagcacctggttgctccatgcaaagtagcgccagatgacgtcgaagcctttcgcgtcgataagggagtagaccagcactgcggcagtgatggcaaagatgggcagcgcgacgaacagacggtttttaataggtttctggtcgaagtggaggaagtcggccacgattagacgtgcggaacgcagggcggtgtcgccgctggtgatggcggcggagatgacgcccaacacacagatgacagcgatgaccttggggaaccatgtattggcgatgacgcccaccatggcgttgccgcccaaggtggctccggtctcagggttgacggtgagttgctgcagctgggggtcgtggtagaagaccgtggcggcagcggcccagatgagggctacgacgccttcggtaatcatggcgccgtagaaaacggggcgcgcctgacgctcgttggtcatgcagcgcgccataaggggcgactgggtggcgtggaaaccgctgatggcaccgcaggcgatgctgatgaacatcatggggaagatggggttgtgggcagcatcgggatgctggttctggaggccgtcccaaagctcgggcagcggcggatggtacacgacgaaggcaatgacaatggccacggccatgccgagcagcaggaatccgaagatgggatagattttgccgatgagcttgtcgatgggcagcagcgtggcgatgagataataggcaaagatgatacccacccaaaggaaaatgttccagtcgggggtgaagttgctgttgagaagcacagccggtgtattgacaaagacggctccgacaagaatcatcaggaacaccgtgaagaagcgcatgaactgcttggggccgttgccgagataagctccgtgaatctccggcagcgaggctccgtccctgcggatggagataaaccctgcgataaagtcatggacagcacccgcaaagatgctgccgaagacaatccacagaaaagaggccgagccgaactgggcacccataatggctccgcagatgggaccgacaccagcaatgttcaaaaactggataaggtagatgcgccacggcttcatcggcacataatccaccccgtcggggtgcgccactgcaggagtggcccgcttcggatccaccaccaaaattcgctcgataatcttggaatacaccaaataaccaagcactaaaagcactattgcaataagaaaagtaaccataacttaatcttttttcgggttgcaaagatacgatttttttttgaaaacttctattttcataattcaaatcccaatttttcttcatatctttgccaaacgaaatcaaattaatcattttactatgaaaaaatcattatttattgtcgcaatggcagttatcatggccactggagcctctgcccaagaaacaaaaaaaccaaccaaaagtcagttcaccatcaacacccgtgcatggtcaaccaactattggtccaccctgctctacaacattgcacgcgatgctgtgacctatcttgtcttcgacaacaatcccgcaattgaggccgctatccccaacgccgacctcgccttccccatcggcatgggcaaagagggatttgctaaccctaacgacatctatggtccctaccaccgtgccttcggaacacccttcaaacgccttggcgacttcagcataggtctcgatgcctcctgggtgccctcgcttgtaggcgtctatgccggtgcctactacaagagtcaggaaatatgcttcatggccaacgaccagaacctgcgcggcaactacttccagccccgtgccggactcgtgattggcggtcagcgaaccgccctcgaggctggtgtcttctacgacttcaccgtcggctgcaccggcacctcgcaggttttcggcacccccaacaaagacatgattgcaagcggcttgggcctcgactttgccatctcctacgccaacaatgccaactcccgcaaagtcttgctcatgttctccatgccactccacaacttcctcaacgaagactacaccggcggcatgctgaaaggcaaggtacgcaaagtaggctacctcatgctaacccaccgcatcatcttctaatcccataccgggtatcacaaaacaagcccgcgccccccaagcgcgggcttgttttattttaacccaaatcggtcttgaggaactggatgagataaatgcgccaaggtttcatgggcacataggccacaccgtcggggtgtgccacggcgggcgtgggacgattggggtcgacttcgacaatccgctctataaccttggaataaagcagatagccaagcaataacagcacaatagcaagtagaaacgataccataatattatgttttttgaatctgtaaagatacttttttttcagacatggcgaccttttttcatcaaagtgacccattgcaatgcctgtaccgccatcgaaaatgcataatccccaatcggtcatttggtcgactggggattatgcttggcatctttggcatccccgaacaattggtatagacttgcacaatccaaataggcagtaagggatatcaatttggatttgttcaatttgcgtatgttgagaaagtaaatattcgcatgcccattttaataaaatcctcgtttttcgaaaaaaagcattaattttgcatagtcaatacataaaactaacagaagatgaaaaagacattattaattgtaatcatgacagttctgctgaccgcaggtgcttcggcgcagacaacgagaaaacaattcacattcaacacacgcacatggtcgaccaactactggaccacgcttttgtacaatctggcccacagtgcggttgtccactttgccttcgacggcaactccaccgattcgttgattgttgagtccatcctgcccagttccgacctggtgttcccgataggcatggcaaaagccggcttcgaggcaccgatgcacgacatctacggaccttaccaccgtgcattcagcaacccgttcaaacggataggcgactatggtatcggcttggacatgtcgtggaaacccgtgagcatcggactctatgccggtgcctatttcaagagccaggagatatgcttcatgcctaacgacgagagcctgcgcgggttctatttccagccgcgtgccggactggtgcttggcggcaaagaacacgcccttgaggccggtgtgttctacgacaaagtggtaggctgcggcggcacctgggaagcccgcaacaaagagatgctgcagagcggttggggcctcgacttcgccctgagccgcaccgtggccaaaggccgccacaaaaccatgctcatgttctccatgcccctgcacaactttttcaacaccgcctatgccgacggctcgttgaaaaacgtgcaccgccgcgtgggctacatcatgctcacccaccgcgtagtgctctaatcagccctgcccaaccttggtggcccaagccgccaacacatcaagcaatagcaagcccagaaccgcataggcagttccgggcttgctttattataaataaaaaagagcaagtcacgattaacatttaacaccttctcccagcatattattcagaaaaaagttgtatctttgcattttcaaagaactccctaatattgcaaaaaaagagcaatctattataaaaaaatgggagcacgcaaacgcgcaactcccgagaaatcttcggcttatagccttattgtgaaaagcttaaaaagcattgcaaagatacaaacaaaatctgaaacagcaacaaaaaaaacactatggcaggaaaaatattaggtatagaccttggaaccaactcaataggattggccgtcagagacactgacaatggggaaaatattacagaccaactagaatattacacctccataatattcaaatcaggagtggggaatggagacaaaggagaattctcatacgcctccgaaaggacccgataccgctccattcgccgactataccaatcgcgcaaatacagaatttgggctacattaagactacttatcgaatatggttgctgcccccttactaatgaagagcttgaccaatggagcaaatacgacaaatccaaaggcttgaaaaggcaatacccaattaatgccaccaaattcgagcaatgggttcgtctggacttcaactatgacggaatacccgaatacagcagtccttatcagttaagggctgaattaatagataggctgattgactggaatgaccaaaccgacagatataaatttggtcgagccatgtaccacattgcacaacgacgaggtttcaaaagtagcaaaggcgaaacgctgaaagaggctaatgaggatgaggacagctccattatcgacataagtgaggccatgcagaaatcggaagaaaaaaaatcgaaggttcttgaagaatatatgagaagccacaacctgcaaacagtaggatgtgcttttgcccttttggaaagagatggcatacgagtccgaaacagtgaatatcaagctgttcagaaacaatatcgtgaagaagtagacgtgatatgcaaacgccagaatatacacctaaaagatcccgaactatacacgcgccttatcagcaccaagaaaggagaagggaccatattctaccgtcgccccttgcgctcacaaagagggaatgtcggtgagtgtacactcgaaaaagggagacgccgatgccccataagtcatcccgactatgaggagtacagggctctgacctttatcaacaatatcaagtttcgcctcgaagaggatggcaaatggctgaagttatccaacgagcaacgcaacaggcttttcgagagactattcacacgcgccaatgccacctttaaattcgaagaggtaaaaaactggattgcaaaagaataccctggatacgatttcgactacaagaatcataccatcaattaccccgactatactactgtggctggttgccctgtcatcaatagacttagcaagataatgggcaacgaatggcgtaccacagtaatagagaccgacaaatgccgcaccaattacaagactggagaggttcacactatcagatataactacgaagacatctggcacctgtgctataacagcgacgattacgaagaacttgcagatttggcaaaagaaagaatcggtctaaacgaagaacagattggcaacatcaaacggctatggagcgtattgcaggaaggctacgccccattgagtctgaaagcaatacgaaatatcctcccattcctccgcgaagggatgatatacagcgaggctgtagccatcgccaagatacctgacattatcggcaaagagaagtggactgaatgcaaagagactatcaacgaagagataaagcgcatttcagcaaaggcttcaacactacgcactgaatacaacattgccaacacccttatcgccaactataaatccctgtccattgaaaaccaaaaggcctatagagattatcattacaaattggatggcagagacaaagaggatgttctgagatgcataattgactccatcggactgaaagtctggaacacattacaactagaagaacaacagtccatccaagaaactgtagaaagcctttaccaacaattcttctcatcgacaaaacgagattactacaaactgccccaccaaagcgatgctcttaaagaatacctctcacaaacattccccgagataacgcccaaagaaaaatgggatgccctttaccaccactcccaaataagtctttttccacacccaaaagcaaccacaggcgatattggtggttgcataaggagctattatcaattagggactccaaatataggttcgattaagaatcccgtagccatgcgtgccctacacacactaaggcgtgcagtgaacgaattactaaaacacggtatgatagacgaagacactcgtgtggtggtagaaacggcacgagacatgaacgatgccaactggcgcaaggcaatagagaggtaccagaacgaacgcaaaaaagagaacgaccttatcactaacatcataaaggatttcagacccaactattcagatgacgatatagagaaaggacggctactgttcgagcagattgaatctggcgactttaaagagcccgacattgacaaatacgccaaagcatcgcgaatccaaaaggagaaggctgagaaattcgctctcgaccttcagaaatacaaactatggaaagaacagagattccgctgtctttacacgggagtcgccataagtataacaaaactatttgacgaaaatgcagtggatatcgagcacaccatcccacgcagtatatcgttcaatgattccttgacaaacagaaccctctgctcaactcatttcaaccgagctgtaaaaggaaaccttatcccgacacaattatcaaactacgaagaaatcaaagagcgaatcaagccatgggaagaaaaggtggagcattgtaagagccaaatagaactgtggaaaaagaacgctcgaacggcaaccacagtcgaccgcaaggacgaatgcattcagcagaaacatctttgggagttagaattggactattggcaaaccaaagttaaaaccttcacaatacagaaagacgaacttgaccttggtttccgcaacaggcagctcgtagacacacgaatcatcactaaatacgcattccactatctgaaatcggtcttcacgagagtcgatgtccaaaaaggccgcatcacagctgacttccgcaagatattgggagtacaaagcgtcgatgagaaaaaagaccgtgcgaaacattcccatcacgctgttgatgccacaattctcaccatgattcccgtcgcagcaaaaagagaccgcatcattgaactattctaccaagtgcaagaagctcctgatgcggaaaaagcatcacttaacagtaagttgtctgatgaaataaaatcttgcagattaggcaatatttcaaaccttgtagagacaatcgaaaccaacatcctcgtgaaccatgtttccaaggatcagacactcactccagcaaaacgcaaattaaggatacacggcaaaatacaatacaaagacatgcagcacaaagaaccatactacgtacaaggagactgcattcgtgggaaattacatgatgacacctttttggcgaaaatcaaacctcccaaatacgtgaaagacgataatggagactacatcatttcacgagaacacggaaaaacgatttatgaagaagaacctatttttgtggtaagaagagaactaaacaaactatttacaggcagaagtaattggacatgggagattttagagaagaatattgtaaacaaggagttatattcaataataagaaaacaatttccagaagatgtgactttcaaagaagctgtcacaaaaggcatttacatgcttgataaaagaggtaacaaaataaatcgcattagacacattaggtgtataactgacaacaaagaacctttaccgataaagaaacagacatacctatctaagcaagaatacaaaacgaattattatgcaggtaataatactaattcatatatggctatttactggagtggaaagatgggtgacaagcggctgaaagaagtcagaacactatttgacataacaaagtctaaaaaactatttgggaacatctcagtccatgatagtttcgaaaagtcaaaggggaatattccactctatgcaattatccgaccaggcactaatgtaattgtatttgataaaaatgaaataaagaaagggaatgatgctcccactgaaatgattgcacgactacgtgaaatggatgatgatgaactacagaagcggttatatgtcattaatagctttgaaaaaaacggcacaacgattcttatccacaataatgaggcacgtcctgaaaaagaattagggagagggcaatcatttatagatttatctaatcccaatcccaaagatagggtgtccataacaacgagatatatgctcatcgaaggaatccatttcacaataagtggcttgggtaaaatatcttttgacaaaaatgattaaacggacactctgtttctccaatccagcctacctgtccatgaagaaccggcaactgtcagttcggttggagggccacgacgtcgagcctgaaaagcaaaccaccattcctattgaggacatcggaatggtagtattagaccacccacaaatcacagtcacccacggcctgatggcagcactattagacaacaacgcctctgtcatcacttgcaacaatagccacatgcccgtgggactgatgctcccgctagaagggcacactgtacagagtgagcgattccaagaccaactatctgcatcagttcctttgcgcaaacaactatggcaacagactgtgcagcagaaaatactcaatcaggcagccctactgaatgaactttatggcacagaaaacgggaatatgctccaatgggctgcagatgtccgttctggcgacagcaccaacctcgaaggacgagctgctgcttactactggagccagatgtttccagacatagtcggattcaaccgtggacgcgatgggctatatccaaacaactttctcaactatggatatgccatactgcgtgctgtcatagctcgggcactggtcagcagtggactactccccaccttcggcatccaccaccacaaccgatataacgcttattgtttggctgacgacattatggagccttaccggccctacgtggaccgcctcgtggtggctaccactaagcagcacccccgcacagcagaagtcaccacagacataaagcgctcactactctcgatccccaccctcgaagtacacatcagcaaccaacgcagtcctctaatggttgccgcctcgcagaccacggcatcccttgcacgctgttttgctggcgaaatacgcaaaatatcctatcctgacatgtgatggaccgcttttcagaataccgcatcatgtggttgcttgtattcttcgacctccctaccgataccaaaaaggagcgcaaagccgcagccgactttcgaaaacaactcttggctgacggtttcactatgtttcagttttctatttatgtacgccactgcgcaagtcgtgagaacgccgaagtccacctaaaacgcgtccgatccctcctgccccaatatggccaagtggggtgcctaacaatcaccgataagcaatttgcggacatagagctctacatttgcaaaaaggaagtcccgcccaatgcgcctggacaacaactggagctattctgacgtcagaataagaaaaacactcatacttaataaaaaatcccgcccaactggacgggattttttatttcattgacatgttctgggacattataattcagggagatcctcacatcgtagtgtttatcgtatgtgtcaatgtcctctttttaagcaattcacaacacgaagaaaaggctgtcaagctcatggccgagtgtttatcgtatgtgtcaatgtcctctttttaagcaattcacaaccgttgggattgacttcatgaggaagtgcgagtgtttatcgtatgtgtcaatgtcctctttttaagcaattcacaactttgctccagaatcagtaatgtataacaatagtgtttatcgtatgtgtcaatgtcctctttttaagcaattcacaactcatccgcttgatggtcgcgctgctcctatagtgtttatcgtatgtgtcaatgtcctctttttaagcaattcacaactcagatggttagtgaagctattgactttcagtgtttatcgtatgtgtcaatgtcctctttttaagcaattcacaacatatgcttgaaacgtcccgcaaactgctgaagtgtttatcgtatgtgtcaatgtcctctttttaagcaattcacaaccattcgctgcgttataccaacttggatgaagtgtttatcgtatgtgtcaatgtcctctttttaagcaattcacaactcttactcgcatgatgtctgttgataaaaagtgtttatcgtatgtgtcaatgtcctctttttaagcaattcacaacgttaacattagacacaaaaagagtttacaagtgtttatcgtatgtgtcaatgtcctctttttaagcaattcacaactattcataattcaatgtcttttatgatttaagtgtttatcgtatgtgtcaatgtcctctttttaagcaattcacaaccaaggacgacggcacgatggactggataaagtgtttatcgtatgtgtcaatgtcctctttttaagcaattcacaacgcgttcgcttgatgggcgcgctgctcctatagtgtttatcgtatgtgtcaatgtcctctttttaagcaattcacaaccactggcgtactctccaccgccgtcggcttagtgtttatcgtatgtgtcaatgtcctctttttaagcaattcacaactgtcttaggctttgccattgtcggtgatgtagtgtttatcgtatgtgtcaatgtcctctttttaagcaattcacaacgcggcggtaacgatgtcggtgaggtcggcgagtgtttatcgtatgtgtcaatgtcctctttttaagcaattcacaacgtaataatggcacgcagggataacgatagagtgtttatcgtatgtgtcaatgtcctctttttaagcaattcacaacccatctacgaccaaattatcgtcaccgagtagtgtttatcgtatgtgtcaatgtcctctttttaagcaattcacaaccgtggtcgtccttaatgtcaaaggagacgcagtgtttatcgtatgtgtcaatgtcctctttttaagcaattcacaacatgtgttcacctgattgctttcagtgtgagagtgtttatcgtatgtgtcaatgtcctctttttaagcaattcacaacagcatgttgctgaaaagtgccgtatggagaagtgtttatcgtatgtgtcaatgtcctctttttaagcaattcacaacatgaggcgggcgacttcgcgggcgacggcgagtgtttatcgtatgtgtcaatgtcctctttttaagcaattcacaaccggtgatgtggttgtcgcggagaaaaccgcagtgtttatcgtatgtgtcaatgtcctctttttaagcaattcacaacgtggggtatgcccttgtattggggtgttaagtgattatcgtatgtgtcaatgtcctctttttaagcaattcacaactatagtcgttgatgtccgcttggctgctcaggtgtttatcgtaagtgtcaatgtcctcttttaaagcaattcacaaccagtgggtgcatgtgtcgtacaagcggaagagtgtcaatgtcctctttttaagcaattcacaactcatggcgggtattaacaagcctgtatcgtggtgtttatcgtatgtgtcaatgtcctcttttttgcaatttgcaactggttaattatgaatcggagtactcggagtgttctgaataatcagaggtttgttgggttggtcggtggtgggtaagttggagaaatctgattatttgaatgattctgagacggttggattcattggttgtttcggtagtttatacgactttggtacatacgttcttttatgccaccctctttcacgaaacgggtttgcattgtgaccagcaacttgtgaagcatgtatatcgcctgatggatgagcgtgatgcagaggttggctatttcttcatcgttcatgcgctgtatggtggcggcatactctttcttgattccctcactgcgcgcatattgtcgcatcttctcatagcggggatgaagaggtccccactgctgcatgtttcgcaccctaaggtaatcctcgtagtcgtcgagcagttcttccagactggctttggccacattggtcagtttgatttctgtctcgcttgatgtagcagcagcttggttgccctccgcaatattctgtttgccgctgcgcgcggcttgaaccatctggtccacggtgcggtcgcctttagacaggtagtgctgtgtgaaatagtaggtaatgtcgtaaaccatctcggtgacttgatagacccgaaggtttcgataatggccatgcttggggaggaaggttactggggaggtctgagggctctgagtattctgagtaatcggagtactcagaatattctgaataatcggagtactctgagtattctgagtaatcggagtattctgattactctgagggctctgagtactctgagtgctcttgggggttgagggggtctgattattctggttcatggggaggctttttcttcacagctccacttcttggcggaattcggggatttccacgcggttccaacccacttcgtttagggtgtcgcggaaatgctcttgtgtggcggcttcgccatgaacgaggaagattttcttcaaacggcgcttctcttggcatccgatgtagttgatcatctcgctgtagtcgccatgtccggagagggactcgatgcggcgcagttcggcacgcacttcataaatgtggccaaagatggagacggtcttgtcgccccgcatgatgcgagccccaagggtcttgggttcgcagtatcccacacaaaggatggttgttgtggggtcgtcgatatgattggcgaggtggtgcttcacccggcctgcttccatcatgcccgaggcggagatgatgacacagggtttatgtcggacattcaaggcctttgaggcctcgacggactggatatactgcaggcggtcgaacccaaaggggtcggggtctttcttcatgtattggaggatggaggggccgaagcactcggtatggagacgcatgatgttggtggccgagacactcaagggactgtcaacgaacacatcgatgtcgggcagcaggtcggcggtctcgaggcggtcgagggcataaataatctcctgtgcacgtcccacagcgaaagagggaatgatgagcttgcctttcttcttggtgcaggtgtccaacacagccatcagcagttcctgctcggcatcctcgatggtcgtgtgcagacggtcaccgtaggtggattccattatcagataatccacttgcgggaatggttcggggtccttcagaatgcgcttgttgtaacgtcctatgtcgccggtgaatcccagtttgatggtgcgacggccgtctttgatttcaagatacacacaactgcttccgaggatatgtccggcgtcgaaaaactcgacggtcacctcgccttcgatattaaactgcttgtgataaggcacgctgatgaagcagctcatgcactcctgtgcatctttctctgtgtagatgggctccactgggggcagattctggtccttgcgtttcttgttgaacgtgtgggtatcggcctcctggatgcgtccggcgtcggccagcatgatggcgcagaggtcgcgcgtggcgggagtgcacagcaccgtgccacggaaaccctccttatagatataaggaatcaaacccgaatggtcgatatgggcatgcgaaagaatcaggtagtcaatctcggcggggtcgaagccgaggtcgcggttcatggcatcggtctccagtcccttgccctggtacatgccgcagtcgagcaaaatattcaatcccttttttgttgtgataaggtgcttgctgccggtcacttctctggcggcacccatgaatttcagtttcatacctatagtgtatttctatgtttcaactcaataataatcatttccatacagcctcgcgccccgttctgggcgggagacaacaacaaagcaaagatacactttttttttcaaattgaaacaatccgctcatccctccggagagtgagaaaactcgttcaatagaaaaaaatgcgtatttttgtaatgacgaatggggagcggatttccgcacaacccactatatattagcaaataataccaacacaatatggcactgaaaagagtaatggtactgaccgggggcggcgactgccctggtctcaacgccgtcatccgcggcatcgtaaaacgggcctcccaagagaaagactgggaggtaatcggctgcatcgagtccttcaacggtgtgctgcgcgagcccaccgagattgtcgaactgaacgagaaagccgtagagggtctccagatacaggggggcaccatcctcggcaccaccaacaagggcggcccctttgcctggcccgtgcgccagcaggacggcacctggaccaccgtcgaccgcagcgacgagatgatacgcaagctgcgttacatgggtgtcgacgctgtcatcaacatcggaggcgacggctcccagcgcatctccttgggtctggcgcagaaaggcctcaacatcgtgggcgtgccaaagaccatcgacaacgacctctcctccaccgactacaccttcggtttccagaccgccgtgcagatatgcaccgaggccatcgacaagttggtgaccaccgccgccagccacaaccgcgtcttcatcatggaggtgatggggcgtgatgccggctggattgccctgcattgtgccatcgccggtggcgccgacgtctgcatcattcccgaaatcccctatgatatcaacaagataaaggagaagatagagcagcggtacaacaaacgccacggctactgcatcatcgtggtggccgaaggggccaaacccaaaggcggcaccaccgtaggtgctgaaagcagcgaagtgggctaccagcacatacgcctgggcggcatcggccaccagttggctgccgacctcaaggccgccggagtggagcacgacatccgctgcaccattctcggccacctgcagcgcggcggcacacccgttgccttcgaccgcatcctggcctcccagttcggcgtccgcgccatggaggaggtcatcaacggcaactacggccagatggtggcctaccgccaccccgacatcgtcgccgtgcccctcgaagaggccgtccgcgcccagaacctcgtcgaccccaacggcagccttgtccacaccgccaaaggactcggcatcgagttcggtcagagcgacccctgctgatacattattattcacacaacgaataatcattgaagataatatcatgaaaacaatgaaactcatccttgccgcgaccatcgtggcactgaccgcagccggttgctgctcgaagagcaacgcccccaagacgctggtgctgtattattcactgacaggcaataccaaagccgtggccgaagagatagccaatcgcctcggtgccgacatagaggagattgtctgcgtcaacccttacgacaccaactttcaagcctgcatccaacgctgcaagcaagagcgtgagcaaggcgtactccccgacatccagcccgtaaaagccgacctcagccaatacgatgtcatcttcatcggctaccccgtctggttcggcacatacgcaccgcccatcgccaaataccttctcatcgaagacctcagcggcaagaaggtggttcccttctgcacctttggcagtggtggcctggaatcaagcattgccgacctaaaagccgaagaaccctatgccgaaatcctgcccggctacggtgtccgcgccgcccgtatggatgccatgcccaaggaggtggagcaattcctgattgccggaggcttcattgagggcgaatacacgccgcttgcggacttccccgaacagcatgaagtgtctgccgaagaggccgccatcttcgacgctgccgtcgacggctatcccatgatacatgcccaagccgtcaccgtggcctcccgggccctgcccaacggttccgaatacctcttcacagccgaggatcttccccgcgaggacaagcccgacatgcctgtcggcaagatgcaggtctatgtcaccgtcgccgatggccaagcccccgtctttaccaaagtaatccgctaacctgtcaacttaatccagtcgaagggaacaaaagtgacaacctaaaacagcaaaccacaataatccatacaaacatataattacaaaaaagatgaacagaaagatgaacagaaacaagaaaagggagtacacctctcccgaaatggaaattctggacacccaggtggagcacggcttcgaaggttcaaccacaacagacaatgcattcaccaaccccaccggcaacgaccgctacaatatgggcgacggtattggacacagatttagttgattcttaaagaccgcagcaagatgaaaaagtatttctatcgcaccgccacattcatgtctattgtggcactattctcgcttgcctcctgccagaaagaggaaggcggcaaagtgctgtttaccggcgcaatagaaaaagctactgtcgacagcaagacctccatccaaatcgacaatgccaccaacgaaggcaaggtggtatgggaatccggcgaccaagtggccatctatgaccaaggtgtctcctacactctccaagccgtccccaccggcgacaacaccaccgccgacttcactggcgacgccaccccctccggcggcccctactacgccatctaccctgcagacattgcttcgggttccgagagcatcaccctccccgccgagcagacctgctccaacagcacccacttcactgcacccatgtatgcctactccaccaccagcaacctggtgttcaaaaacctctgcggcgtactgcaactcaatctccctgccgtgaacaagaccattgcccgcattgagctcaccacccccaacaacaacatctgcggcgacttcgctgtcaactacaacaacggagacccgcaactgagctgcaccgccaacggcggtcacaagttgaccctcaactgcggcgagcagggcatggactgcagccaaggcctcactttctacatctacctgccggccggcgactacaccaacatgacctttgccatcgaggctaccgaccacagcaactgcctcaagcatttcgaggacgccgccaatcccatcaccattgttcgcaacacctattatcccaccagcctcagcaacctctccttcctcgcccccgcccagttggtcgacggagaagctttttcgagtgttatgatgagccatcacgagttgagaaatctggtgttcgagtacaatagcacacgcccggccagcaccaacggtctcctctcaaccagcaattccacccccatctactacaccattgaaaacactacaatgattgtctacacccccgctgcccaaatgtacgccaatcccgattgcgcttttatgttctttgagacctttggcggcaatgtagaacaaattgattttggcacaggcttcaacactgcaaatgtaactacaatgtccaacatgttcggtggttgcaccaacctcacaagtttggatatttcaagtttcaacactgcaaatgtgaccgacatgtcgtacatgttttcctattgtcaaaaccttggaagcttaaacctttcaaacctcaaccttcagtccgtcacaactatggcaggaatgtttagtcgctgcggcgtccagacgctgaacctttcaggtgctaccacatcttctgccctgaacaatgccaccagcatgtttagttactgcgaaaacttgtccggcacacttgatctttccggaatcgaactgagtaccatcattgactggtggaacaaatttgacatcttcggcaacactgccacgaaagcctcattaaccgtcctgtgcacacaaaatacctataacgcactcaatgacgggcacagttctgactatggcttagcaggcaacaaccatatcacacttcaggtggttgaataaaaagcctacaggattcgcggtgcaagccgcacacctacaaagaacgctgcaagtcaacccttgcagcgttctttctttttacagccaaagagggcttccaaaaaagattttgcccaattgagaaaaataatgtatatttgcattttgcatgcaactatgcaatatgtcgcgtaagcgatgtattgtcagcatgttatatagatacttaggacataaaaacaataataatggaacctaaaaaaataaaatcagccctcatctccgtct

SEQ ID NO: 4000 - DNA, 24233 bp, synthetic construct
  source 1..24233: mol_type = other DNA
  misc_feature 1..24233: note = Synthetic
tcctcgtccttgccgatgtagtccaccgccgccccgacggcaccctcgacgtctacgaggtcaaatccggctccacactcagcgagacatacaaacgggatgccgccctccagcattacgtcatcgcccactgctgggaggtaaacaagttctgtgtggtgtataatgggatgtccgacaagtcagacttgtcggacttgtcggacttgtcggacaggtcagacaatttcaaggttgttgaccttaccgacgagctggccgcccagcactccgagatagaaaacaatatagctttgatgaaagaaatcctccaacacggcgaacctgccacccccacaggccagcactgcctcgagccttacgcctgcccttaccagcactactgcgcccaaggcatccgccaaatgtcgctcttctgaatcaacgccacagactggccacagcctcgtcatagcggcgcagcgacccgctcttcataatagccttgtactgcttcttgtccggcaacaccgtctgatactcccagaaggcatgcaggcgggccaatatctggctgtcgccctgcaacgccgacacagcatgggcatatatcctcgcatgcatttcgcgcaccacagcaagcggctcccgacccgacaacatccctggccgtgccaacaaaccccgacccatcatcacccctttcagctttggccatcgctgcatcaccgattgcacatcttcctgtgagagcagatcgccattatacaccacccgctgggtacaagcctccacaaatgcaccgaaagcctccctgtccgcgactcccttatattgttgtctcccgatgcggggatgcattgtcacatgcgccagcggcattgcattcaacacaggcaacagccacaggcactcgctggcatcctcctgaccaaggcgcatcttcaccgaaaaaatcacctcgccacgctgtcccatctcttctgctatctcggccagacgctcctcctgcatcagcaatccgcaccccctgccagccttcacctgcatggggaaggggcatcccatgttcaagtctatcctattccatcctgccgcctgcacagcgtcgcacagccgggcaaactcatccctgtcccgggctataacctgtggcacagtggccacaccctcattgcgccggaaatcgatgtcgcgcaaatcctttttgcgtacctcgccgccctccaaccgcacaaagggggtgtaatactcatccacccctcctgccacctcgcaatgcgcacgcctgtattcacagtcggtataaccctgcagcggagcaaaagcaacgtatggcatcacggcttcaggcatcagaacgagtagcgcacatgcatcagcacctgccaagccgagaggaggtcgctgtacacattccacttgggtttgttgaacgtatatacaccgtccttgtattccagaacggtctggctggtaagctgcttgtaggtcccccactcgctgttgagcaaattggccacattgttgatgtcggcacccacctcgagcgtggttcggcgaccgttcacatcgaaataaaactcctggcacaccttcaggtcaaggcggttatgccacggcgtcagcatggcgccgcgcttggtgtactcacccctgtgacggctcagataagcatcgttggcaataaacgcgccatagtcagcacggttctccacactgctgaaaggcatcccctccagctcctcttcggtaggcacatatagcagacgcgaggcgttgataccacccacattgttcatcagatacgaacagcgggcatagccgacgctgttctccatcccgatgttatacccttcgtagaacaaccctagccgtgtagccgtgcgacggccttcgaacagcgtatagttggccgaagctatcagcctgtgcggcgccacataggcggtaaaacccagctcgggacagttgtcgccgtccaccgtactggtctgcgacagagtatacacagcgtcgccgccgccatccgacaccgacagcgaagagctgtaggtataggcagccatcacgtccagtccaaagccgaaatgtttttgaagctgtgccaccaccgacaggtatcggccatgcaatccatcgacgttgtggagccggtagcccgacatgccattggccacactctcctgttggtaagccacgcgtccacgaggctcgccgggcagatgcagcgaatcgcccggcaggtagccaagcgtggtcgacaccacctcgttgtagttgtacgacaggatgccctccacggtacctttcacgtcccagggcagtttgacatccaacgccagcgaactcttccagctggtgggcatcttcaggttcttgtccagaatcaccggactcgaaggcagtgccatgtttccaccgccgggcacactgtttacaatctcctcgcggctggggctgaacggcatgacggggttctgggtctgcgtgttggcaacatattggtacaacatgacattagagttggaaatggcattcaccaaccacacattaggtatacggccagtgaaaagccctgtgccgccacgcagcaccaccttgcggttgcgggtcacatcccagttgaaccccacacggggcgacacattcacctgcaagcggggcatgtcgccgggattcaacccttcgaaggtgctgccgggatgttctgccacaaactgtgcaaaaccggcatggtagttgtcgttggcaaaacggatgacgggcacctccagccttagtcctgccgtcaacttaaagtagcggctgaactccatctcgtcctgggcataaagcgagggctggagataattgaacacatactcgggcagggccatgcggtcctcttgattggcaaaagccaccatgaacagcacagggttgcgcttgttgacaaagctgtcccatgagtcgaacacataccatcccgcgccgccgggcatatacacattgcgaatattgctgtactcgaactgcacgccagccaccatcgtgtggacgccggaattatatgtcaactcatcggtcacattgaacgtgctgacgctgttggccgtcatataggtgaaggggtccagtccgaaggtggtataggaggcatacttgcggctgccgtcgctgccggtgtaaggctcaagaatgtccacagtggggaacaggtcgccgtaatggctgcgcggctcgttctgatacgaccaggtgacacgcagattgttgttcccattgccgccccacagacggctgtccagctctgccgccaccgacgtgaaatcctgattcttatagaaacgtgccgactcgaacatcatcgaatagttcgacaggcgtccctcggaatagcggttgaaagaataccgcttgccgtcgacaaagaaggccgtgttcgtgccgccgatggtgctcatcgagttcgatgcatcaaccgtggtggtgtgcgtatggctgaacctgacattgaatttgttgttgctgtttataatccaatccagacgggcaagaaaacgatagtcggaggcatcgaccgaatagttctgatagcgtccagggtcatagccgtattcctttatcaaataattcctgatactgtccatgcggcccaccgtgggacggttgtagccgttgccgccccaggcggcattgctgtcggcacgagcctgtgccgatgcaccgggcactttctcgggcgtatactctgcattcaggaagaagaacagcttgtccttgatgatggggccactcaacgtaaagcccgcaacgttgttcaacgtattgctctgcggcagagtcacgtcgccaagatgccgccccctcagccaactgctgttataataatcatacagcgaggcatgccactcgttgccgccctgcttggtgaccatattgatggctccacccttaaagccgctgtgccttacatcgaagggggtgatactgaccgaaatctggtcgatggcgtcgagcgagagcggattacccccggcaggaagactggagccgatgccgaaagcattgttgaacgaggcgccgtccaccgtcaccgacgagctgcggtagtcgcctccgcccaccatgaagcccctggaggtgctgatgccctgcggcgtgagccgcatcacatcgtacagactgcgactggcggtaggggtagccatgaggacggaattggtgatatttgtcgaggctcccgagttctgcacattcatattggagtgcgtggccaggtccacaaccactatctcgtccaacgaggtgcttgtcatcttcagttcaaaatccaataccacacggtcgcccagcggagccgtcacatcactcatcaccaccgtacgatagcccatcagctcaacccttatattgtaagggcctccggccactaccccgttgatacggtaactgcccttggcattggtgaaaccgtggtactgcatccccgtgggcacatataccgcggtgacgatggcatcggccaacggaccgttctcgtcgtttacactgcccacaatagacgatgtggtggtctgagcccctgcgggcaacgaaatcaataatcccacaaagagtgccaaaatggctcctactctacttttcataacgattctaatgctacaataaatgtctataagatattatataacagttaattacttgttaaacccataccatgggcgaggtacaaaggtacaaaaaataaactacaccaccgcaagcgattcgggaattaactattattaaaaatcttttgcaattctcaacgcaacgctgttccttcgttcaatcttgtatccttcatgctacgttacagcttcgttttccgttatagtgacggataacgagcctgtaacgatccttgatcgagcggatattgaacgacgttagtgtgacaaaaaaaacgtcatcgaagttgcgctccgatgacgttgtagatgatatgccgcgatgcgacagcctatcaatagacggggaaggctatctcgcgttcgatgacttggtaagccacgttgttgcgatagatggtctggcgcacccagttgtcgtcctcgtcgtactcgaagacgtagctgtgcttccagttgaggtgctcgtcgtagttgaacgaggagagctcgatgaggttgtcgtggtcgtcgtagtaataggtggtgagggccacgaggaaatcgtcggcatcatagaaacgccactcgatgcggttgccgtggctgtcgtacttgtagaggtaacgctgcatcagctcgccgtcgcggtcgtagaattccatctcggtgttgttgccggcgtcgtcgtatttgtagacgcgcttctcggtcatggtgccgtcgggggcaaagctctgctcttcgacaaggcggttgttctcatagcgcgaggtctctttcttggtcatgtggtcgcccataaagacggtgcgctcgatgcggttgccgttcttatcgttgagataggcggtgcggccggtgagctccttggcgcggttgtactcgttccaacccaaggcatagccgtggacgtcgaagtaataggaataccaggtgtattcaccgtccttggtgcggtatttgtcctggaaattgccgcgtttgtcgaaagtgatggaatcgatgcaaacaagctgacggccaccgttgcggccaccgtggatgtcgtaggtgtattctatcacatagacggcatttccgttgatgcccatctcctgacgggacgatttgcggggtttattaccggcaaaagcactgccagcgaccagcaataccaacgataaaacaatgtatttcttcatgttacgaattattatacaatataaaagtcgttgcaaagatacaaatttttctttacataaaacgtgcttgtttataaaatattgcgtggaacagcctttttcttatcccacaagccacgtatcccggtttgttgttgtttcatgacagcgctgaccggcacagctttttattgctccttgggctccttcttccttgtccagaaaaagaagatggcggtggcaagcagcgtgatggcggcgccgatagtgtagcccagccagcgggggatgacggcccccagaccctccttctcggcaacgaacaggaagcagcctgtgaccatggtcatgaacatggcagggagaagggtgaggatgtagggcttgcgcttgaggaagagatatacggtgatggtccaaagggtgacggtggccagcacctggttgctccaggcaaagtagcgccagatgacgtcgaagcctttcgcgtcgataagggagtagaccagcacagcggcagtgatggcaaagatgggcagggcgacgaacagacggtttttaataggtttctggtcgaagtggaggaagtcggccacgattagacgtgcggaacgcagggcggtgtcgccgctggtgatggcggcggagatgacgcccaacacacagatgacagcgatgaccttggggaaccatgtattggcgatgacgcccaccatggcgttgccgcccaaggtggcaccggtctcagggttgacggtgagttgctgcagctgggggtcgtggtagaagaccgtggcggcagcggcccagatgagggctaccacgccttcggtaatcatggcaccatagaaaacgggacgcgcctgacgctcgttggtcatgcagcgcgccataagaggcgactgggtggcatggaaaccgctgatggcaccgcaggcgatgctgatgaacatcatggggaagatggggttgtgggcagcatcgggatgctggttctggaggccatcccaaagctcaggcagcggtggatggtaaacgacgaaggcaatgacgatggccacggccatgccgagcagcaggaatccgaagattggatagattttgccgataagcttgtcgatgggcagcagcgtggcgatgagataataggcaaagatgatacccacccaaaggaagatgttccagtcgggggtgaagttgctgttgagaagcacggccggtgtattgacaaagacggctccgacaagaatcatcaggaacaccgtgaagaagcgcatgaactgcttggggccgttgccgaggtaggcgccgtggatttcgggcagggaagctccgtcgcggcgaatggagataaaccctgcgataaagtcatggacagcacccgcaaagatgctgccgaagacaatccacagaaacgacgccgtgccgaactgggcgcccatgatagctccgcagatgggaccgacaccggcaatgttcaaaaactggataaggtagatgcgccacggcttcatcggcacataatccaccccgtcggggtgagccactgcaggagtggcccgcttcggatccaccaccaaaattcgctcgataaccttggaatacaccaaataaccaagcactaaaagcactattgcaataagaaaagtaaccataacttaatctattttcgggttgcaaagatacgatttttttttgaaaacttctatttttataattcaaatcccaatttttcttcgtatctttgccaaacgaaatcaaattaatcattttactatgaaaaaatcattatttattgtcgcaatggcagttatcatggccactggagcctctgcccaagaaacaaaaaaaccaaccaaaagtcagttcaccatcaacacccgtgcatggtcaaccaactattggtccaccctgctctacaacattgcacgcgatgctgtgacctatcttgtcttcgacaacaatcccgcaatcgaggccgctatccccaacgccgacctcgccttccccatcggcatgggcaaagagggatttgctaaccctaacgacatctatggtccctaccaccgtgccttcggaacacccttcaaacgcctcggcgacttcagcataggtctcgatgcctcctgggtgccctcgattgtaggcgtctatgccggtgcctactacaagagccaggaaatatgcttcatggccaacgaccagaacctgcgcggcaactacttccagccccgtgccggactcgtgattggcggtcagcgcaccgccctcgaggctggtgtcttctacgacttcaccgtcggctgcaccggcacctcgcaggttttcggcacccccaacaaagacatgattgcaagcggcttgggcctcgactttgccatctcctatgccaacaatgccaactctcgcaaagtcttgctcatgttctccatgcccctccacaacttcctcaacgaagactacaccggcggcatgctgaaaggcaaggtacgcaaagtaggctacctcatgctcacccaccgcatcatcttctaaccccataccggatatcacaacactagcccgcgcaccccaagcgcgggcttgttttattttaacccaaatcggtcttgaggaactggatgagataaatgcgccagggtttcatgtgcacatagtccacaccgtcggggtgtgccacagcgggcgtgggacgattggggtcgacttcgacaatccgctctacaaccttggaataaagcagatagccaagcaataacagcacaatagcaagtagaaacgataccataataatatgttttttgaatctgtaaagatacgtttttttcagacatggcgaccttttttcatcaaagtgacccattgcaatgcctttaccgccatcgaaaatgcataatccccaatcggtcatttggccgattggggattatgcttggcatctctggcatccccgaacaattggtatagacttgcacaatccaaataggcagtaaggggtatcaatttggatttgttcaatttgcgtatgttgagaaagtgaatattcgcatgcccattttaattaaatcctcgtttttcaaaaaaaagcattaattttgcatagtcaatacataaaactaacagaagatgaaaaagaccttattaattgtaatcatgacagttctgctgaccgcaggtgcttcggcgcagacaacgagaaaacaattcacattcaacacacgtacatggtcgaccaactactggaacacgcttttgtacaatctggcccacagtgcggttgtccactttgccttcgacggcaactccaccgattcgttgattgttgagtccatcctgcccagttccgacctggtgttcccgataggcatggcaaaagccggctttgaggcaccgatgcacgacatctacggaccttaccaccgtgcattcagcaacccgttcaaacggataggcgactacggtatcggcttggacatgtcgtggaaacccgtgagcatcgggatctatgccggtgcctatttcaagagccaggagatatgcttcatgcctaacgacgagagcctgcgcgggttctacttccagccgcgtgccggactggtgatgggcggcaacaagcacgcccttgaagccggcgtgttctatgacaaagtggtaggctgcggcggcacctgggaagcccgcaacaaagagatgctgcagagcggttggggtctcgacttcgccctgagccgcaccgtggccaaaggccgccacaaaaccatgctcatgttctccatgcccctgcacaacttcttcaacaccgcctatgccgacggctcgttgaaaaacgtgcaccgtcgcgtgggctacatcatgctcacccaccgcgtagtgctctaatcagccctgcccaaccctgttggcgcaagccgccaacacgtcaagcaatttcaagcccagaaccgcataggcagttccgggcttgctgttattataaataaaaaagagcaagtcacgattaacatttaacaccttcacccagcataatattcagaaaaaagttgtatctttgcattttcaaagaactccctaatattgcaaaaaaagaacaatctattataaaaaaatgggagcacgcaaacgcgcaactcccgagaaatcttcggcttatagccttattgtgaaaagcttaaaaagcattgcaaagatacaaacaaaatctgaaacagcaacaaaaaaaacactatggcaggaaaaatattaggtatagaccttggaaccaactcaataggattggccgtcagagacactgacaatggggaaaatattacagaccaactagaatattacacctccataatattcaaatcaggagtggggaatggagacaaaggagaattctcatacgcctccgaaaggacccgataccgctccattcgccgactataccaatcgcgcaaatacagaatttgggctacattaagactacttatcgaatatggttgctgcccccttaccaatgaagagcttgaccaatggagcagatacgacaaatccaaaggcttgaaaaggcaatacccaattaatgccaccaaattcgagcaatgggttcgtctggacttcaactgtgacggaatacccgaatacagcagtccttatcagttaagggctgaattaatagataggctgattgactggaatgaccaaaccgacagatataaatttggtcgagccatgtaccacattgcacaacgacgaggtttcaaaagtagcaaaggcgaaacgctgaaagaggctaatgaggatgaggacagctccactattgacataagtgaggccatgcagaaatcggaagaaaaaaaatcgaaggttcttgaagaatatatgagaagccataacctgcaaacagtaggatgtgcttttgcccttttggaaagagatggcatacgagtccgaaacagtgaatatcaagctgttcagaaacaatatcgtgaagaagtagacgtgatatgcaaacgccagaatatacacctaatagatcccgaactatacacgcgccttatcagcaccaagaaaggagaagggaccatattctaccgtcgccccttgcgatcacaaagagggaatgtcggggagtgtacactcgaaaaagggagacgccgatgccccataagtcatcccgactatgaggagtacagggctctgacctttatcaacaatatcaagttccgcctcgaagaggatggcaaatggctgaagttatccagcgagcaacgcaacaggcttttcgagagactattcacacgcgccaatgccacctttaaattcgaagaggtaaaaaactggattgcaaaagaataccctggacacgatttcaactacaagaatcataccatcaattaccccgactatactactgtggctggttgccctgtcatcaatagacttagcaaaataatgggcaacgaatggcgtaccacagtaatagagaccgacaaatgccgcaccaattacaagactggagaggttcacactatcagatacaactacgaagacatctggcacctgtgctataacagcgacgattacgaagaacttgcagatttggcaaaagaaagaatcggtctaaacgaagaacagattggcaacatcaaacggctatggagcgtattgcaggaaggctacgccccattgagtctgaaagcaatacggaatatcctcccattcctccgcgaagggatgatatacagcgaggctgtagccatcgccaagatacctgacattatcggcaaaaagaagtggactgaatgcaaagagactatcatcgaagagataaagcgcatttcagcaaaggcttcaacactacgcactgaatacaacattgccaacacccttatcgccaactataaatccctgtccattgaaaaccaaaaggcctatagagattatcattacaaattggatagcagagacaaagaggatgttctgagatgcataattgactccatcggactaaaagtctggaacacattacaactagaagaacaacagttcatccaagaaactgtagaaagcctttaccaacaattcttctcatcgacaaaacgagattactacaaactgccccaccaaagcgatgctcttaaagaatacctctcacaaacattccccgagataacgcccaaagtaaaatgggatgccctttatcaccactcccaaataagtctttttccacaccaaaaagcgtccacgggcgatattggtggttgcataaggagctattatcaactagggactccaaatataggttcgattaagaatcccgtagctatgcgtgccctacacacactaaggcgtgcagtgaacgagttactaaagcagggtatgatagacgaagacactcgtgtggtggtagaaacggcacgagacatgaacgatgccaactggcgcaaggcaatagagaggtaccagaacgaacgcaaaaaagagaacgaccttatcactaacatcataaaggatttcagacccaactattcagatgacgatatagagaaaggacggctactgttcgagcagattgaatctggcgactttaaagagcccgacattgacaaatacgacaaagcatcgcgaatccaaaaggagaaagctgagagattcgctctcgaccttcagaaatacaaactatggaaagaacagagattccgctgtctttacacgggagtcgccataagtataacaaaactatttgacgaaaatgcagtggatatcgagcacaccatcccacgcagtatatcgttcaatgattccttgacaaacagaaccctctgctcaactcatttcaaccgagctgtaaaaggaaacctcatcccgacacaattatcaaactacgaagaaatcaaagagcgaatcaagccatgggaagaaaaggtagaacattgcaagagccaaatagaactatggaaaaagaacgctcgaacggcaaccaccgtcgaccgcaaggacgaatgcattcagcagaaacatctttgggagttagaattggactattggcaaaccaaagtcaaaaccttcacaatacaaaaagacgaacttgaccttagtttccgcaacaggcagctcgtagacacacgaatcatcactaaatacgcattccactatctgaaatcggtcttcacgagagtcgatgtccaaaaaggccgcatcacagcagacttccgcaagatattgggagtacaaagcgtcgatgagaaaaaagaccgtgcgaaacattcccatcacgctgttgatgccacaattctcaccatgattcccgtcgcagcaaaaagagaccgcatcattgaactattctaccaagtgcaagaagctcctgatgcggaaaaagcatcactttacagtaagttgtctgatgaaataaaatcttgccgattgggcaatatttcaaaccttgtagagacaatcgagaccaacattctcataaaccacatctcaaaggatcagaccctcacccctgcccgtaaaagaagacgcttagggaaaaaagacaaaaaggtacaatggttacagggtgattccatacgcggaagtttacatcaagaaaccttctatggagcaatatctgatgggaaaaagaaccttcgaacagtgatccgtaagccattgaaaagcctaaaagagaaggattttgactcaatcgtagacccatctgttcgtcattctatcgaaacacaagtcaaacagcgcatgactgaggaaagcctctctttttcaaaagcattggaaggggatatctggttgcttgacaaagatggagttcctatcaagcaggataagcacggacacgatatagctcccatcagacatgtacgttgttatgcaaaagctggtcgcggttatttcaaaatagacactgccatacaaattaagcaacagacctatttatcaaaaaaagaatacaaaaagcactattacgcacagaatagcgacaactatctttgcctccattacgagggaacatacaaaggcaaacaccagcaagtattacgacttatcaactattatcaaattgctcagctgcatatacggaattctgatgtccttttcaacgaacccgaatttgcctgttacgagggtgtgaagaccatggtacttaaaaacatcataaagaaaggcttccgcgttctattgtacgtcaaccatcctgacgaacttcgcgacatggatcccgacaaacttagtaaaaggctttacgttatttacaagtttaacgccgtcggaaccccatcaatctatctcagacaccatctggaagcccgaaaagaaactgaatgtagcactacagaattagggacatcttttacacctctttcccgagcatcatacttaactctgaaatccaacaactttaaagcgcttattgaacactccgattttgagattgacccattggggaaaatcaccttcaaaagcaatcaatagtcatgattaaacggacactctgtttctccaatccagcctacctgtccatgaagaatcgacaactgtcagttcggttagaggaccacaacggcgagcctagcaagcaaaccaccattcctattgaggacatcggaatggtagtattagaccacccacaaataacagtcacccacggcctgatggcagcactattagacaacaacgcctctgtcatcacttgcaacaatagccacatgcctgtgggactgatgctcccgctagaagggcacaccgtacagagtgagcgattccaagaccaactatctgcctcagttccattgcgcaaacagctatggcaacagactgtgcagcagaaaatcctcaatcaggcagccctattgaatgaactttatggtacagagaatgggaatatgctccaatgggctgcagatgtccgttccggtgacagcaccaacctcgaggggcgagctgctgcttactactggagccagatgttccctgacataggtggattcaaccgcggacgcgatgggctatatccaaacaactttctcaactatggatatgccatactgcgtgctgtcatagctcgggcactggtcagcagtggactactccccaccttcggcatccaccaccacaaccgatataacgcttattgtttggctgacgacattatggagccttaccggccctacatggaccgcctcgtggtggctaccattaagcagcacccccgcacagcagaagtcactacagacataaagcgctcactactctccatccccaccctcgaagtacacatcagcaaccaacgcagtcctctgatggttgccgcctcgcagactacggcatcccttgcacgctgtttcgctggcgaaatacgcaaaatatcctatcctgacatgtgatggaccgcttttcagaataccgcatcatgtggttgcttgtattcttcgacctccctaccgatacgaaaaaggagcgcaaagccgcagccgactttcgtaaacatctcatggctgacggtttcactatgtttcagttttctatttatgtacgccactgcgcaagtcgtgagaacgccgaagtccacctcaaacgcgtccgatccctcctaccccaatatggccaagtggggtgtctaaccatcaccgataagcaatttgcggacatagagctctacatttgcaaaaaggaagtcccgcccaatgcgcctggacaacaactagagctattctgacgtcagaataagaaaaacactcatacataataaaaaatcccgcccaattggacgggattttttatttcattgacatgttctgggacattataattcaggcagatactcacatcgtggtgtttatagtaagtgtcaatgtcctctttttaagcaattcacaaccgtgaggatgggatttgccactgcgagagggtgtttatagtaagtgtcaatgtcctctttttaagcaattcacaacggtttgatttatccctgctttttggctgaggtgtttatagtaagtgtcaatgtcctctttttaagcaattcacaacaaatgagtacaaaatgaaaaagaaaagttggtgtttatagtaagtgtcaatgtcctctttttaagcaattcacaacccgctcgttggtattggctgacccaaagaggtgtttatagtaagtgtcaatgtcctctttttaagcaattcacaaccctctttggcagatttaacctgaatctcggggtgtttatagtaagtgtcaatgtcctctttttaagcaattcacaactttccaatcgtctgcactttattcgcctgaggtgtttatagtaagtgtcaatgtcctctttttaagcaattcacaactaaataactgtatttgtgcaaaggcggtctggtgtttatagtaagtgtcaatgtcctctttttaagcaattcacaacgggtgcaaataaacttttttaaagccttgggtgtttatagtaagtgtcaatgtcctctttttaagcaattcacaactttacggcggtaattagccgaccccaaccaggtgtttatagtaagtgtcaatgtcctctttttaagcaattcacaacaaaagaaaagtttagagttttcaccgcttggtgtttatagtaagtgtcaatgtcctctttttaagcaattcacaacaaaagaaaactcaaaactaggggacgaggaggtgtttatagtaagtgtcaatgtcctctttttaagcaattcacaacaaacggtcgatatagaattatcatcattgaggtgtttatagtaagtgtcaatgtcctctttttaagcaattcacaaccatccgtaataatggccgctgtgggggtggtggtgtttatagtaagtgtcaatgtcctctttttaagcaattcacaacattattgtacgctcccagtcccgtctgcaaggtgtttatagtaagtgtcaatgtcctctttttaagcaattcacaacatttgtttgctggtttatttttctttttgggtgtttatagtaagtgtcaatgtcctctttttaagcaattcacaacgttcgcagccggacttggcctggcggaagcggtgtttatagtaagtgtcaatgtcctctttttaagcaattcacaaccgtcggagagtataataaccccgaaatagggtgtttatagtaagtgtcaatgtcctctttttaagcaattcacaacgtcagcgtatggcttgggacaacatcatcgggtgtttatagtaagtgtcaatgtcctctttttaagcaattcacaacagaaaggagaaacaaaatgactaaacaagggtgtttatagtaagtgtcaatgtcctctttttaagcaattcacaaccgaaatcgaccgagcaatcgacgtgtggaaggtgtttatagtaagtgtcaatgtcctctttttaagcaattcacaacgtaccctgtaggggtgaagatactggggctggtgtttatagtaagtgtcaatgtcctctttttaagcaattcacaacatagcatggattatgtgcagttcccctgccggtgtttatagtaagtgtcaatgtcctctttttaagcaattcacaacgaccagttaacctcgaatgaaagcggtcgggtgtttatagtaagtgtcaatgtcctctttttaagcaattcacaaccagacaaggaaaaagagaaggttgtccgagggtgtttatcgtaagtgtcaatgtcctctttttaagcaattcacaactatgagtagagtaaatcgtggctttaacctggtgtttatcgtaagtgtcaatgtcctctttttaagcaattcacaactcacattcgccattggtgggtcgctccccggtgtttatcgtaagtgtcaatgtcctcttttttgcaatttgcaactggttaattatgaatcggagtactcggagtgttctgaataatcagaggtttgttgggttggtcggtggtgggtaagttggggaaatctgattattcgaatggttctgagacggttggattcattggttgtttcggtagtttatacgactttggtacatacgttcttttatgccaccctctttcacgaaacgggtttgcattgtgaccagcaacttgtgaagcatgtatatcgcctgatgtatgagcgtgatgcagaggttggctatttcttcatcgttcatgcgctatggtggcggcatactctttcttgatttcctcactacgtgcatattgtcgcatcttctcatagcgcggatgaagaggcccccactgctgcatgtttcgcaccctgaggtaatcctcgtagtcgtcgagcagttcttccagactggctttggccacattggtcagtttgatttctgtctcgcttgatgtagaagcagcttggttgccctccgctatattctgtttgccgctgcgtgcggcctgaaccatctggtccacggtgcggtcgcctttagacaggtagtgctgtgtgaaatagtaggtgatgtcgtagaccatctcggtgacttgatagacacggaggtttcgataatggccatgctttgggaggaaggtgactgggtgggtcggagggctctgagtattcggagtactctgagtaatcggagtattctgagtaatcggaatattctgaataatcggagtattctgattactctgagggctctgagtactctgagtgctcttgggggttggggtgttctgattattctggttcatggggatgccttatcttcacagctccacttcttggcggaattcggggatttctacgcggttccagcctacttcgtttagggtgtcgcggaaatgctcttgtgtggcggcttcgccatgaacgaggaaaatctttttcagacggcgcttctcttggcatccgatatagttgatcatctcgctgtagtcgccatgacctgagagggactcgatgcggcgcagttcggcacgcacctcatataggtgaccaaagatggaaacggtcttatcgccccgcatgatgcgagccccaagggtcttgggttcgcagtatcccacacaaaggatggttgttgtggggtcgtcgatatgattggcgaggtggtgcttcacccgacctgcttccatcatgcccgaggcggagatgatgacgcagggcttatgtcggacattcaaggcctttgaggcctcgacggactggatatactgcaggcggtcgaacccaaaggggtcggggtctttcttcatgtattggaggatggaggggccgaagcactcggtatggagacgcatgatgttggtggccgagacactcaagggactgtcaacgaacacatcgatgtcgggcagcaggtcggcggtctcgaggcggtcgagggcataaataatctcctgtgcacgtcccacagcgaaagagggaatgatgagcttgcctttcttcttggtgcaggtgtccaacacagccatcagcagttcctgctcggcatcctcgatggtcgtgtgcagacggtcaccgtaggtggattccattatcagataatccacttgcgggaatggttcggggtccttcagaatgcgcttgttgtaacgtcctatgtcgccggtgaatcccagtttgacggtgcgacggccgtctttgatttcaagatacacgcagctgctgccgaggatatgtccggcatcaaaaaactcgacagtcacctcgccttcgatattgaactgcttgtgataaggcacgctgatgaagcagctcatgcactcctgcgcatctttctctgtgtagatgggctccaccgggggcagattctggtccttgcgtttcttgttgaacgtgtgggtatcggcctcctggatgcgtccggcgtcggccagcatgatggcgcagaggtcgcgcgtggcgggagtgcacagcaccgtgccacggaaaccctccttatagatatagggaatcaaaccagaatggtcgatatgggcatgcgaaagaatcaggtagtcaatctcggcagggtcgaagccgaggtcgcggttcatggcatcggtctccagacccttgccttggtacatgccgcagtcgagcaaaatattcaatccctttttcgttgtgataaggtgcttgctgccggtcacttctctggcggcacccatgaatttcagtttcatacctatggtgtatttctatgtttcaactcaataataatcatttccatacagcctcacaccccgttctggacgggagactataacaaagcaaagatacactttttttttcaaattgaaacaatccgctcatccctccggagcgtgagaaaactcgttcaatagaaaaaaatgcgtatttttgtaatgacgaatggggagcggaattccgcacaacccactatatattagcaaataatactaacacaatatggcactgaaaagagtaatggtactgactgggggcggcgactgccccggtctcaacgccgtcatccgcggcatcgtaaaacgggcctcccaagagaaagactgggaggtgataggctgcatcgagtccttcaacggtgtgctgcgcgagcccaccgagattgtcgaactgaacgagaaagctgtggagggtctccagatacaggggggcaccatcctcggcaccaccaacaagggaggcccattctcctggcctgtgcgtaacagcgatggcacctggaccaccgtcgaccgcagcgacgagatgattcgcaaactgcaatacctcggtgtcgatgccgtcatcaacatcggtggcgatggctcccaacgcatttccctgggtctggctaaaaaaggcctcaacatcgtgggcgtacccaaaaccatcgacaacgacctctcctccaccgactacaccttcggtttccagaccgccgtgcagatatgcaccgaggccatcgacaaactcgtcaccactgccgccagccacaaccgcgtcttcatcatggaagtcatgggtcgtgatgccggatggatagccctccacagcgccattgccggcggtgccgacgtctgccttattcccgaaataccctacgacatcaacaagataaaagagaaaatagagcaacgctacaacaaacgccgtggctactgcatcatcgtggttgccgaaggtgccaagtccaaagatggcaccaccgttggcaccgagagtaccgaagtgggttaccagcacatccgccttggcggcataggccaccagttggctgccgacctcaaagccgccggcgttgagcacgacatccgctgcaccatcctcggccatctgcaacgcggcggcacccccgtcgccttcgaccgtatcctggcctcccaattcggtgtccgtgccatggaggaggtcatccgcggcaactacggccagatggtagcctaccgccaccccgacattgtcgccgtgcccctcgaagaggccgtccgcgcccagaacctcgtcgaccccaacggcagccttgtccacaccgccaaaggactcggcatcgagttcgggcagagcgacccctgctgatacattattattcacacaacgaatactcattgaagataatatcatgaaaacaatgaaactcatccttgccgcgaccatcgtggcactgaccgcagccagttgctgcaacaagagcgaagcccccaagacgctggtcctctattattcactgacaagcaacaccaaagccgtggccgaagagatagccaaccgcctcggtgccgacatcgaggagattgtctgcgtcaacccttacgacaccaatttccaagcctgcatccaacgttgcatgcaggaacgtgagcaaggtgtaacccccgacatccagcccgtaaaagccgacctcagccagtacgacatcatcttcatcggctatcctgtctggttcggcacctatgcaccgcccgtcgccaaattcctcaacaatgttgacctcagcggcaagaaaatagtccccttttgcacctttggcagtggtggactggaatcaagcattgccgacctcaaaaccgaagaacccgatgccgaaatcctgcccggctacggtgtccgtgccgcccgtatggatgccatgcccaaggaggtggagcgattcctgattgccagaggcttcatcgaaggcgaatacacaccgcttgcggacttccccgagcagcatgaagtgtccgccgaagaggctgccatcttcgacgctgccgtcgacggctatcccatgattcacgcccaagccgtcaccgtagcctcccgtgccctgcccaatggcaccgaatacctcttcaccgccgaagaccttccccgcgaggataagcccgacatgccccctgccggcaagatgcaggtctatgtcaccgttgccaacggccaagctcccgtcttcaccaaagtaatccgataaaagacatccttatcatccctttcgcgggctgcctgtgagcagcccgcgatttcatttttaaaaaaaagaaaaaaaatcattaactttgcactttcaaagattggccatggattagaataatatcatggtatatcattaagattaaacgaattgaatacaacatctatttttttgcatacaaggctaatcatctttattatattaaaaaaagaggggaaaaaacatatcataataaatcaataattaataaacacaaaaaaatgcataacaacaagaaaagggagtatacctctcccgaaatggaaatcctgaacgcccgcgttgagcgcggctttgaagcaagtgcagtaaccgacaacacgcccagaggcaacggcaacgagttggtcggagacagcggcaacaattacaacaacgctattttcagttgattaaatcgcaagaaaaatgaagagaatagcagtatcgtttttgtcgcttttgaccattgcaggaattgtgagctcctgccagaaagaccaacatgccggtaacggcagcaagtttaccgccaccatggagtcctgcacttccagccaaggaaagactgtgctggacggcagcatgcttaattgggttgacggagaccaaatcaaagtgttcggttccagtaatgccgaaggtgtctatgccgctgttgccggtaccgatgacgccaccaccgccacattcgagaatgtagaaggcgatgccggttcacccgtgttccacgccatctatcccgcttctgtggccatgaccgccaccagtgtaaccctgcccgccgagcaggtgactgtcgatggttcattgaccggtttccccatgtacgccacctcggagaacaactctctccaattccagaacctgtgcggtatcctgaaattccgcctcaccaagagcgatgtaagcatcagcagcatcagtgtcaccaccaccgacgccaccaacggcaacttcactgtgtcatacgacacagagaacaagcccgtcctgaccagcaccggctcggcaaccaaatacaccacaacgctgacctgcaccacacctcaggacatcaccaacggcgtcgacttctatatgtatctgccccaaggcaactactacggcatggagattgtcttcaccacatccaccggactgacttgcactaagacagtgtcggccgaaaaccacatcgacatagtgcgtagccaatacagcaccctcaccctttcgggaaccaacctcgactttgtgccagacggtacactgagcggactcttcaccattaacagcaacggcgacaaagtccgctttgccaagggaaacctgcagtaccagcccagcaccgatacctggcgctttgctgaacaccagtatgattacattgcgcaatgcaaccagtctgtcgaccccaccacctacaccggttggctcgacatgttcctctgtggtacgggcgacgacatgagtgccacctccgcaacagccacaagcgcagattttaccgattggggttcctatcccatcagcaacggcggtgaaacaggcggactgtggcgcaccctgacatacaatgaatggtactatatttttgtgaacagccgtggtaattcagtgggatcttccggatttccttttggtcctggaaaagtgaatggaattaaagggattattcttttgcccgattcatttgtgacacccgatggcatagatttcacagcattcacgataagtaatagtgaaggctggaacacaaatgtttatacctctgaagaatggactgccatggaggatgccggagcagtgttccttcctgcagcagggtgctacctctccaccaccctcacccacgagcaagtgaaaggatattattggtctaaatctcgagcaatctccagaattcctcaattcgctttcttttccgaccatgatggtttcttttatcctctcgactggaaaagaaaatatccaaacaccctccactattcctgctcagtccgattggtttgcgaacagcaataggcagaataatcattcaaccccaaaaggagtccttgccaatatgcagggactcctttttctttgctgccggtcattattgccccataaaccatatatcccttctg

SEQ ID NO: 4001 - DNA, 24206 bp, synthetic construct
  source 1..24206: mol_type = other DNA
  misc_feature 1..24206: note = Synthetic
ttgtgccgttttgaacgctaacaaaacgtcttccttgaatgatgaagttactaccagcgcgggcacgggtgtcgaatcgacgcaggcaaacacatattctatgtatgcggtggatggtacggtttatgtaagcggcgaatatgaaagtctgagtgtttatactttgcagggtatgccagtcagaaacaacagtctgatgcccggtatctatattgtcaaagtgaaagacgctaatcataaagaatatgtagggaaagtacttgtgcaataaataaattactttctttttaggcggagtaagggaatgtacggttttacggaaccacacattccctttttatatagcctgttccccatcttatttatctgctttttctttaatgaccaataattgtaatcaaaggagcaatatttccacatgttataatccataatacagtttctttgcatcatcgaaagcctaagttaatattaaagattataattatgaaaaagaaattgtttactttattgcttctcgttactgttttggtaggcgggattagtgcacaaacttatcatccaatttcaggtagcgagaaagtatcgtgtagtgaagcaaatatagctgcgaatgattggataacttatgaagcagccaagtatagttctagagacaaatgtgctggcgttgctgaaagcattcctaatttgtcctcagcagatagagttgttgttttttacattgaaggttgtgaaagctttgatgttgttgctgatgggaataaagctcctcgaaatttagagataaaagttaatggtgttgttgttgaaaatgaagtttgggcgaacggatgtactacccatgaaggattaaaaacgaatacaacaggacagtgcaaagttgaaattgcaggcgtaaatggctctgtatatctttcttctgttatatttcatgctccttccggtcccagcgacaatgctactctctcctctattaagataggaggagaagaagctacattgaacgagactacatattcgtatgaactccctgcaagctatgagggcgagacagcatctgtagatattacgcctgccagcgataaagctgttgttacggtaagtacggatgcaactcctaatacaactgccggagtctatacggctaccgtggctatcggaacgcctgttactgtttctgttacggctgaggcaggcaacatttccgaatatacattatcattgactaaggcggtaacaaagagttcggacacctcgttgagcgctcttaccgtagacggacaagctgccatgcttattgagggtgaaaccggtaaatatactttcgacatcccgtatgcttatgacggtgcattggagattatcgctactccgacggacaacctttccacggtttccgaaatcacggctcctacggttgcagccggtacgtcggtagatgtgaagtttactgtgactgccgaagatgaatcgactcaggaatatactttgactatcactcgtgctgccgcatcgactgaatgcacgctgaagagtttttcaatcaacggttttgccggaacgatagatgaaacggcaaagacagtcgaagtaaaggtggttaaggactatgatttctctcatactccggtgatgaatatttctgctttggcaactgctgcttgggataaagaagctatgaaagtgacggtgactgccgaggatggcgtagccgctaccgaatatactgttagtcctgctgccgaaaatatacaaccgtttgcggcaagtgcttatccttatgaactgtcgtttgccgccgctacttataccgaacatgtcgaatggatctacggcgcaccgtataatgcaaatcaaaaagacccgaccaatactgaagcagtcggttgctatgaattggcaagcgaatcggcagaagggaatattgcaaaaggaatcaatgctttgaatatttatttggcaaaatgcggtacgttgaccttaaaggttgcggctaccgggggaagaaaccttgttgcaacagtaaacggcaatcaatgcgggagcttggtaattgattcgaataataaaggtaagtattgcgacttggtttgcaaggtggatagcgatgagcctgtagtggtcacggtaactgcaaccggctcgaacggtggaactcgtgtttacggcatgaatgtgacagaaccgataggcttgtgcattggctcgcaagcaacggacggtatgaatatctacgctacggacggaacgctttatatttcctccacagaaacaaagatagttaatatttacggtatcgacgggcgtttggtaaaaacggtcgaactgaatgaaggtatgaatacgatagatggcttggttgccggaatctatttggtgaataatcaaaaggtcgtgattaataaatagaagttgatgtttgttaagtgaaagggtcttccttcgtgagaagggagacttttttgttatctatccgatcttatagaaataccttatcaagtactgcatcaaacgggtagggaggaaacgacagcacttggcaatcaggacttgttgtgccggacctaccagcgtacgaaatggcggtcggtcacttttaattaaccggttgacggcatatcctaatttctccggtcggcagcctttctgttccgtctgctcgattatctttaaagtttgcccgaaagttttttcatagtcggtgtcttgcaaggtggcagcagagatatttcggttcatggtaaagttcgtgtgaaaatctcccggttctacgatgcatacgtggatgtgaaacggatgcagttccagcgccaatgcttcgctataaccttcgacggcaaacttcgaagcgcaataaaacccttggaaaggaacggctatccttccgcctatggaacttatgttgatgattttcccgcttcttgctttgcgcatgtgcggcaaaacggcactgcacacccgcaccatgccgccgaagttcgtattcatttgcaagttgatttcttcttctgtggcgagttccgctgctccgcttattcccatgcctgcgttgttgacgagcacgtcgattcttccttgttctgccaagatggtgtctactgcccgtttgatggacgccggctgcgtaacgtccatcaccagcattcgtattttgtcggaatctccgactggtcgccggcttgtcccgtaaaccgtatatccttgttctcccagcatcgttgcgataacttttccgaacccggacgatgctcctgtcacgaagatgactttttcttccatttctgaatatcaataggtgatcgattcaaaggtacgtcttatttatgctttcttacttctatcccctgtcttttttgaataatattccttttcgaccgggtgaattttcctttttagccttatataaaacccgtttctcctttaatagttctataaataaaagttttatttgtaaaaacaaaagttttatttatacatctaaaacttttagatataaaaacaaaacctttatttatagaatttagcctttaaaaaaggaatttgtataaggctgaaaaggaaaatggataaggctgtggagaaattcgagcacttgcagtcggctcaaacggcggaacccgtatttacggcatgctttatatctcttcgacagaggtaaaaactattaatatttatggtatagacggacgtttggtaaaaactaccgaactgaataaaggcgtgaacaccataaacggtttagctaccggtatatatctgataataatgaccaatatttgcaattaaaggagcaatatttgcacatattataacccgcaatatagtttctttgtgctatcgaaagttaatattaaaattataattatgaaaaagaaattatttacgttattttccttattaatggtttttgtttgcggaataaaagggcagacagagattataattgattttagtaaaggtacagtttccggtaatgtttggactgggctcgcgggaactgatgttgaaggatatgtattaacatgttcaaacactactaaaacagtatctaaaggtgtgaacgttgatgggcatactgtcattaaattttctaatggtgctcaatatagcttaacattgcctgcatctgtgtcggtatccaaaataaagtttgttgcatatgctaatgctacgattaattcttacttgtttgaactgaatgggacacaatatgcaacaacagattatatttttcctgctaaaggaacagcaggggtaccagcaacggcaacccatgaaattgaatttggatctttagttaataataatataacttttacttttaaaggaaaagaatcagcaggttatattgttttaactctaagtccttccggttccaatggactgactcttgaagatgaaaccgcccataatctaatctttacaggtgcatgggatgctgcgaagtttacggaacttgtttccggtaaagaggtatggagcgtaaacttgacaggtgttacaaatataacaggtaataagccgacagatatttctaatcccaactgtttgtattatgtaacaggagatctttgggagaatgaagtaaatgttgtgaatgacgatgcaaagactgctaaaagcattagtctggcggatggtgcgaataatccattctataatagagtaggtttcactgcaacagcagccacctacacccgcacgttcacagcagccggaacttattccgtatgtctaccttttgccgttgctagcataccaacggaagtgaccgtgcttgaatataagggaagcaacggggctaaagtcaacttcagtccggtctctgctatggctgccaataccccgtaccttgtggaagtaagcgcagataatattaataaggaaattaagtttgaagctgcaaataccacagtggaggcttcggtctcggtgtctgtggcggatgaggtaaacaatgcttatagtttcaatagcaactttgaaccgttcaccaccacggcagagcaaggtctctacctgttggaggcaggaggtacaggatttgtgaaagcgggtacggcaagtgtaggttcattccgtgcatacatcgctccggtgtctaatgaactcgccaaagcacctcgtttggtgattggtaacgatgaaggcggcgcaacaggtatcgatgcatcccaagcggtctccggtgaattgtcggtttattcggaaggcggtgtgttagagctaaactctccggtgtcacaatgtgtgaaggtatatggcgtggacggacgtttggttcgcgtgcttcaattgagcgaaggcagcaatgtcgtgtccgggcttgctaaaggaatgtatgtaattgcaaaccggaaagtcgtggtaaagtaatttaattgattaatctataaaataaataagaaaatgaagacagcatatattaaacccgagatggaagtaattgaaatggaattggcaaacaacatcatgaaaggctcggacaataattatgatttgagcggtgaaggcgattataacggacctgccggcgcaaagcgcaaaagcttttggctcggcgaagattaattaaggaatagttcattgtatatagtttaagttggagaagggtgtcgcacgtggcattcttcttcaacttctttctttccggattgttatctgtgtatgtggaaactgaaggaattgaaagatttaagcaactggcgtatctggaaacttaagctggtcgatgcacgcctctattttgtcagtatctttgtcggattgttcaccggcttggttgctgttccttaccattatctcttacaacaattctttgagatccgtaaagacttcttcggttcgcatccccattggtattggcatattcctgtctttctgtcgttgtgggtagtgttgatactggttgcttggatggtaaaacgcctgccgttgattaccggagggggtatcccgcagacacgcggggttattaacgggcgggtgacttataaacatccgtttatcgctatggttgccaagttctgcggaggcgtaatgaccttaagtgccgggttgtcgttggggcgggaaggaccttccgtacaaatcggctcgtatgtaggggaactggtttccaagtgggggaaagtgctttccggcgagcgcaaacagttgcttgcagcaggggcgggagccggacttgcggctgccttctcggctcctttgtcttcttccctgttggttatcgaatctatcgaacggttcgatgcgccgaagacggcaattactaccctgcttgccggagtggtggcgggaggcataggcagcttgatattcgttaacaatccttatcatcaaatagatgcgatcgctccttcactctctttcggggcgatggcgaaactctttctgctgttggcagtggttatttccgtattcggcaaaatctattccgtaatcaccttcggggtgaaaaagctgtatatgaagatccatcgcccgacgtacctgagaatgctttatttactgatagcggcatacgccatttcgctgacggaagtagaccttaccggcgggggagaacaatttttattgtcgcaagcggtcttcggcagcaatcagatttactggctgacagggatgatgcttttgcattttgtcttttccgcttattcgtttgcttcgggattgccgggcggtagctttattccgactttggtaacaggcgggttgtttggtcgtattgtcgctttgatactgatacaacacggtgttatcggttacgaaagcatcagttatgtgatgctcatcagcatgtcggcatttctggtggcagtggtgcgcaccccgttgactgctattgtgctgatcacggagattacgggacacttcgaagtcttttacccgtcggtggttgtcggcggactaacgtattactttacggaactgttgcagatcaagccgtttaatgtcgagttgtataacgatatgataaataccccgacattccgtgcccagaaaagatacacgttatcggtcgaagtgatgaacggttcttatttcgacggcaagcaggtaaatacgctgcaacttcccgaccattgcatcattgtggcgattcatcgcgaccggaaagacctcgttccggcaggacagacgctcataccgggcgaccaagtacaaatagaaatggatgctcaggacattgagaaactctacgagccgttggtcagcatggcaaatatttattaagcgttttatctttttcattttagtatctgaaagctgactggtaaaaggtaatgaaataatatatctacgatgaatgtccgaaagaaaatttgtacttgtaatctaaattacgctttatgttgggaaatacttttaattttgcggaaaattaagtgctatgaagatatctgaattgatggatacactcttgccttcccgtggatggaaggtgtttgccgttattgtctgtggcatagtggtcggaggcggagaagcgaaggctaacggacgcattgcaaagctctaagcggatatgtggggcagaccgtggagatataaagaggggataatcattggcggcggtttgcttgtgacgggattcctgttgcaggcaaccgtcggcaagatcgagtgggagtggacagcctttccggtcaacatcgtggtactggtgttgttccttgtcctgctgggcgtgatgcatgttttgcgtcgtagagtgtatgtgttcggttggttaagccattacgccgccgcagtttcatcgctcggttgggtggtaggaatgaccgtcgtgatggggttgattaagcagctcccgtcttatcatgaaacagacggcatcgagagtttgtcgggcttttcacaaatgctttcctcatggtcttttgtcctgttgtatgtttggctggctgtagttttggggttaaccatccttcgtgcaggttttccattccgttggcgcaaagttcctttcctgttgaaccatctcggactgttcatagctttgattgccgccacattagggaatagcgacatgcaacggttgcgtatgacgactcaaatagggaatgccgaatggcgtgcacagacacaggagggaacgccgaaaatgcttgaactgcctttggctgtcgaactgaataatttcacgattgacgagtatccgcctaaactgatgctgatagataatgctacaggcaaggcattgcctgaaggcaagcctgaccatctgttgttggaagaaggcgtgaaggaaggcaagttgcaggattgggaactgactgtcacgcaatccattcccgaggcggcttcggtggcgacggaagatacgcttcgtttcaccgagttccgttcgatgggagctacgtacgccgtctatttgaaagcaataaatacctctacgaaacaggtaaaacaaggttgggtaagttgcgggagctttatgtttccttatagggcattgcggttgaacgaggaagtcagtctggtgatgcccgaacacgagccgcgccgttttgcttcggacgttacggtgtataccgaaagcggtaagaaagaacaagcaacgatagaagtcaataagccgatggaaatagaaggctggaagatttaccaactgagctacgatgagacgaaagggcgatggagcgatatcagcgtctttgaactggtacgtgacccgtggttactctatgtatatataggtataggaatgatgattctcggggcaatctgcctgtttgcacttgcaccgacgagcaaaagaaaggaggaacaagcatgagctgggattactttgcagcatttgccatagcttcgctccacttctggggattcggggcggcggcagcatggcggggcaaacgcccggcatgggtttgcggtcttactttgaccgggctgttcattttctttcttttcatcgtgttgatgtgggtttccttggaacgtccgcctatgcgtacaatgggggagacgcgtctgtggtattcattcttccttcccttggcagggttgattacttatatccggtggagatataaatggatattgagttttagtttcatcctttctttggtctttatctgcatcaacttgttcaagccggagatccacaacaagacgctgatgccggcattacaaagtccttggtttgccccgcatgtgattgtttacatgtttgcatacgccatgctgggagcggctgcggtcatggcgatctaccttttatggcggaagaagatgccggagaagcgagaaatgcaactatgcgataatctggtctatgtcggtctggcattcatgacgctagggatgttgttcggcgcagtgtgggcgaaagaagcatgggggcactattgggcttgggacccgaaagagacatgggctgccgctacatggttcggctatcttgcttatatgcatttccgtctcgatcgtcctttcgcttatcgtcgggcgttggtcattatgttggtggcattcgtcttgctccagatgtgctggtatggcattaactatctaccttcggcacaaggggtcagtgtgcatacgtataatcttaactaattttctatgcttcttcgcgagtgtatggcatacatgctcccggtctgtgggacaaccgtatcggggtgacatataaagccatcggtggcaagagagaagttcggctttgtgaaatggtaggctgaactttcatatagatagaggaaaacttgatttggcggtaatggcttacctgatagtttgtcttccgccaaataaggacgggttatcacagggcgcaagaaataattcccttttaattagtattgtttttaaaagaaatatatctttggaaaaattaaagctattacggaaaatagaaatcccacggaagtacgcgggattaagatatcttcggcttatagccttattgtgaaaagtctttcacaatagtatcttgctacaaagataggataaattagaatataaacactataaaagtggaaataaaatgagaaaaacattaggtatagatttaggaactaattcgataggtctttgcctacgtgatgaagataagggaatatatttacggaaccaattggatttctttacttcggtgatctttaaatccggcgtaggaaggaataaaaccggggaattttcctatgcagctaagcggacggaaagacgtacgtcgcgcaggaggtatcaagcacgtagatatcgtatctggaatacattagaggtacttatagaatatggtttctgtcctttgtcaaaagaagatttggagaagtggagcagatatgatttggcgaagggattaaaacgccaatatccggtggaagctaaagagtttgagcaatggatacggttggattttaatggcgatggtgttgccgattattcaagtccttaccagttgcgtgcggaattaatgaccacccgactggatttcacaaataagacggagcgttttaaactgggacgcgctttatatcatatagcacaacgccggggttttaagagcagtaagggagaaacgattaaggaacaggaaacagaccggaatactcttgaagacgatgccggcatggatattcttgtcgaattaaaagaatcggaagagaagaagtctaaaaatttggtggaatacatgcaagaacataatctgccgactgtaggttgtgcgtatgctcatttggaaaaggaaggagtccggattcgcaacagtgaatatcaagccgtgcgttcacaatacaaagaggaagttcaaaagatttttgaatatcaaacgggtttggatggtgagagggagttttgccgtagaatcctcagtgagaaaaaagatgagggaacaatcttttatacacgacctttgcagcgcaaaaaggatacggtcggaaaatgtatattcgagcctgctaagtatcgttgtcccaagagtcatcctcaatatgaaatctttcgtgcttggcaagttatcaatgatatacaatatcgttttaatacccatgaagaatggcaaactttgccgatggggttaaaacggaagttgttggataataagtttatgagaacaacttcctactttaggtttggagaaatccgaaaatggttgtcgaaagaattaaagtttgcattttcatacgaagatgaaacgatgaaatgcgaagatgacacgaatgtgtacggatgtcctgtttgcggaagacttaaagaaatactgggaggagattggcaaagcacgatattgaatgtgacccggactaatccgaagaatcatgtggaataccctacgaagtatgattatgaggatttgtggcatatttgtttttcattcgaggatgttgaatatgtagaagaatttgcccggcaagaactacatttcaatgaatctcaagtacaacaattcgtccgcatgtggggtgccatgccttccgattacagtatggttagtttaaaagctattagaaatataaattattttctgcagcaaggatttatttatacctatgctgtgttgttagctaagcttccggagattttcaaagaaagatggaaagaggaggaacatgccataacaaaggatatcgataatttggtaaaagagaatagaacccaaaagtctatattaaatcttgccaatactttaatagctaactataaatcccttgatgtacgagagcagttcgcttttagaaatatggcatataaacttgatgccgatgatttgagagacgtggaaaatgtgattgttgctgctgttggagcgaacaggtggaagaagaaaacaaaggaagaacagcagtatttattggatgccgtttctgctaagtatcaacacttttttgcaacaccggaacgggactattataaactacccaaactaacagattccttagccgattatttgaagcaacggtattcattcttgacggaaaaggatttaaataagatttatgttccttctccgacaaaattatatccttctgctaaggaacaggaattagacgatggcagggaaatgagattactgggaagccctgtcattggggcattaaaaaatccggtagttatgcgcggtcttcacgttcttcgtaatcaaattaatacgttgcttatcgatggagtcattgatgaagatacgcgtattgtggtagaaacagccaaagacgtgaacgatgccaatatgcgatgggcaatagaggcttaccaacgtatacgggaagctgaaaataaagagtttgagaaagtgataaaagaacattttcctgacaggatcattacagaggatgatatagataaaactcgcttattgctggaacagcacgatatcccggagatagaaaaggaaataaagcaagaagaggtggagaaaaaaaagaagagggagataaaatttgaattatttagaaaggatatagcaaaatatcgtttatggttaaaggaaggtggcagatgtgtttatacgggtaaaaatatacagatggatacattgtttgtggggaacaatgtagattttgagcatactattcctcgcagtatgtcttttgataattcgttgtcgaatttgacggtttgtgatgcccgctttaatcgtaacgacaaaaagaaccggataccgtcgcaattattaaactatgatgaaattttgcaacggatacagccttgggtcgagaaagtggaaaagttgaagggaaacgtaagtttttggggagaacaggcgaaacgcgcccaagataaaccccgcaagggttactgcatgcgacaaaagcatttatggaggatggaatgggattactggcagaaaaaagtggatgcctttactaggacggaagtaacaagcggattccgcaatagccaattgaacgatacacgcattattactaaatacgcttaccactatttgcgctccttgtttaatagagtggaagtgcagaaaggtcaatatatgtcggattttcgtaagatgctcggcattcaaggcatatatagaaagaaaaacagggataagcatgctcaccatgccatcgatgctgctatgttgacacttattcccgtggcggctaaacgggaacgaatgatggagctattttacaagattgaagaagaaaaacgattagggaataatgatatttccatgttggtttggcaattagagaaagaacgtaaggaatgcggttttaagaatgcggcaggtattgatgaatttatcgaaaataatattattgttaatcatatatccaaagataatgctttgactcctgctaagcgaaaaggaagcaggcaaggcaaggagatatggatgaagggagatagtatccggggacaactgcatggcgaaacttattatggcgcgatcactcaggctcaaaaagatgcgaatggaaaaattatccgggatggcaaggggaagatgtgtatcgatgaacaggtgcgttattatgtcgctaggaaggaattgaaatttaaaaaaggcgataatgattccgggtttaaagattgggaggagttggaaaaagccattgtagaccaatctctgctgacgaagatgaaacaacagtttcctctcggaacttcatttaaggaagctgcggaacaaggcatttttatgctgaatcggcatggggacaaggtaaatagaatcaggcatatacgctgttatgctcatcatgtgaaaaagccgttgaagataaaacggcatacttatttgtcggataaggaatacaagcaatactattatgcggagatgggcgaattgtatgggatgtgtaaatatgaaagtgcggatacgatgaaacatgaatataaggtttggtcactattcgacatttccgaacatcggaaagccaaattaaaggatattcccgatagtatcgtttcccgcaaaggagaaccgatgatgttagtggaacaattgaaggcaggcgatatgctgctcatttatgaggagaacaaagacgaattgcaaaaaatggatagcagccggttagcagaacgattgtatgtgatagaaggatttgagagtgatgggaaacgtataaagctgaaaaaagcactccatgcaaaacgaaaaacaggcaatggagtctccataaaagattttgatgcaatgcctgatcaaatacggtgtgggatagcgacattaaattatatggtgaggggcaaagactttactatcgaaagaggaaagataaggtttcccgaataatattaggattggacggctttcataatagtatcttaaaaccatgggaaacaactgtaaaggcggtgaaaatggaaacgccgtgttgtgttcggctttcataatagtatcttaaaaccatgggaaacaacattataaacgcgtcgttgtcatcgactgggttgtgttcggctttcataatagtatcttaaaaccatgggaaacaactatctggtgaacgatgcacagctgcacgagttgtgttcggctttcataatagtatcttaaaaccatgggaaacaactaacttgtattgggaacttttatttcccggttgtgttcggctttcataatagtatcttaaaaccatgggaaacaacagatattgcatgaatcgttgttatctaataatttacaaagccacttagaaaagaaaaagaaagttgtttccagtaaagaatcccgtagtagtacgggattctttagtttacttccttcttaaaagaaggaaattatcacaaaacaccctactcctgtaatgtagtcaaaaaagccttcactgctttcaacccttccacatcgccctgcttatcggcatttagggtgaatgcctaacactttttaagagttcacagctttcaccggtattgggcgtagatgatacgcgtccaaaaatatgccgatccgtagttttccggatagcaatccgtgccggatgtaacagccatcatttattgttcaatattcatgagttcttgttaaaatatagaataatttatctcttgatagctgccaaccatgcgtttgacagttgtcaaacatgttcttggcaattatcaaacatatgtttgacagctgtcaaaagataaattagtatggattaaaatgcaaacttatataatgccaagcaggatactttacgcaagccgggcaatgaactgatttaatactcggattgtttgtaaatgggctgatttccctgtactttatattatatataaataaagcatacagggaaataatttcgtgtgtgcaagcgcgacctttgcgttttatttttacctttgcattcggaagtgaggagaaatacactttccacgttaaaaacgtacatatattgggatagaaaatctgacacattctttacgatccaataatatgccacgtttgcacctgatgtatatgctcacaagtatatcctcagattggtgcgaacttgactattatgatcgtagggctttgtcagagccttctatccgttaatagaagagtctcgcaccttctttttataaagaagggggtgcataaaaatatattaaaatgaaaacacctgacagccgccttcttaaaaaggtttacgatttactggaatttccgcaaaataattatgagatgcggttaacattgcgatctgtagaaaaacagcttcacttgaaagtctattctcaaaaagtcgtgtttaggaggataggcattttcttttcggttcccgtcctttatactcatcttcatagcacgttggtttacaaaggattcctgtacatctactgcgggaacggcgatttgtatatgtgggatttaaacggcgggaatcattttgtagagagagtgataaggtccgggctatggcgatatattacttttgtggtagaattggaaggcatcatctttcgggagaaattaagaaaggcactaagaagagctgaaatcttttccttttgcaaacgtcttgcccgtagggtaaacgagggtctgtctgcgagaacgagccatggaaagaaaagatataaatataaagtgaaaacaagtgtagataaggcagtattaagaggctccacttgggagggaccactaacagtttaccatacgttcaattttggaaattattatgattgcgatcatggtaattttggtgcacttcgcgctataaatgattgtagcgtaatgccccaagaagggatggatatatttcccccacagaatatagaaattatctccatcccgttgaaaggctgtctgacccatagaaattcggagaacgcccctgtcactctcaccttcggagacattgaggtgctgagtgccggacggggcagttttcatagcgactacaatgacagtaaaacggaagggctgcaatttttgcagatatgggtgtacccggaagttagagatacgccccccgaatatcatcgttacgatgtgcgtagtgtgttaaagaaaaatcgtttaggctttattattgctccgggcggcagtgcgcccgcttccatccggcaaaaagtctggttctcgatgggagagtttgatgcaggcgaaataatcgattataagatgcatgccggtgacaacggcgtatatatgttcgtgattagcggggaagtcggagtattgggaaaatctctgggtaaacgcgacggcatccgaatctgggataccgaaggatttcaggtgaacgttacgaaagaagcacatctcttactgatggaaatacctctttaaaatcctatttcccgtaaagtggattattcgtttccccaattcatcctttgataatccttgggacggtcggcaataagaagtcggtgaatgccgtgaacttttaaaaagtgtgaagcattcaccacgaatgccgataaacagggcgatgtagaagggttgaaagcagtgaaggcttttttgactacattacaggggtagggtgttttgtgataatttcctctccgttaagcatggagtaaactaaaaaatcccgtactactacgggattctttattggaaacaactttctcttttcttttctaattggttttgtaagccattggataacaacgattcatgcgatatctgttgttttccatggttttaagatactatctgaaagctattcacaacaatttatcgtaaatttccgttccctgcgttgttgtttcccatgattttaagatactatctgaaagctattcataacatcctagtttcgcttttgttacaaggattggttgtttccaataatttcaaagatactattatataaaagcaatccacaattatattccaccttcttaataaaaagaagatataactattgcgaagacaaagatactactctaaagtattcgatccaattattttcttttaaatattttgtctactaccgcttttttaattccaaactccaaacaaattacgtttattgccatgaagataaggaaagaggaagtatccatcaattcaatatctccattgtaaagtcggaagagcatgttgataaatatatataggatagtgagaaagaaagcattcctcatcgcctttatccggattctttctgtttccccgttctcgtttttggtataggcaagcagaatcatcaataacccgacaatcatgaagagttttattatctctttgcacaataataagttcccgtctgtgattattccgtacatcatgagtatgaacggagcgaagacggataatagaagtatggcataaccgagaaggcggcaatatacgggcaataaggctttcatgtgtgtttttatttgattaatattcgcaaaggtaattatttgtaagtaattaagtttaatgattttgcttttttatgtttttggcgtaagtttgcagaataaatgcagttgaaattatgaatagtcaagcagtagtcatttgcgatagtttgaaagacagcctatcccgcgtgttagcgaccgtttcctatgataaattatttgttcttgcagatgaacatacgcataagttttgtttgcctgtgttgcaagaaatgatgtccgggcggaatgcttatgtgattacgatcggtgcgggcgacgtgcataaagaaatagatacgctggtaaaagtctgggcagagctaagtaaccatgccgctacgcgtcactccctcctgattaatctcggcggaggaatggttaccgatttaggaggttttgcagcgtccacctttaaaagaggcattcaatacgtgaatattccgactacgttgttggcaatggtggatgcttcggtcggcgggaaaacgggtattaactttaacggcttgaagaatgagataggcgcttttgctcctgcgctttcggttttgatagaaaccggctttttacgcacattggatagggataacttcttttccggttatgcggaaatgctgaaacacggattgatcagtacgaccgggcactgggcggaattgctttccttcgacacggaaaatatagattataactctttgaagaccttggtaggcaagtccgtacaagtaaaggaaaatatcgtagcggaagacccttatgaaagaagcatccggaaagcattgaatctggggcatacggtagggcatgctttcgagagtttggcattggagcaaaaccgtccggtattgcatggctatgccgtagcgtggggaattgtctgcgagttatacttctctcatttaaaactgggatttcctaaagacaaattgcgtcaaaccgtgacctttatcaaagagaattacggaacgtttgttttcgattgccaagtgtatgaccggttatttgaactgatgacccacgataaaaagaatacggcaggcatcgtgaactttactttattgaaagaagtgggcgaggtggtcatcgatcagacggcaacgaaagacgaagtgttcgatatgttggatttctatagagaatgtatgggataagttaatgctaagctaatatgaacaaacaaataatattcggattaataattgcggtctgcgggttgttttcttgcagtgccgataaaaacaaaagaaacagtaaaatggaaaatcaaaaagaaacattcgtccgcatcgaaaccgggatgggcgatattaaagtgaaattgtataatgagactcctaagcatcgggataattttattaagttggcaaaagagggagttctggacggtacgctttttcatagagtcattaaagacttcatgattcagggcggtgatcctgattcgaaaaatgctccggcggggaaacaactgggagcgggcgatgtgggatataccttgccggcggagtttgtttatccgaaattgtttcacaagaaaggagcgttggctgccgcccgtcagggagatcaagttaatccccggaaagaatcgtcgggatgccagttctatatcgttacggggaaagtctattcgaagactgagatgctgggaatggaagagcaaataaataggagtcgtttgaatgccgttttcaataaattggctcagaagaacatgaaagaaatctatcggctgcggaaggcaaacgacgaggacgggctttatgaccttcaggaacgtttgcttgtcgaagctcaggcggaagtcgacagcttgccggagtttaaatttacgccggaacaagtcaaggcatatacgaccgtgggcggcacgccgcatttggatggggaatataccgtgttcggagaagtggtggaaggcatggatgtggtcgatgcgatacaaaaagtgaaaaccgaacgcggcgaccgtccggtggaagatataaaaatgaaagtttccgtaatcgagtaaatatgatagaagtcaatcggcacgtgctttccaacgggctgcgtatagtacatagtaaagatacggatacgcagatggtagctcttaatttgttgtatgatgtaggggcgcgtgacgaacatcccgaacatacgggttttgcccaccttttcgaacacttgatgttcggaggttcgataaatataccggattatgacgctccgttgcaatatgcagggggagaaaataatgcatggacaaacaacgatataacgaattattatataaccgttccccgccagaacgtagagactgctttttggttggaatcggaccgtatgttaagccttgcttttacgcctaaaagtctggaagtccagaagcaggtagtatcggaagaatttaaacagcggtatttgaaccagccctacggggatatgggacatctgatccgctctatggcatataaggttcatccttaccagtggactactatcggtaaagagttgtcgcatataagcaatgcgacgttggaggaggtaaaagatttcttttttcgtttctacgctcccaataatgctatcttggcggtgaccggcaatatagatatgcaagaggtcgtcaggctggcggagaaatggttcggcacgatagaaaggagagaagtaaaagtccgcaatctgccgaaagaacccgagcaacaagaagaacggcggttggtcgtggaacgcgctgtgccttccgacgctttatatctggcttttcacatgccggaacgttcccatccggattattatatttacgatatgctgtccgatgtgctttccaacggtcgttcgagccgtttcacgcaacgccttgtgaaggaaacgaatacgttttccggcgtggaggcgtatgtatcggggagcatagatgcaggtctgtttcatattacggggaaactagttcccggcgtttcgcttgaagaagcggaaagagctgtctggcaagaactggaacggctgaaacgggagccggtaggagataccgaactggagaaagtgaagaataaatatgaaagcaatcaggtcttcggtaatatgaattatttggacttggctgcaaatctggcattcttcgagttgatagggcgggcggaggatgtgaatgcggaagtggagaaataccgtgcggtcggtgcggaacaaatccggcgcattgccgaaagctgttttgtcccttccaattgcagcacattgcattataaagcaaagaagaatctatgagaaatcttttcttgagatataaggaacattaccgtgcattgatttatttggggattcctattgtcatcggtcaaatcgggattatcgtacttggctttgccgatacgttgatgatcggtcaccacagcaccaacgaacttgccgccgcttcctttgtcaataatatgtttaatctggtcattattttcagtaccggattctcttacgggcttactccgatcatagggagcctgtacgggcagaaggattggtttgctacagggcgcgtccttaagaacagcttggtggcgaatctacttgtcgccattgtccttaccttcgccatgaccattctttttttcaatatcgagcgattggggcagcctcaagaactgattcccctcatcaagccttattttatcgtattgctggtttcgctggtgttcgtcttattgtttaacggcttcaagcaatttgcagatggaataacggataccaagattgcgatgtggatattgcttgcgggaaatacgttgaacatactaggcaattatatcctcataaacggtaagttgggattccctgagttgggattggtgggcgcaggcatcagcacgctgttctcccgtgtggtcatggttctggtattcgcttatatcttctttttcagccggcgttatttacgcagccttgccggtttccgccgttccgtgttgaataagcgggacttccgtcatttgaaccggttagggtggcctattgcttttcagatgggaatggaaaccgcctcgttcagcttgagcgccatcatgatagggtggctggggacgatcgctttggcggcacatcagattatgcttgtcatttcccagatttgttttatgatgtactacggcatgggggcggcagtggcagtccgggtaagcaacttcaagggaaagggagatttattgaatgtgcgccgttccgcctatgcaggattccatcttataatggcaatggcggtgatgtcctcgttgcctatctttttattgcgtaattattggggcgggtggtttacggacagtgaggcggtaagcgtgatggtggcggctttgattgctcctttgcttatttaccagttcggcgatggcctgcagataactttcgctaacgccttgcgtggcatatccgatgtaaagccgatgatggcgatagcttttatttcctatttcattatttcattgccggtagggtatatctgcggctttgtattcaattgggggatcgtaggcgtatggatggctttcccgttcggtttgacaagtgcgggaatcatgtattattggcgtttcaggcaacagacaaaaggaggttgacggtatggcaggacagaaacagagtaaatcgataaaggcaaaagtagccggagggtattttttattaatatgccttctgttcttttcaatgtggctggtctatcaggaaacgaaggaacttgccgaacctgatgcttatgaagcggaactcgatgctaaacgtcagatgatgagcaatacgcttgccaagttatatcaggcggaagttatcggtcagtcgttaagcgtagggagattgaatgattatcctacgtataggagagcgatgcggaatgcgcttgcctccatcgattcgctgaagaccttggtgtccgactcggttcagatgcaacgcatcgacagtatctcgatgcttctcgagcggaaagggcaaaatatgttgagcttgttgcgggcgatgaatgacaccgctgccgtcggtatctaccggaaaaacatagaacagatcatctcccagcaggattccttgttgagcgaagaacgggtacagaagaaaatagtggtgaaagaacgctcttaccaagtgcccaagaagaagaaaggtttctttaaacgtcttgccgaagcatttgctcccggcaaacaagatacggcgacagtcaccgatacctcgcgtgaatatactaccgacacgttggtgcaggcatataatcctgccgacaccgtggcagtaatattaaggaatattcagatacagataagcgacaggcagcaggaacggtcggagcttttgcgcaacaaagcgaataatctccgttacaacgggcagatactgactacgaagattaatcagattttgcgtgattttgaagaggaggaagtaagccggtcgcttgccaaactggatcaggcgcgtaaggttcgccaacattccgtacgtactattgcgggtatagctatcgtttcagctttcttggcaattcttttcctcgttttgatttggcgcgatataaccggaagcaaccgttaccgaaaagaactggaggttgccaagcaacgggcggaagatttgcttgcatcccgcgagaagctgatgcttaccattacccacgatattaaagctcctatcggttccattatcggatatacggatttgctgatgcgcttgactacggaaaaccgccagaggttttatctgaacaatatgagggtttcatccgagcatctgttgaaattggtgggcaatctgctcgatttccataagctggattccaataaagtagagataaacagggtaactttcaatccgtatcagcttttcgatgaaatacgggtaagtttcgagcctttggcagagaagaagaatttgagattggtctatcggataacgccggagttgaacgggcggtttatcagcgacccgttccgcatccggcaagtgaccgacaatttattatccaatgccgtcaagtttacggaaaaaggcgatgtatgtcttgccgtctcttatcaggactcgcgcctgacgttgactgtgaaagataccggcaggggtatcccgcaggaagagaaggaaaagatatttcaggagtttacgcgcttgaagaacgcacagggcgaagaaggtttcggcttgggattgtcgatcgtgcagaaactggtggtcttgctggaaggcgatatagaggtggatagtgtgccgggcgaaggaagttcgttcacggttcggttgcctttgttccctgtggcgggtggcagtacggaaccggaggaaaaagagacggaagagattcccgtcccggcaaggaaacgccgcgtgttgctgatcgacgatgaccgcatccaattggaactgacggttgccatgctgaaacaactaggcgcggaggcagtgtgttgccaacatccggacgaactgtttgctta

SEQ ID NO: 4002 - DNA, 22903 bp, synthetic construct
  source 1..22903: mol_type = other DNA
  misc_feature 1..22903: note = Synthetic
tttcgccatgatggccagcttttcggggtcgtttttgtcgatctgcgacgactccacgatctgcagcgagcagttgccctcggcgtcgcgcacccagaaaggaccgccgccgggctcgccctcgttcttcaccataccgcagagacgcaccggacggttcatcagctcgtagagttcctctgcagtgggctgttccccgacggaaatcatcagtttcgattcggcaaagtccatgatttcgcacaacgtcatcggatccacctcgccagcttccaagattttaaggtattggaactgaatgctttgcagctgcgccaaataggccgctaacactttcttgtagatgacggtaggagctatgttctggtccttggtgacgttgtcgatgttcttcacgaagaggatgtcggcatcgcggttgttgacgttgtaaatgagcgcaccgtgtccgccgggacggaacagcagcttgccgttctcgtctcggaagggctcgttgtcggccgtggccgcgagcgtgtcggtggaggcagcctgcatggagaaggtgacgtggtatttcaccccgaaacgctcctcgtagatgggctggatttccgccactttcgccttgaagagctccagatggtgctcagagacggtgaaatgcaggtaggcgtcgatgccggaggtggcgtagagcgcggcctccacgaaatgttcctccagtgcggtgcggatttcgttgtcgtagcggtggaagagcagcagacctttgggcagattgccgtagttaagtccctctttttcaagaaggtattggataatcaggcggaagttgccttttttgatttcggcatcgaggtcgagctgtttgtcggccatcgccttcttgagtgcttcgtagaaagggtagcggggcagggtggcgaggaaggtcttcgccaactcctgctgcttgtcatcgagcttgtcgccgagcagggcgtagaggtccttgaacatgcgggatgcggcgcctgacgcgggcacgaacttctcgatcttcttgccctccatggcgtaggggtattcggcctctaattcagccacctggtcctcgtcgaggcgcaggatgccgtcatccacggtcgcaggacggtcgatgtcggcgaaggggaagcccttctcaaaattggcgaactgctgttccacctgcacggggtcgctcccgcgctgagtcataaaatctttatcttcaaacgtgaattccaattgcatatcgttgttttttttgatgcggcaaagatagtattttttaggcaatagtccatcaaaacttgagatgcaaattttgctatccaagctaccaaacgcccctacctcaagtcactcacagcaatcgcaacagggtaggagacaggcacttcctcctttgtggcgggttcccagcggggcatcgacagcacctgcttgcggacctcgttttggaagtcgaaatcctgggttgagccggttacgggcatgttggcgaaatccacgtccgacacgctgccgtcctcgttcaccacgaaggtgaccatcgcatcagccagcaactcgtcggacatgtacgtgctgtacgaacgcagccgttggcgtagccacagaacgggctgtcctaattcagcaggaaacatagctggcctcacgtatgagtcggaagtacgtattcttttaccgtccacaatagtctgttgaccgtcggaacggttgcccctgaccgtcatgaaatgtgcttcgtatgcctccctttgcatcgaggggtcggcgctttcgaaggcagaggtcggtgccggcactttaccgggtagtatggacggcgtatagcaggagctcatcacgacggacgacaacgcaatcccagctacagtaaccgcctttccgagggttttgcgtttgtggagctccttttcgaggtagcgcatctccgcttcgcagaaggggcaggtaccggaacactcgcccttgaatgtacactcgcgttgttccagcgggatgccgttctccgtggcgattctccgccgcacctccttcaaatactcgcatctgttcttgccggggttcataatggtgggattttgaatgattcggcaaagatacgattttttacgatgaaaattgatcgatgaaattaatcgatgaaattaatcgatgaaattaatcgatgaatattttcgatgaatattttcgatgaaaaacgatgaatggaatacggtacaatataccattcatcgtctttcatcgttattcatcgttattcatcgttattcatcgttcattcatcgtctttcatcgcaaaaaattgtatttttgccgcaaaataaaaaaatgaagaaggctcttttagccatattgattacgctaacggcgtgcacttttcttcacgcgcaaggggagggacagaaggctttgctgaacagagcctacaaatattattcggactcgcttctatgtcagtttttcgagaattgggctgaggaacttccttccaatgaggcaactgtgacgaatgacacgattaaggcggcctacgaagtcttcgaggcttttttctatgctatgttggcggaggaattggcagacagcaatgccgcttcaaggtatcaggaccaaccgttttttgctgttcagggcactctgacgaccctccgtgtggcgcagaccatcccatacacaccgcaggagattgactcctttttcgtcgaacaggttcatcagaacaaacccaaagaccagtgggagcaggaattggcaaaacttcatgacgatgaatggtactttcccagatatgatggaattggggcacatccacgttatttgattgttcccacaaccttggttgactccactttggacttccgtcctttcgtctgttttggcgacaagcaggtgttgtatctgacaaaaggatatcgggacatgttaggggaatttgtcggtgagcgaacaacaatcgactatagagaggaggctattctggagtattcaagaaagtcgaatacacctactaaacgggcctatttcctcagcgcgatgcttccagtggaaggatattatagtggccgttattggcgttttacgacaggcccaagtatcaactacattgtgctggactccaatttacaacgcgccgtggtgtcttacgctttgaaacacgctttcctccaaacaattatggaaaaacacgacggagaatgggtcattcttacacatcagtgcctcggtatcgaataacacgaattatattattccattgtttttagaattattccgctgcataaatatactttttgccgataccggcaacgattggtttcaggtttcatgtttcaagtgattccgatcaacgactacctgaaacctaaacctcttcaatctccatcattccgttgactttcatggtggatatgttgcctgttttggcgaaatctgcccagattcggcgtagcggtttgccgtgctcgaggaattcgcgttcggaaagcccttgcgccatcaaagtgccttccacccccttaccgccgaacagaagtgcaagctcggtgatatgaccggcaccaatcacgtgttggtttttgcgccaaaaataggaatacagatggactttcccgccacattcggcataaagttgcgcaaatttccgggtgggaccggtgaaaatggccatgctctttttgcgcaggacaagctcgatgatccagcgcgtcagaacaaagcggtcgagagcgcttgccaacttgtttccgccgatataggatgcggtttcacgggcgttggttccgatgaggatctcgtgtttcggggccacttcgcgcagccgcttctcctcgtcttttcgggctggcaacggataaatccctacatgtggcgcaaaaatgagatacttggccagtccgcgttccgtaacatggctcgtaatcgctcgctgcgcttccaaaagctgttctatcggtgcgtctaacggcagttcgttcagctcatccaagatattgcgttccatctcctcgcggttctccaacgtgcccatcgggtcgctttggatgatggcacgacgatagaggtcgtcggtgccttcggaaagcatgatgcaacgcaccagatccccgccggccgactccccgaagagggtgacgttggtcggatcgcccccgaaagcctcaatgttggcatgtatccaccgcaatccttctatcgcatccaaaaggccgttgttggcaaaaccgccttcccggttcttcacgaaacccaagagcgagagacggtaattgatccccaccacgatcaccccattctcctttaccagcacggtacggtcgtaaaaaacattgtcgcaaccgccattgcgataggaaccaccgtaaaaccagaccattacgggcagacgactctctggattcgcctcctccggaacggtgatggacagatactggcattgttcctcttgcggcaggttctcatagtgtatccctgtgagagtcagctcgatggtggaagtgagctgcacgggaaacggcgaaggggcgctgcagtcgtgctctgcatcaccgtaggagtagtgtatgggggcgcaatatcgctcggaagtggcatagcgaatcccaagaaactgctgacaaccattgtcccaaaaacctttgaacgtgccgtcctgcgaatggacggtcggaatcgtgtgagtttgcataactatttaatcttacgccccctgtcttcaaacaccagtgagccttttcaacccgcaaaagtacataatttatcgtaatgctgtttacatggggcataatggtggaattttgaatgatgcggcgaggatacaatttttttacgatgaaattgatcgatgaaaattaatcgatgaaaattaatcgatgaataatattcgatgaaaaatatcgatgaaaaaacgatgaatggaatacggcactatacaatttcatcgttcattcatcggttttcatcggctttcatcgtcgatcatcgcaaaaaaatgtatttttgccgccaataaagacacctacccaaaatgcagaaaaagagacaataccgcttttcgtcgggcgagacgattgaggccgatgtggaggatttgaagcgcctgctgcgcgagaaccaggagtatttggacaactatcttgacctgtacagctcgttggaggatgacgagtacgttgcacggggcaacggcttctgcgaccgcaagttcagcgacgacttcatcgaaggacagattgagaaataccgtgcaagggtgggagagattgaaagctggctggcggaaaagtaggagattccgccagttcctatcgtcactggcggaatggtgcgttgtaagagcatgaatagagaaagtcgctacagtccttcatcatcacacgagaactcctcaactgcctcccagtactcctcctcggcctttatcccttcgcgctccttcgcggcggcgacggcctcctccaaacggtccagcacctcgtcctgctcgtcagaaggaaggcccggagcgaaattatattgataaccaggtgaatagataatatacaggggttctttggcgaaagatccgaatcgaaacattctgttgaatttcttccacttcgactcaacataataatccatcacattgatttcacacaacttcactttccaattccgacggaatattctgtttttgcgatgaatacgcagatactcatcgtcaatggtcgcaatttcctctccgaaaatctgccaaagggtctgttccaaactcatcaaaataatcggtgaccacattagataccctgctatcaaataggttatgtcctggtcatgtatggctaaagcaagaggacatccgagcgcaaaaagcaatattatcacccacggaaaaccacctccacgctccggatgacaccgataaagctcaatctcattattttccaattcattattcataacaaatacattttctaccgagctcttgcccctgtcggaactgctcaaagaaataatttaatatgttggtggctttttcgttccaactgctaactactaactgctaactgctaacttcggacgtccatcgcatcccttaacgcattgcctatcagcatgaacgacagtaccagcaacatgatggccacgccgggaataatggcgaggtaggcgttgttgagcacgatgcaggcgtagttctccttcatcatcatgccccaagatggggtggggggctgcacaccgagtccgaggaagctcaagcccgcctccatcaagatggccgacgagaaattggaggccgcaatcacgatgagcgtgcccgtgatgttgggcaggatgtgtttgacgatgatacggaagttgctgtagcccagtgctctggcggactccacaaagtcctgctcgcgcagactaaggaactgtccgcggaccacacgggcgatatccacccacatggttaaaccgatggcgatgaaaatcttccagaaccccttgccgagggcgaagctgatggcaatgacgaggagtagggtggggatggaccacaccacgttgatgaggaaggtgagcacgtcatcgaccttgccgcggtagtagccggcggtggcgcccaccaaggtgccgataaacagggcgatgaagatggagaggaagccgacggagaggctcacgcgcgcgccgatcatcagctggctgagcacatcgcgaccgtatcggtcggtaccgagcaggaaccgctgttttttcaccatgcgcggcgagaggttggctttggcataagtctcattgtattcctgctggaacagtttcaccgtcaccgaatctcctgcaacggtgtaagtgtctatcggaacggttttgtattcagcgggttgtccgaacagcatcttcttaagaaaattgacatgcggaaccgtctgttcgggtttgagctccagcatctgcacagtgaatccgggcttctgcaaggcgatttcgagttgttggtgattacagaagggggtggagtcgggggtgatgagatagccgacgagggcgatgatgatgaccagtccgatgtaggcaagggacacgatagcctggcgttccttcttgaaacgctgccaggtgagcgccgacagggagacggcgcgttcttcctctttcttacgtgagaaccactttttcattgcggcggcaaaagtacaaaaaatagtttcacgtttcaggtttcaggtttcaagacccagggcgaccgcaccaaaatcccactgtgacatagacttgaggctttaggctttagactttaggctttagactttagacttaggacgacaactttggatgttggggcgaggcggcgcgtagggggcggcgcttccgagcgtcgcggagcccaaagcgaacaggcgcttccaagcgtcgcggaaaacggaaaatccgcgtgtgcctcatagcggcactttctccttcacggggacggtcacgacgcgtcggttgttgtcggcgcggagggcgatggtctcgggccattcgccggcgaggaacacctcggcgaaaccgtccatcgaggcgatgcagattttgtcgggatgttcggcggcgtagtggcagatggcatcctcgatgttggtgatggtcaccagttcgcccgccgtcatgctgtcggccagggcgtcgagggcttcgcgcagggccgagttgttccgtttgaaatagccgttgctcgggctgccggagccttcgtgggcgaaggtttgccggagggtgggcagatgatggcgcaggtgcatctggatcattttgaagagggcctggcgtttcctggcggccggcgacttatagacctttgccggcatcgtgggggtggaacggacgtaggaggtgccgtttttgcatttcacgtaggtaagtccgccgacggtgccatagatcgtctggtcgggtcctgtttgtttgattcttgccattactgtctggttttaagttaaataacggttggtccgacggagacgtagcctccgtcattcctgtccgcaaagatacacaaatcccatgacattccgtcgtcccagccaggcatctggcaagtatttggcaagtatctggcaagtagatgccatactgatgccatagtgcagccatactctcaagtatggcaagagtatggcaagagtatggcaacactatgggatcggtatgcctggtatatgcgaaagggttgggtagggggagggagggggtaaaaattctttgacaactggatcctcagttaatccactgtatttcaagatgcaagatatatgacgacaggcgttttgcccggaggtggcaaaatagtcaggttattttcaggggttcggagcgagaagacgacgcttccaagcgtcgcaaaacggggcatgcgcgtttattcagcaaattcatggtgaaaaaaaacgaggccgtgacagccccgttttggatgttttcacaacggaatgtcaaaaataatagccctacggagtacgcagggcttagaaaaatcttcggcttatagccttattgtgaaaagtctttcacaaagttagtatcttgcggcaaaaataaaaaaaattcaaatacaaaattatatttaattggagtgtttgaaaaaaataattatttttgccaaacaataaatgtaatatatttatggataagactataggattagatttaggtacaaattcgataggtttgttacttagaaatatatcaaaaggaactgatatattaaaacaaattgaatacttcacgtctgttgtgtttaaaagcggcgttggaaaagaaaaatccggagaattttcttatgctgcgaaaagaacggaaaaacgttctcatcgccgattgtaccaatctcgaaaatatagaatttgggctacgttagaattgctgatcgaaaacgggttgtgtcctctttcgatggatgatttgaacaaatggagaatatatgacaaacaaaagggattaaaacggcagtatccaacttgggcgactgattttgaacaatgggtgcgattggattttgatggggatggcattcccgagtattcaagcccatatcagttgagagcggaattaatggaaagacaattcgatttcactgagaaagttgaccgatttaagttgggacgtgcgttatatcacatggcgcaaagaagaggatttaaaagtagcaaaggggagacaattagcggtcaaaatgcagaggaaggaaaagacgtagatatttctgtcgaaatgaaaaaatcggaagaaaagacgtctggtagactagatgagtatatgaaagaaaatgggttagctactgttggatctgccctatatcaattggaaaaagctggtgttcggattaggaatagtgaatataaagcagttaggtcgcgatataaggaggaaataaattgtgtctttgattttcaaaacggattgaataaaaatagcgagctgtttgagagattagtgagcgaaaaaaaaggtgttggaacaattttctataaacgtccacttaggtctcaaaaaggattggttgggcattgcacattagaaccgacgaaatctcgttgcccaatcagtcatcctgaatatgaaaaatttagagcttggagttttatcaataatattagatttggagagagtctgaatgagacactgactttggaacaaaaactcaaactatatgaagataagtttttgttgagtcggtcatcttttaagtttgaagaaattcgtgtttggatagaaaatcaaataggaagacagttggattataagttgaagacgatcaaatacaaagacaagtctaacgtacctggctgtcctatatctggtcgattgcacaatttgttaggcgacaactgggagtcttggcattttgacacctatcaaaacaaaacgaataagaagactggggaaacgtcaacaatttcatatacagcattagatttgtggcatgtctgtttttcttttgatgaacctgaattcgtcgaagagtttgcaaaaaacaaattggggtttgaggaaaagaaaaccaaagagtttgttcggatttacggagcgatacaacaaggttatggtatgttgagtttgaaagcgattcgaaatatcaacagatttttagaaaaaggattgggctattcggatgctgttctgcttgcgaagttgcctgatatttttcaaaacaaatggcatttagtggaaaatgaaattttggctgaattgcacaactttctagctgagtatcgaaatcggaaacagttgtatggaatatcgaatgtgttaattgcaaattataaatcattgggctatgatgaggatttgcatttttctgaaagatttgctgaccggaattgtgattataaattgcaagaagatgattataaggaaataactagagttgtagaagaatggtttggccctaaatcatggggagagaaaacaaatgaagaaagaaacagattgatttgtgatgtggctgtattatatcagcaatttttttcctcgtcaatccgagactattataaactacctaaaatatcggaagaattagctggctatttgaaggaaaagtatccttatctgtgcgaaaaaaaattgaaaaaaatctatcatccatcaatgatagagttttatgctcctgcgaaagagactttattagatgatggtcgattgctgaaacttttgggaagtccagtgataggtgcattgaaaaaccccatggcaatgagagtgttgcacattctaagaagacaaatcaatgcattattaaaatcaacagatgaatatggcaattctttaatagacgaaaatactcgtgtggttgttgaaacagcccgtgaattgaacgatgccaatatgcgttgggcgattgatgaatttcaacgtcaacgtgaagctgaaaaccgggaatttgagaaaattatcaacgagtattatccaaatcgtctttcaaataaaagcgatacggacaggatgaggctggtttgtgatcaacatgacgtaattgaaaatgaggattccatcccagaggctattttcaatgatgataaaaacaaagtagctcaatatagaaaagaaatcacgaaatacaggctatggttggaacaagggtgccgatgtgtttatacaggaaagataataaacattaaaaatttgttcgatgataatgcgtttgacatagagcacaccgttccaagaagcctttcgtttgacagttctttagcgaatttaactatttgcgatgcttattttaatagaacaataaaaaagaatcaaatgccgtcgcaattgccaaattatcaagatattttaaatcggattaaaccttggttcgaaaaagtggagcatttgaaaagtatggtggatttttggaaagcaaaagccaagagagcgcaagataaatcttataaagatcaatgtattcgtcaacgccatctctggcaaatggagttggattattggagaaataaagtggatcgattcactatgacagaagtaacaactgggtttcgtaacagccagctggttgatactggaataatcacaaagtacgcatatcattatttgaaaaccgttttcaacaaagtcgaagtccaaaaaggatcgacaaccgctgattttaggaaaatgcttggcatacagagtgttgatgaaaaaaaatcaagagaaaagcattctcaccatgctatagatgctgctgttttgacgatgataccaactgcagcgaaacgagatgagatgttgaaattgttctacgaaattcaagagaaaagtaagttgggaatagacgtgtctcaatacgagaaactgttgatgcgtgaacgaaaacaatgtggacttgctggtaatgtgtcagaaatcgttccgtttattgaaaacaatatattggtaaaccatttatccaaagatcaaactttgactcctgccaaaaggaaattacgtagaagaggaaaagaaataatggttgaaaacagccagggcataatggtaaataaatggttgaaaggagattgtataaggggaaagttgcacggagagaccttttatggtgcaattactcaggctaaaaaagataacaatcaaaaaagtttgttaagagatgcaaaaggatccatcattaaggagaatcaaatatattatgttgttagacgagaattgaaatataaggcttcgagtgttgaatctgggtttaaggattgggatgaattggaaaaggcaattgttgacaaaaacttgttcaagatcatgaaaagtcaattttctgaaaacactacttttaaggaagcctgtgaaagaggtatatatatgtacaaacgagaaaagagaggttttgtgtattcagaagaaaataggaaaaacaagattaggcacgtcagatgttattcttcagtgaaaaatccattaacgataaaaacacagacatacaaatcagattcagattataagaattcttattatgcagaaatgggggatttgatggttatgtgcaaatatgaaagttttgatcattcaatatgtgagtatcacatttggagtgtatttgacgttagtgaaaatcgaaaggctggagttgaagatgtgccacgtgttattatgagtaaaaagaaaaacatagaactttttctcgcacaaatgtatcgaccgggagatatggttttgttgtataaaaatgatgtacgtgaactcaaagaaatggatttgattaatttgttgcaaagattatatgtggttaggggttttgaaaatcctagcagaattatattggttcatcatttgaatgctcaacaagataatgttataggaaagggtgagtctgtcaaagattatcaatgtttgcctcaaaagattagatgcggagttaatacattgtctttgttggttgataaaatagactttgaaatatcaccacgaggtatcaaattcctttaagaaactatgattaagcggaccctttgtttcagcaatccggcctacctgtccttgaaaaatgaacagttggtcatcaaattgcctcaggtggagaaaaacaacgatctctcggattcgtttaaggcagatacagtgaggacgattcccatcgaagataccggagtcgtagtgctggaccacaagcagataaccatcacccaaggattgatggaggctttgttggaaaacaactgcgccgtcattacctgcgacaagagccatctgcctgtgggattgatgcttcccctcgccggaaacaccacccagaacgaacgtttccgttgccaactggatgcttctttgcctttgaagaaacagttgtggcaacagacagtgcaggcaaaaattggcaaccaagcagttgtgcttgagaagtgtaggggttcagaagtgggcaacatgcagaaatggcagaaagaggtcagaagtggcgacccggacaacctggagggtagggcagcggcatactattggaagaatatgttccctgatgtggaggatttcacgcgtgaaagggagggcacctcaccgaacaacctgctcaactacggctatgccatcctcagagcggtagtggctcgcgcattggtggcttcaggaatgttgccgacgttgggcattcaccaccataatcgttacaatgcctattgcttggcagacgacattatggaaccgtatcgtccgtatgtagatgcattggtggtggattacaccaacgagaatgggtatcccgatgaacttaccccggacatcaaaagggtgatgttgtctgtccctgttctggatgttcgaatcaatggtcaacgaagcccgctgatgttggctgcagggcagacagcggcttcgctttacagatgtttcacgggagaaagccggaaaatcatctatcccgaaaaatgaagtcggaacgtttcagtgaataccggattatgtgggttttggtgctttttgatttgccgaccgagacgaagaaggagcgcaaagcctacgccgatttccggaagaaaatcttgaaagacggtttcacgatgttccagttttctatctacatgcgtcattgtgccagtcgcgagaacgcggacgtgcatatcaagcgggtgaagtcgtttttgccggagacgggcgacatcggcattatgtgcatcacggacaaacagttcggggaaatcgagatttttcatagccggaagcagaccaaagtggaacaaccgtgccaacagttggaacttttctgatgtgcgatccgcaaagtatagtggtggatcaggattcgggaactgattgtcagaaacaaaaaaggccaccatttgaggcgactttttctgtttctgaaaccgcatctaaatatttgattttcggtctgtttggtatgttgtactgtttcagactgcaaagatactaaacttttgaaagcaattcacaactcgttcatgtcggtctccatgagctgcttgactgtttcagactgcaaagatactaaacttttgaaagcaattcacaactgcagtcgtggttgaagtagaatgtgtttactgtttcagactgcaaagatactaaacttttgaaagcaattcacaaccattcgtgtcggttttcgtcggttttgtggactgtttcagactgcaaagatactaaacttttgaaagcaattcacaacagagtttgcccgctgcgtcgataagggagcactgtttcagactgcaaagatactaaacttttgaaagcaattcacaactagccgagtcctgaggtgttgagcgcgtcgactgtttcagactgcaaagatactaaacttttgaaagcaattcacaacccgcgtggtgtggataaacaaggacatgaaactgtttcagactgcaaagatactaaacttttgaaagcaattcacaacgtcgagggcttgaaggatggaagcaaccgcactgtttcagactgcaaagatactaaacttttgaaagcaattcacaaccttcctgtaccgtggacgtgtttatgtcgaactgtttcagactgcaaagatactaaacttttgaaagcaattcacaacgtagcgctcatacagggtgtggcctcgccaactgtttcagactgcaaagatactaaacttttgaaagcaattcacaactgaggactgaaatgttccttggcgttgatgactgtttcagactgcaaagatactaaacttttgaaagcaattcacaacatgtcgtcgaacacaggcttccattggccgactgtttcagactgcaaagatactaaacttttgaaagcaattcacaactatctacttgataaatatagcccgcgtgacactgtttcagactgcaaagatactaaacttttgaaagcaattcacaacacgtcacctacatattcggcaaagaggactactgtttcagactgcaaagatacaaaacttttgaaagctattcacaacctgcctgttgaacttactgagaatgaaatgactgtttcagaccgcaaagatacaaaacttttgaaagctattcacaacgacttctctgtaattaaggcggtcgcctttactgtttcagaccgcaaagatacaaaacttttgaaagctattcacaactctttgtgttgcggttaggtcaacgacaccactgtttcagaccgcaaagatacaaaacttttgaaagctattcacaacagttcaactacaatgttgaacaggtctccgactgtttcagaccgcaaagatacaaaacttttgaaagctattcacaacaacgcaaccaggtgaacatcatattccagaactgtttcagaccgcaaagatacaaaacttttgaaagctattcacaactccgaatcgattggtaacttgtttaattcatttgccgttttggttatggccgcccgtatggatttcagattgttgtctataccttgctgattaagccaaatattgacccttttgtttacttcttttgccattacttcagaaatttcatggcaaaaataaacccgttcatcagaacgggttgggacatattcgttttaatctgtcagcgagtttccaccgcctatccacggcgctttacctgctaatttgtatgcgatatacactaatactatggttcctaaaatctctaacatttcggattcctccttaatatgacggtgaaaaattcggaaggttaaaattggaacaacgaaaaacggcctccgggagggaagccgtggtagggtaaaaaaaaacgccgtccttggggaagacggcgggcggttttcttcaaattttatttatccgaataatgaccacggagagatatgaccgtgattatctgttcctcttcgtaaacacaatatacgaggcggttctttttgtcgatgcgccgcgaccagtggccgagcatgtcgcctttaagcggttcgggtttgccaattcccgatttgtaatcaagtttcaccgattttagcagctcggtgattctgtccatggttttcctgtcaccggattttttccactgctcaatgtcgcgcaaggcggacggggaatattctatttccataagtcttcaacagccattttaacacactgtccgttccgatgggcaattctgctctcttccgcttttttgagaatctcaggattgtacctcggttcattttcctctgtgatggtcacaacagcacccaactcccttatcgcagaaagaaggaggtctatggccttgcggttttcgctgtattctattgtcactgtacacatatctttatgctttgctttttccgccgcaaaaatacactttttatcttcgcggaaatagtttcgcggaaaatagtttcacaacaccccttcgtggctcgcggtgttggctgtgttgatgtccagcttcttgaactccaccagcactttgtcgccgtagtagtcggcactgtttcatactgcaaagatacaaaacttttgaaagctatggggagggcgtctagctccccgcgacgcttggaagcgtcgccccctaagcgcgatcccccaggttcgcaggcgaattccgagactgtttcggcggcggttggacgtgtcgaaaaaaagtgtacttttgcgccctcaaaaaattgcggatgtggcgtaatggtagccgcgccagacttaggatctggtggcgtaagccgtgggggttcgagtccccccatccgcaccacgattcagttagcagttagtagttagcagttgaagccggaagagtccccattcccctttttttagaaggtgtgcccgaagaaaatactttccttacttatgaaccaaaacgatttaattccccatattgatgcattgaaggatgttgtagatattcaaattgatgaaaatcagaatattataacatttggtagggtggggcgcgagaagttttggaaggcgctggtggtgatggccatttgggttgcggttgtgtcgtatattgttatgcatcagacagttgaggcggtgattattggtttccttatcctggcgactacgggttggtacctgtccgacggtttccggtctgttattgtggacctcaaacggaaaaggatttcttcgagtctatttaacataatatctgacgactatcaatatgaagattatcgcggatcgttggtttatatgatgacattgaacggtagggagccgtcgccgaaggagttctgcctgaaattccgccgcaaagatcgtatacaggaaatacacctcgcagatttgacaaagggcaagaattcaacgcccaaagaaaatctcaaacacatatccgcgctttggaatctcatcgaggaaaatttccagcttgatgaagattacgacacagaataccaaatgagcgcccgcaacgcaatattcggatgatcagctattagctattggctgttagcttttggccatagctgttagcgtagattcattttcgaaacaacataacctaaagccaatagctaaaagccaaagtttttatcgctgctctgcaatatccccaaatattcaattctccgcgcgatattgaaacagatccaattgccttataatttatattatgttaaataggatatttcgaggatcggtaatatcgttttgtcacccttcatcgtctcatcattttttcatcgcgtaagtttcgtcgttcttcatcgtctcatcgcaaatttcttatttttgccgccaatttccaaactccccaaatgaaccaccttggagaaatcatcgcattaggcgtagcggtgtcgtggaccatcaccgcgctgttcgccgacctgggcagtcaccgacttggtgcgctgacgctcaatctgttacgcatgatcctctccctcctcatgctctcagtactgctttgggtgatgaccggttcccctatccccactggtgcgaattccgccgcatggggctggctgctactctcgggcgtggtcggctacgtgttcggcgactactgtcttttcaactcctacatcgtgttcggctccaagttcgggcagcttttcatgaccctcgcgcctcctgctgccggcatcacgggttggctcttcctcggcgaggctatgtcgtggaaatcgtggctggccatgctggtgacgctctccggcatcgccttcaccatccttgcccgcggcgatgaccacaagctcaaactcaaactcccgctcaaaggggtgcttttcggcatcggggccggcgttggacaaggtgtcggactggtaatcagtaagatagggctcaactgttacgagcagaacctacttccaggtggcgacacttctatccgcaccatgctccccttcgcgggcacctacatccgcgcgttggcgggactcgtgggcttcttcctcatcctctgtctgcgccattccctaggcgacgtgcgcacagcgctgcgcgaccgcaaaggcatgacctacgcaacgctcaccaccttcttcggtcccttcctcggtgtgtcgatgtcgctgatggccgtgcagtacgcccacgcgggcatcgcctccaccctgatggccctcaccccggtgctcatcatcgtcccctactctatcctctaccatcagaagatctccccgaaggaggtcgtcggcactctgatcacgatggcaggggtagcgatgttttttatgctgtaggaggcactcgctcgcccctacccttctgttcctgaaaatacgcatagcggaattgtgccaccgcaccaccctgcccttgcgtgcacggggttccgtttggcgaatttgccctcgcgagttacaatttggcttttgcggcatggtctgctcttgcgcaacatcccgcccttgcgtgcacgggattccgtttggccacccagtggaaacgaaaaagtctcgcattaacgaggcacacaaattagcgaaagggctttgcaagtacgggccaaacggaatctcgggctcgcaagacatcattgtcacgcaacgacagatcttcaagtatcggaatcaccccaaaacgaccaaaggcgccaacctccccgtggaagactatgggattattgaggctacgctgaaaaatcccacaaacatattcgaagacactgttcaaaagcatcttgtgtatgtgtacacacatccatactatggagacaggttagcgaaggtggtggttgaaccgaattacagaagtcgcggaacagtgatcaacctggcgaaatcatggggaatagtggaaaaaagcaaaatgaacggaatccaataccggaaaataaaataaaggaggcaagaggcctcctttttatttggcggagggagtcgaaccctcaatatgcagactctgatgaagagcgtgcctcgctaccatgttgcgaccatcaaccaatgtttcaacggcaaaaatacactttttttaatatccaaacattgttcgataatttttttgaagccccgcatacatcacacttgcttcgataaaggctaattggatgtcggactcgttttggtcatccatcatataccggcgttctcccgtgtcgaggagagcgcattgtttgccgttgtcgtcccgtagctcgtcgatgtcgaaaaagtcgctcatctccgaaagctcataccagaccacgcatttcccatcataccgcatggcatccttgatcttgtggtacatacactcctcaagcgctatccgctgcgctgtgtccaacggtccggtgatgaactgtttttccatttctcaacgtttgcgatttgccgtttcagcccgcaaagatacaaaacttttgaaggtgattccgtttggaaacgaccagcttttccgtccccccccatcctcttgcgagtccgagattccgtttggcccgtacttacaagacttttttgttattgcgtgggacttgttgacgcgaggctttttcgttcccgcagggtggccaaacggaacggaggcgggcttttcgttaaagtctaggctaccgttacccggttaatcgttgccgactaccgtttcgaaaagcccacatatcgactgcggctggacagcggtgcggttctccgagcgacaagtacgcgaacagcctgaggcctgcatcgacctgctgcgacaggtcgtgtcacgattgcgcggcacctctgacgaactccactgccaagtcacgcccgagcaacggtgaacgcaacaggaagccgtgaaaatggagaaaggcctcgtccgcgagaaacgcctccacatccagtcgttcgggatgcccgactaccgcaaggatgaggtggaggagatgttggcggcgcaggtggcggttagcatctaacgacaatccacaaggatcatatccagtcgttttgttgaccgcctatgaaaaatccgccggcgacgttgtcgagatcgtcctcgtcgagaggccattctcccacggccttgagctcgtccttcaagacttgggcttcttttaataacttcacgagctgttctttcttttgctcaacttgttcttttgtcagtttttccataatcgtttattttttaattgcgtaaatatttttcaattttagcggttgatatatcagcgggaatgctatttgcggacgtaccggatgacttgtctttgctgatagtcataaagggtcagacggcgcagacggtaataagtgatccaataattctgcaagctggcgattttgttctgctgggcggtcagccagtttgtttgagccaaagagaggtcggtggtgttcgcctgtgccttgataaaacggagaagggtctggttgtacgcatcttccgcaatgtccagtgcttcctgggaggcctccacgatggtttgctgctcgttgaattcgttgaccgtcagcatcacatcgagttccgtgtcgcgggcggcctcttgctcggaacgttcggctgcttccaccttgctcaaagcggccatataggcgttcttgcgctttccccaatcgactatcggcacggagagcgtcaccatggccacgtcctgcaaaagcgggtgcatataggcgtccacgaagcggtaggccacctggttaaggcctacgctgacatccagactcaggttgagattcttttccacacgggcttttgcggcatcgcggcgtgcttcttccgtagcctgtcgactttccgtgtatcgggggttgttctcgcgggcgtatcgcagcgcctcctctgtatcgacgcgcagcccctgcataaggtcggggacttccagttcgaggtaagtggagcggtccatcccgaggtaagtcgccagctcctgcatagcgcgtgtgtacgcgatacgcgcattggcgagggcgatacgggcgttggttttatccaattggagaatggaaagttccgctttagaaatgctggcgatgttgaaacggcgctctgcaatggcgtaaatggtgtcgcacgacgcgagaaacttctccgccatgcgcaaaccgtcttgggccatggccaagttgaagaatttctccactgcctgctcgctcgccgtctcgatgccgtaggagagttcctgctcggcgcggctgagcttcaacggctcgattttctttgcccatttccaagggttgtagaaaagcagattctgacggtatcccactgcaatcgggacagtcatgaactggttttggctgacctcaccgaacgtgcgaaggaatccgaatttcgaagagccatagaattcgcctccccaaggctccatggcctgcgtgatggtgatgcccgcctgggaatagatgtcctgctgcatacggtattcgtcgatgttctcgaacgaaaggtagcgttgggtcatgtatcgctcatgcaggaaaggggtggcctccaaggagatctgcggctttcgggtggcaacccacgacaagtattgatagcgcgagatgtcgtacacgctctggtgtttctgcgccgtgagcgaactgtcggtggccaaacgcacggtgcgttccaagtcaagcacaaccctctgctgcgcaaagcccgtgacacccccgaaaaccatcaaaacccaaaaaccaaaaaatatccgatatctcatattaattcatcattcataatcattgatctccttctcatcccagatacggcgttcgttcctcacgccttccccctggctaccgagctcttgcccctaacggggctgcttagggaatttggggtattctaatcacctccacattcatcccgtcgaacaggtctgtggccgtggtgaggcgggcgcggagggtgacggtgccttgcgcatcgaccatcgggttgatttcgttgaccacagccttgtatcgagccgttttgtcaaccatcgggacgaccttgacctccgtgcccgccctgaaaagcgggagctcggcctccatcacgtggaactcgacctccatctccttgtcgtcgatcacgcggcagaccacctgaccgggttgtgccagctggtgggcctggacgctgaggttggccaccacgccgtcgaacggggcggtcagcatcccgcttcgcagctcatgctgggcggcg

SEQ ID NO: 4003 - DNA, 18125 bp, synthetic construct
  misc_feature 1..18125: note = Synthetic
  source 1..18125: mol_type = other DNA
tccaattatttcatcgcagcgttgcaaatcttttgtgcggataataacttttggggtgtcaacatcgtggaatgcgtaaatgtactccattgatatgttgtggtctgacagtttcttgaatatttttgatatagacccaacctcgtcggggctggcaactgacacaaccttgtttttataaacattaacaccagcgttcttcagaatctcgtaacctttatctgtgtcagcgagtatcattctgaggatgccgaaatcagagccgtcttcaagtgtgaaggtcttgatgttgatgcctgcttcagccagcatcgatgtcaccctgcctacactgcctgccttgttctcaagaaatacagaaatttgatctataatcataataatactattttacgggttaaatttatctttcacatttattgttagcctcaaatatggcgaggcgtttgtcaagctcttcatactgatgatcctctatgaatgaggtgcaggcacgcaggcctttctggtcactgcctgtggttgagagtgatatggctgacacaccgtagtacataagctccttggcaagcagacctgacggccagcccatgtagccaatggtgaagtagaagccgtccgccacatcggtgtccatatctctgtcatacactatgttgaacttgtgcttctcaaatatctttttcagcttgtgggcgcgctctccgtacactctcacctcatcaaggaagttgtatgtgccgtcatttgccgccttgagcatggctgccattgcaaactgtgcgctatggctggtgccgcttgatagggcgtagagcactctgtgtacaaacactgttccaaatgtgccgccgccgtagcgttttgtgaggccggggaatgcacggtggtaaagtttgtccatcatgcagaccacgccgatgcgctcgcctgcatagctaaacgccttggaaccgcttataagcatggcacagttatctgtgtagtgtgatattgacggctggtacggtggttcgcccggcttgcccaagtctttacggaagtccattgcaaagtacgccaaatcttcaaacacaatagtgtcatatttgttcgcaaggtctgcaattatgcgaagctcctcatctctgaggcatacccatgacgggttgtttggattgctatatacaatggcggctatattcccattttttagataactctcaagtttgtctctcagtttctctccacggaaattatagacgtcaaatgtctcatatttggctcccattaccacaagctgctgcttctgaactgggaatccagggtctatgaagagtatggtgtctctgccctcaacacactgtgtagctgttagaaatgaggcgtatgtgccttgcatagagcctgttactggtacgcagctctctgggctgacattggtgtttataaacattttaacaaaacgggcagcctcctgtttaagttcaggaataccgttgatgtcagggtagaggcgggcgatgccgctcttgagtgcgtttatctgcgcctccacacccacttttgacggaggaagtccgggtacgcccatctccatctttatgaactccacgccggatttcttctctgcaatggcggctatggctttcacctcacgtatggtggctttgccaaaatctttaatgccgagctccgctatcgccgcatcaattatttctctatctattggtgttttcataattatttagttgacagttgatagttgacagttaatttttcaactttcaattatttattgtaacaagcaaatatctcatctgttctctttgtatctggtttttgtgtgaatgcgctaacaagcggcactattataaatccggcaaccatagcaagcacaccgcagtttattggcgactggaatatggctgggaagtacggacgtagcagcatattggcaatcataattatggtgccaaagatgaagcacacccagcatgaagcaggtgacacccacttgccatagagcgagtagaggaacggagccaggaatgaacctgccatggcaccccatgaaatacccatcagctgggctataaatgtaacagagctgctgtactgtataagtgctattgttgcgctgatggcaataaacaccacaataaaaactcttatgcagcgcacctgctttttctcactcatgttttttataaagttgtctttaagaaaatctatggtaagcgtggatgatgatgttatcaccagcgatgacagggtgctcatacttgctgagagtaccagtattaccaccaaacctataataataggggagagggtggagagcatctcaggaataatggcatcgtagataatctttccatcggcgttatatagggcaggagaatcaaacaacctgccaaaaccgcctaagaaatagcatccgcctgccactataagcgcaaaaacagtagataccacagtgcctttaagaatggctttctcatctcttatggcatagaacttctgcaccatctgaggcaggccccatgttccaagcgatgtgagaagcaccacaaacgtaagcccaaccaaatcagggccccatacagaggcaaaatcaccttgctgaactcccatggcagggtctgagataaggctcatcttgttcacggcctccataagcccgccctgggtttttagcactgcaataataacagttacaatgccaaacagcatgataattccttgtataaagtcatttatggcagtggccatgtatccacctgcaataacgtaaatggctgtaagaaccgccatgattattatacatacagagtagtccatgttgaatgccattccaaacaagcgtgaaaggccgttataaagtgacgctgtgtatggaatcatgaacacaaatatgataacagaggcaaacacctttagtgcagggtcatcaaatctgcgtccaaagaactcaggcatggtggaagagtctaaatgctgtgtcattatacgggtgcgcctgccaagcagtatccatgcaagcagagagcctattatggcgttacctatgcctatccatgtggcagacaatccgtagcgccagccaaactgacctgcgtaacccacaaaaataacagctgagaagtatgacgtgccgtacgcaaatgcggtgagccacggccccacactgcgtccgccaagcacaaatccgcttacatctgtggagtgcttgcggcagtagaaccctatgcccagcaggattgcaaaatagattattagtatagctaatttcatattaattgtttaatcggttattcggttaatcgtttaatcgattcaccggttattcacacttcgtgttcatcaacacgtcaccggttctccgattcatcgttaaaataactttctcagatccttaactctcactgccttgcctccttctgctgatggaagtgagcctttgggtacaagtttaaccttaggtgttatgagtatctcatccttgagctggtgtgtaacctccttaatcagagatttaaggtctgttactgtatcagagaaaagttctccaagctcaacctccacagtcatctcatcattgttatcaattgtttcaagagttataaggaagttgcttccaagctccttgaaacccatgagaatcttctctatctggatagggaagatgttcacacctttaagaatcatcatatcatcactacggccttggaaacgtgccaggcggcgatgtgtgcgaccgcaagggcagtcaccttttataatgcgcgtaaggtcacgggtgcgatagcgtataagtggcatggcctcacggttaagcgtagtgagcacaagctcgccaatctcaccgtctggaaccggcttgagggttacaggatctacaatctccactatcacattatcctcccagatgtgcatgccgttctgctccttgcactcaaaagccacaccaggaccgcacatctcgctcatgccaaatgagttgtatgccttaacaccaagcatcttctcaattctcttacgctgctcctctgtgtgaggctctgctccaatggcaaaaatcttcagcttcaaatccttgcgcgggtcaaccccctcctctgccataacctcagcaagacgggtggcgtatgatggtatgatatgaaccactgtggttccaaaatctttcatgaacttaatctggcgtttgctgttacctgcggcggctggtactgtgaggcagccaagcctctctgctccgtactggaatccaagacctccggtaaacattccgtatccggatgtgttctggaacacgtctgtatcacgcacgcccaccatatataagttacgggcaacaagctcagcccatgcttcaaggtcatgcttgctgtgaagaaccacggtagggttacctgttgttccacttgaagagtggactctgacacaatctttcagaggaattgctgccatgccaaaaggatagttgctgcgcaggtcatcctttgtggtgaatggaagttttgttatgtcatcaatgcttcttatgtcagatgccgctattcctttttccttgaaagccttctgatagaaaggaacattcaatgctctgagaatggtggttttcaaacgctcatactgtaactttttaagatcttccctgctaataatttcaacgggattaaaaaattgacttttgtccattgttttttgattttgtcggtccactataagggtattataattagagcgcaaaaatacaaaaaatgtttgtactatggtaataaaatcctaaaatattgttatctttgcatttcgtagtttttttaagaatcatggaagaatcaaaggaaaaagagttgtcactctctgaaattgtagagcagctgaaagaggctgcaagcagtgatgttacaagagaaaagattgcgcagatcaagtcaaacttctacaaacgtcaggcggctatcctggagcagatgaaacaggcttgggtagagcagggtaatgatataaaggattttacccacacatttgcagaagaagctgagttcaagcaggttctacaagcttataagcagaagagggcggaggagttgcagaaaattgcagaactgcagcagaaagcctacgatgccaagaagagcatagtggagcgtctggaggctcttatcagcactaatgatgacgtggataaaatctacgcagaggtgcgtaagctacagacagagtggaataacgcaggagaggtgatacagaataaatacggagagatagtaaagaaatatcaggctcttatgacacagttctatgatgatgtgagaatcagcaatgaactgagagactatgatttcaagaagaatcttgaagtgaagacacagctgtgtgaggaggcagagaagctcgccgcctctgataatcttaatgaggctttccagtcactgcagaaactccattcagtatggcgtgaaacaggtccagtggcaaaagagtacagagaggagctgtggaacagattcaagacagcaagtgacactattaaccataagcacgcagatttctatcaggccaagaaaacagaggaggaggctaaccttgccaagaagacagagctctgtgagagcgtggaggctattgagtaccaagatgtaaaatcatacaaggtgtgggatgagatttcccagaaggtaatagccctgcaagaagagtggaaaaagacaggtttcgccccaaagaaggtgaacgccaaaatatatgagcgtttccgtgccgcctgcgatgccatctttaaagccaagagtgagttctataagagcaccaaggaggctatggcttcaaatcttgaaaagaaacgccagttggtggctgccgcagaggagcttaaggatagtaaagagtggaaggctgcatcgcagaagtttgtggagctacagaatgagtggaaaaaggtgggaccggtttcccgccgtgccagcgagcagatatggaataactttaaggcggcgtgtgactatttctttgagcagaagaaacaggccacagagggtaccgtatcactatcaaaggagagagaaaaacttgtgcgtgcatacgataaggttgtgtctgagctgaccaccatagagaataacatggagttccttaactttgacgctaagaaaccaagcccgctcatgaagcagatgcaggctcaggttgagaagctgcgcaaagacaaagatagcctgagagcaaaggttaaggaaatagaaaagagaatgaggaatggagaataagaatttcaagcctaaacgcagcgaagaaggtaaaaagccagtgcaaaagccgttcgttcgccgtaagccggctgttaagcacgccactgacggcagcgtgaggcttaaccgctttcttgccaatgccgggctctgctcacgccgtgaggctgacacgctgatagaggccggagtggtgcgcataaacggcaaggtggttaccgaacttggcaccaaggttatgccagatgacaccgtctatttccatgaccagcttattaaatcacaaaagaagatttacattctgctcaataagccaaagaactgtgtcaccactgtagttgacccgcatggcagaaccacggtgcttgacattatagcaggagcatgcaaagagcgtgtatatccagtgggcaggttagaccgcaataccttgggagtgcttcttcttactaacgatggtgagcttaccacaaaactcacacatcccaagtatgagaagaaaaatagtgcttgaagacgggccaatcaaggcggacgcactggagtatgtggaagacactaagcgcatgacagtgggcatagagattcactcaggacgtaaccgcattgtgcgccgtatatttgagcatcttggttacaaggtggagaaacttgacagagtgtattttgcaggtctcaccaaatacaaacttccgcgtgggcactggcgtttcctcactgaggatgaggtggctatgctgaaaatgggttcatacgaataaaaaatatacgcagtgagtaaggttaattctaaagcgatggttgtttttagtggcggacaagattccaccacttgccttttttgggcgctaaagaattttgattacgtggaggctgtaacttttaactacgggcagcgtcatataagtgagattgaatgtgccaaggcaattgcagctgatttgggggtgaagcatcatgtacttgatatgtcgctactgtcacagctggcaccaaactccctcacacgtatggatatacctgtagatgaacagattccagacggcaagtcagtgccaaacacatacgtagagggcagaaatatgctctttcttacttttgctgcagtgcttgccaaggtaaacggcataaataatattataacaggtgtttgtgaaactgatttcagcggttatccagactgccgtgatgtgtttgtcaaatcactgaatgttacgcttaaccttgccatggactataattttgttctgcacacaccgctaatgtggctcaccaaggcagaaacatgggctcttgcagaccagcttggcaagcttgactatataagagagaatactcttacctgctataacggcataaagggcgacggatgcggacactgtccggcttgcaccctaaggcgcagagggctggaggagtttctccagttgacagttgacagttgacagttgacagttgacaattgacagttgacaatagcacgtcatcctgagtggaatgaaatgaaacgaaggatctcaaaatgattatgagatgcttattcgggacgagccctcatcaactcgtcgctatgctcagcatgacggaatatgatatatgattttaggaaataagacagattacccaacgcagtacgcacctgaggtgctggaggcgtttgataacaagcaccccgatgttgactactttgtaaagttcaactgtccggagtttacatcgctgtgcccaataacatcacagcctgattttgcaaccatctacatcagttacatacctgataagaaactggttgagagcaaatctttgaaactctaccttttcagctaccgtagcaagggggagttccatgagaactgcgtgaacaccataatgaaggaccttatagcgctgatggaccctaagtacattgaggtgtggggtaagtttatgccaagaggcggcctgagtattgacccttactgcaactatggcaaaaagggcaccaaatatgaggctatggcggagcatcgtttgatgaaccatgatttatatccagagaagattgataatagataattatctgaatatatttgagttatgcttatgaaaaaatattttatactttttattatggcagcagttacatcattagtgggagctcagacttctatacttggtttgaattttggaagtgattatgacgtggtttatagccagcttgcagaccgttttggtagcgcttctgttacaaaacttgacggtgagcatatccaggtaaaagattttgactacacaatagaagatgtaaaagttaataatattacctgtacgttctcttacatagacggtgagcatcatttgtgctccattgcctttacatcggagccatacgtgctatcatacgagtcagacaagaataaaatcaatgattttaacagctatgccgtaagggttagcaataagatagctgtggagctgaacaagaaatacaaggtgagcggggtggagaaacgcattaacaccgcaaagccttggaccactctctaccgctttagcgtggatgagaatgtgactggcgtaattgccgcatacttcaacgccaccaagaaactcatgctccagaacggcacatcgtttgcccgccttacatacacagactcccgttacgtgaagaacaagattgacgagctttaacaggcggtgttattctgtgagacttttatactctgatagcagatactccttgagctgaggggtgtctgttatttttatgtgctttagcagccccatgcagaaacggcctacgccacgcaggtcatacacatcgatgcttaaaatccactcgctttcagacctctgagtgatgtaaggcttggcggcagggtactcctctaaaagcaggttgcgagccatgatgtcaagttctatgcgcacttttatgggattgctcccgtgaaacccaaaaatgtcaatgtcctcactcctaaaactaccagcgtgagcccagggcttgctcagtacggatacgctcttgcagcgtgacgggcggaatgtcttgcactggcagtcttgcgggtcatagcaccatacaaacttctggttctccgtgatttcaaaaggctccacctcacgtgtgcatatagtgcagctgtgcccagatgtgtactcctcaatctccacgcacttgccctgcttcacagccgtggcaaactggtccacattgcacagcgtcttccattcatcagtgccgctgataaggttcagcaccatcctgttgcggtgagagttcaaatcaaggcggaagcagttgctccttaccacaatgtccagaccggagttacggaactcatcaatgtagcggtgcacagtgcgtgcagacacctcaagcagctccgctatctcagaggtcttgtagaacctcacactctgaatcatattcagcacacggaacagcctctccacatgagactgatcatgaatttttgtggttttcataggcggtttttgaaatattttgcaagataatcaataactatgacaaattttgtcatagtagcattaaatctttgcaaaaaagttgtctaacaacgtaattaggcgtaggtgtttgatttaaggcaatttttgcgtatctttgtttttgggataaaaaatgtcccacggagtacgcgggactaagaaatcttcggcttatagccttattgtgaaaagtctttcactatttgtatctttgatgcaaagataaagataaattttaatgtaaacaaataaaatcaaatattatgacaaaaattttaggacttgacttaggtacaaattcaattggtgtttccttgagaaatcctgatagaggaaaaaatcttaccgatcaattagagtatttcagttctgttattttcaaatcaggagttggtactggcaaaagtggagaattttcctacgctgcagagcgaagaaaaaaacgttctctccgtcgattatatcaatcacgtaagtatagaatatgggcgacattggagttgctaattaataatggatattgtccattaagtattgaagatttggacaggtggagaaagtatgataaggaaaagggattgaaacgtgagtatcctattgatgcggtgaggtttgagcagtgggtaagattagactttgatggagatgggaagcctgattatacgagcccttatcagttgaggtctgaattgatgaataggcagtttgatttttcggatgaacttgaacgctttaaattaggaagagccctatatcatattgcgcaacgcaggggctttaagagtagtaaaggagaaactattcaggaacaggaaaaagacgattttgtagatgataatagtgaatatgatgttacagaggccttgaaaaaatcagaagagaaaaagtcaggaaaactggtcgagtacatggaggctcatgatataaagacggttggatgtgctttttatgaattggagaaatcaggagttcgggtgagaaatagtgaatatcaagctgttcgctcacaatatagaaaagagattgatttaatttttgagttccagaatggattggatttcaacagtgatttctataaaagtttagttagtgaaaagaagggtgaaggaactatcttttataaacgtccattacgttcgcaaaagggaactgttggatattgtacattggaaccaggaaaactccgttgcgcagttagtcatcctgagtttgaaaagtttagagcatggtgtttgatcaacaatattaagtttggggaaggtctgaaggaggagttaactcttgagcaaagacgtagattgtataatgacagatttttgttgacacgcccaaattttaaatttgaagatattcgtggatggattgaaaaagagattggatgttcattggattttagaagtaagactattaactataaggataatgttaatgtatctggttgtccggtttctgctagactaaaaaagttattaggagacaactgggaaacggaagttattgaaacaggtgagtgcaaaacaaacaaaaagactggtgaaattaagaaactttcatatacggcctatgatttgtggcatatttgtttttcttttgatgaaccggaatttgtgaaaaattttgctctaagtaaattgaattttgatgaagataaggctaatcaattagtgcggatttatggcgcgatacaacaggggtatggaatgttaagcttaaaagccataaagaacattaaccgattcttggaaaaaggattgatatattctgatgctgttttgttggctaaaatgcctgaagttttgggtgatcagtgggagatggaagaagataatgtaatttctcaccttgattcaataattaaagagaatcgcaaacaaaaattactgtataacattgcaaatagtttaattgctaactataaatcacttgacgttgtagagcaatttgcttataaaaattttgattataaacttgataatagtgattatgatgacataaagaaagttacaattgacaatattggagaaaaatcttggaatgctaaatcaaatgaagagaaatctgaaattttagagaaggtagcaaatttgtatcaagcgttcttctcttctaagaagcgggattattatatattgccaaaagtatcagacgatttggcttcttttgttgaatccacatataaaaacgtcaaccagaaacaattaagcaaactttatcatccttcaatgatagagatctatccttctgcaagggaggaaaaaattgcagacgggcgttggatgaagttgttgggaagccctgtgattggagcaattaagaatcctatggcaatgagggtgttacattcattgcgcagacagattaatggaatgttaatagctgttgatgaagataataatgctttgattgatgaaaatacaagtgttgtggtcgagactgcaagagaattaaatgatgccaatatgcgttgggcaatagagacataccagcgtgaacgtgaaaaagagaacaaagaatatgaaaaaataataaaaaatttattcaatgatagggttgttagtgatgatgatatagacaaagtaagattgttgctagatcaacatgaaataccagaaagagggagcgaacaacttgaaaaaacaaagaagaacaaagctgagaaaaacgtaccagtctacaagaaagatgtttcaaaatatagactatggcttgagcagggttgtcgttgcatttacaccggaaaagtaattaatattgctaacttgtttgatgacaatgcgtttgatgttgaacatacaatcccaagaagtatctcttttgatgactctatggaaaatttaactatttgtgatgctcattataacagaactgtaaaaaagaatcaaataccaacacaacttagcaattatgaagaaatcaaggggcgtttgcaaccttggttaaataaagttgaacgattacaagataatgtgaatttttgtaagtcaaaggcaaaaatggcacagaccaaggatcgtaaagattattatatcagacaacggcatttatggcaaatggagttagactattggaaaagcaaagttgaacgttttacaatgagagatgttacatctggatttagaaacagtcaattgaatgatactagaattattaccaaatatgcctaccattatctgaaaaccgttttcaataaagtggaagttcagaaaggagcagtaacgtctaattttagaaagatgcttggtgttcaaagtgttgatgaaaagaaatcacgcgataaacattctcatcatgctattgatgctaccatgttgacattaatcccggtggcagctaagcgtgataagatgctagaacttttttataagattcaggaaaagaaaaaatttaatgaaaacaccactttattagaaagagaactgagtaaggatattgaaagttgtcattttggtggtaatatttcagatgtagtcccttttatagagaacaatattttggtcaatcatatctctaaagaccaaacattggttccagctcatagacgtcaaagagttagggaaaaggttgcttggaaatatgacgagaaaggaaatattatttgtgacaaaaatggcaatccgcaaccattaaggtggattactggagattctatacgtggtcaattacataaagactcattctttggtgcgataaagcaggcgcaaacaaatgatgaaggaaaacttttaagagatgaaaatggtagaatactgactacagataatgttagttatgttataagacgtgagttgaaatacaaggagaatgctcaatctgcaggctttgctgattggaatgatcttgagaattcgattgtggataaaaatctttttaagattataagagggcaattttcagatgggacatcctttaaagatgcattcgaaagaggaatttatatgttcaagaagaatgctcgaggcattattgatttttctgaagaatgcaagttgaataagatacgccatataaggtgcgtgacatctgtaaagaatccattgccaataaaaaggcaatcatatctgtctgacaaggattataaaaactcctattatgcagaaatgggggacttgtatgtgatgtgtaaatatgaaagtgaagatagaactgtaagagaatatcgtatttggagtttgtttgatgtaagccaaaatagaaaaatgggattggaagacatcccgtcaactatagaaaacaagaaacatattaaacttgttcaaactgagcaacttcgttcaggtgatatgttgttattatatgaacatgacccaatggaacttagggagatggatttttcagaactttctaaacgattatatgtgatttgtgggtttgagaatcctggaagggttgtaatggtaagacatctcaattctcaggcagataaggatttaggaaagggagaatcaataaaatcatttgcaataatgccagaaaaaattcgttgtggaatcaataccttaaaattcttaagaatgggcactgattttcatttgacatccatgggcgttgattttgaatagttgtttctataatgtagttgaataaatatcagcataaagaatgattaaacgtacccttagtttcaataatccagcctatctctcgcttaccaataagcagatggtgatcaagctcccggaaattgagaactcaaatctttcggagtcttttaaggctgagtctgtaagaactgtccctgttgaggatattggcattgttgtgcttgatgacaaaaggattactataactcaaggcttgttagaagctcttcttgaaaatgactgtgctgttataacttgtgataagagtcatttgccagttggcttgatgcttccgctttgtggaaatacaattcagaatgaaaggtttcgtgagcagcttgatgcctctgttcctctaatgaaacagatgtggcagcagactgtacagtgtaagatcctaaatcaggcggctgtacttgacaagtgcagaggtgtggaggttggtaatatgctttcctgggctaagcaagttaagagcggtgatacagataatttagagggtagggcggctgtatattattggagaaatgttttccctgatgttccggattttataaggggtagggaagaggcctctccaaataatctgctcaattacggatatgccatattgcgtgccgttgtagctcgtgcattggtgattagcgggctcttgccaactttaggtattcaccatcataacagatacaatgcatattgcctggcagatgatattatggagccatacagaccttacgttgatgaactggttatacgtcttacgtcagagcgtggctatcctgaagaattgactgtggattggaaaaaggaactgttgcaaatacctgtcatggaggttatgcttgacggtgagcgccgccctttaatggtggcagtggggcagactgcatcatctgtttataaatgctttagcggggtggcaagaaaaattatttatccaactatgtagtaaatggaccggttcagtgaatatagagttatgtggattcttgtgttttttgatttgcccacagaaacaaagaaagaccgtaaggcatacgccaagttccgcaaggatattatgggagacggtttcactatgtttcaattctctatatacatacgccactgtgccagccgtgagaatgcagatgttcatattaagcgtgttaaatcaatgctgcctgaattcggtgatgtaggtgttatgtgcataacggacaagcagtttggcgcaattgaaatattttctggcaaacgcagtaaggcacaaaaagcagagcctatgcagcttgagttgttttaattagttggctttctttgacaatctgttatatcaattggcgttttgttgctattgttctgctggcatttcgttttgctttcaaaacttgcgcaagccgaatgcaaataagcttgcttaatttgctgaggtgccgccaaggttgttcaattattgatctttgatattctgttacatctacctgttgttcttgttgttgttgctgtaagttgtgatttgctttcaaattttgtatctttaatattctgttacatccaaccgccaagtgtggggcatactctacaataacgccctgcctgacatcaaatataatgtaggcaaagagatagccgatgctgtaggttctgcgctcggtaaagcattcggaaatacaccctcttaactttacgatacataattaaatagaaaggattttttaccctttgatagaattttttttgaataatatttgcataataacaaaaatgttattacctttgcattgtcattaagacaagagctctatgatatttgatgacgaagggctaaaggcccggatagaagaggcgacgaaatcactcgacttctatcttcttcactattggagcctaatcggcagcggttactccaagaagatgttagaccagcaaatcaaggaacttgaaaaagaaatcaaggaacttggacggtggacctgacagaatgaaccatcggaggggacgccctccgatgatgttctatttaaaaaccttctaaatcataacagccatgacaaagacagaagaatttttatcactgagaaagcgcatagcagccggaaaccttacggccgaagaggcattatccctaaacaagagagctgatgaaataataaactctcttgcagaagatgagaaaccgctgttttttgaagccgttaagggtgacattgattcaataacagatgatctaaaggatgtgagaaaaacccttacaataagggaaaaacttgagcctgtaatagaagggttgaacgtgtcctatatagcaagacattatttcaaacgctccccacactggttttatcagcgacttaacggcaatgcagtaaacggcaaacctgcatcattcacggaacaggagttatccacacttagctttgctctgcatgatattggagaaactattcttgcctttaagttataacgcaaaattatttgcggagtagcaaataattttgcgttatttgcagaaaggagaatataaatgcttacacttgttttttacatattattcctaattttcttgtattacggaacaaaaacggtaatcaagaatgccattgcaagcaaaggtcttttttccccagattttaatgagctgaatcatgtatggactataccatggaagccatgggagaaagcagggcgagtaaaactttgtttgttctactacttactttatctgccatgcgtattgctattattcattcttgatgcgattttggtttatatggcactttgtcttgcctaccatttaattacccgttgattatacaaaaacactgtcctttaacagccgccaatgagcggctatttttgtattatcaaattaaggacaaatggcaagactcagtgaagaccagataaactggatgctcaaccgttgtgatttgctttcaaattttgtatctttgatattctgttacatccgcttaacccacgcatcaggtatctcggtagttgtgatttgctttcaaattttgtatctttgatattctgttacatctggtgcgttattgacaactgcacgtttgaggttgtgatttgctttcaaattttgtatctttgatattctgttacatcactcccaaccttcatcgcccaccttggtacgttgtgatttgctttcaaattttgtatctttgatattctgttacatcatcatctgcctgccctccagcggtgtaagcgttgtgatttgctttcaaattttgtatctttgatattctgttacatccctgcatcagtaacacctgtgccgcaaggtgttgtgatttgctttcaaattttgtatctttgatattctgttacatcgaatccgataaatatatctccaagcattacgttgtgatttgctttcaaattttgtatctttgatattctgttacatcgcactactgacggggtgcgaacgccattgtgttgtgatttgctttcaaattttgtatctttgatattctgttacatcaatgttctggcgcacttcctctgcgctcatgttgtgatttgctttcaaattttgtatctttgatattctgttacatcagccttttcctgagttctgctatctccctcgttgtgatttgctttcaaattttgtatctttgatattctgttacatccgctcctacactggtaaccacctaccgagagttgtgatttgctttcaaattttgtatctttgatattctgttacatctttgcccgtaggggtcttcatctcaacgaagttgtgatttgctttcaaattttgtatctttgatattctgttacatcggaagtgtag

SEQ ID NO: 4004 - DNA, 16958 bp, synthetic construct
  misc_feature 1..16958: note = Synthetic
  source 1..16958: mol_type = other DNA
cattaacattacagataatgctgttatgaaacgaatatgccaacctatttatcaataaaaaaactcataaaatgcacagaatattagtagttgacgatgaagaagatatatgtgaaattcttcagtataatctcgaaagcgaaggttatctcgttgatgtagcgcataacgccaaagatgctttacacatcttgaccgatgaacatgatttaatccttttagatgtaatgatggacgaaatgtctgggtatcaaatggctagtattctaagaaaacagcataataatgatattccaattatttttataaccgcaaaaacaggtgaaaatgacgtgcttacaggatttaatctgggggcagatgattatatttccaaaccgttttcgctcaaagagcttttggcacgagttaaagttgttttaaaacgtacctctgctgccacagaagaaaaatcaactgagaatatagtagtgggtaatttgaatatcgacctgaacacattgacggtatcagttaaagactcccctatagaactaacaaaaaaagagtacaagatattggtcttgcttgcacaaagtgtaaacaattatttctcgcgagaggagatattgcaacgagtttgggaaaatgatgtttatgttttagaaagaagtgtcgatgttcatatagcccgattacgaaaaaaaatacgcaattcaaatttgcagattgtaaataaggttggttttggttacagcttgaaagtaaaatagttatgacacacaagagaaaacttctaatagctttttttgctatttttttagtttatgctttcgtaattgcttggttacagtattacaaggagaaagagtatcaaaccaatagccaaaaggagactttgcgtattttcgccacaatggtcgaaaaaatgttagaaaactcaaccgatgcagaaggaacattacactatttacctcaagatgtacgtcttacactgatcaactcgaaaggggaaattatgtatgacaatgttgccgaaaacgttaaagagaaccatttgggacgacctgaaatctattctgcaaactactcaaacgagggatatgctattcggaaatcgagtactacaaatcaagattacctctattatgccagaaaaagtaagaatggctcgtttttacgattggctttgccatatgtaattacctggacgaattttattcactttgataatattttgctgtacattgttgtgtttctgttttttataacactattggtattggtattaatgacagataaattcgataatgttatgagaactttgataagtttcgtaacagatgttgaaaaaggaaatatcgactacaataaaattcattttcccgatacccattctggcgaaattggtcgtaaaataatatccttatataaacagctagaggacagcaagttgcaaacagttcaggagaaagatagaaatcgtttgatgaaacaggagatgacaaacaatattgcacatgaattgaaaacacctgttagcagcattcgaggctatcttgaaatattattgaataataaggatataggatttgaaaaacagcaatattttatagaacgttcgcatgcacaaactctgcgtttgtcgaatctaattcaagatgtggcactgattaccaaactcgaagagtcggcaaatctttttccgaaagagaaattggatttgcatgagatttttgaagaggcggctactgaattgcatgaagtatataaggaacagcaggttacaattgaaaataaaattcccgaaaaatcattctttgctggaaattataatttaatgttctctgttttccgtaatctgattgaaaactccataagatatgcaggtgacgatatacaaattgttgttgaatgtgtagagcaggataaaacaagttatcttttaaaatactacgacacaggggttggagtaaataaagaacatttggataaaattttcgatcgttttttgcgtatcgataaaggaagaagccgaaagagtggtggcacaggtttgggtttgtcaatagttaagcacgctatacagttccacggaggaacaatagtagcacaaaacagaccagaaggcggtttgcaatttgattttaatattttaaaataaagtcctcaaactacgattaactgtctatatcagtgtgtcttgcgttaatcccttcagtgagataaagtaaatcttcggcaatatttgtacacgaatcgcctatgcgctccataaaataaagaatgcggctaaggtttaagtaggcaggcatttcggctgccttaacgtctttttgaaacagcatttggtgaatttcatgataactttcatctatggaatcatcagttgcaataatgttgcgtgcgatataattgttttcggtatgaagcgcgtaaacaatgttgtcaaacattttgcttaccattccaaacagactaatcaattttggttgatattttttccaaacagattttgattcaataataatgggtagacgtttgcaaatactgttgagtatatcacccattcgctcaatgtcaacaataatatttagagttgacaccattctgcggagatcaatagcacgaggagtaagccgaacaatatcgttaattacagtttcacgaattttgttctccatgaaatcaatgtttttttcattctcgcgaaccttttttaattcctctggagtgatactttgctcaaggtgtttgcctacaagaacaaattgctcggacataatatccgttaaagcaataaactcttcagttagtatttttaatgaattatctcttatcataactctatgttttgtcagtaataatacaatattatggtgaattatccaactttgccgattaaataatcttcagtgcgtttatctttaggattagtaaacattatgctagtctcttcatattcaacaagttcgcccaaatacataaacattgaataatctgaaattcttgaggcttgcgacatattatgtgttacgataataatagtaacctgttcttttagctgtacaagaagctcctcaattctgagagtagcaatggggtcgagagccgatgttggttcgtccataagcaaaagatttggtttaagagccagcgtgcgtgcaatacagagtctttgctgttgtcctccagatagaaaagttccttttttgtgaagaacatcgctcacctcgtcccataatcccacattgcgaagattctcctcgacaattctatcgcgctcagctctcttaagctttatgcctttgagcagatatccggcgataacattatcgtaaatgctcattgttgggaaaggattaggacgttgaaaaaccatccctgcctgagtgcgcacatcaataggattcatttggagtatgttgcgaccatttagtataatatcacccgtcattttaatgccttcgtgcaatgcgtgcatattgttgattgctctcagaagagtgcttttgccacaacccgaaggtcccattatagcagtaatagtattgcgagtaatatcggcacttacatcgcgtacagcgtattcattgggtgaataggaaatgcttaaatttttcagttttaaaacgggttcttgtatggttttcatctgtttttctatgttttaatcgcaataaaaactttgaatttgttaaaaaataggacttctttttttagcaatggtttttgccgtaatattaagaattaacacagctgctaataaaaatagcgatgcactccaaatcatactttgcaaattggggtcgttataaaactcccagataagtagtgaaacagaggtgtttggcttggtaatatcccactgaatgtacgagctgccaagaatagtaagcataagcggtgcagtttcgcccataacacgcgaaatagctaaaagtattcccgtaaaaatgcccgggaaagccgaaggtaaccaaaccttgaaaatcattgctgaatatgaagttcctagcgaaagtgcagcctctttaaggctgacaggtaaaaggttaagagtctcttcggttgaacgaataatcaatggaagcatcattattgccaatgccacagctccggcaatagctgaaaaagtacccatgggaataacaatccacaaataagcaataataccaataactatcgaaggtgttccctgcagcaaatcactgagaaaacgtataataccggcaaaacgtttatttctgttttctgagatatatacaccacaaaaaataccaacgggaatagcaactaatgaagccataattacggttagaaacataccaactattccgttagcaatacctcccggaacacgttctccgatactgttcgccatcatagcctctaaggttgtgggcgtggtttgaatgaaaaaatcgagatttatttgtttaatgcctttaataagtactgttccgatgataataaccaacggcaacgcaattatgactgaaaaaactataacaaaccataaaaacagtttgtctttaatcaatctcctcttattaaaactaacatctaacttcatacgcccataaatttcggatttcgaaatcctttatcttggtttcatatttcttattaacattcgtcctatcgagtttgtaatcagtgtgataataaaaagcaaaagtgcaatagcaatcagaacagcaaggcgattatctgaagcttcgccaaactgattagcaatgatacttgccattgtgttaccagtatctcccaaactgagaggaatagtgtttgtgttaccaataagcatagtaacagccatagtttcgcctaaagcacgccctaaagccagaataaaagaggaaataacgcccggtaacacggtagggaatacaattttggttaccatctctttgcgagtagcaccaagactgtaagctccctcttttaaatctacaggggtcattttaataaactgactgcttaacgaggctgcataagggataatcattattgctaaaacaatagatgctgttagaacgccaaagccctgttttgataatccaagattcataatcacaggacggagcatatagaatccccaaagtccataaacaattgacggaatacccgccaaaagatcaatcattgtctctaaaacggaagctacttttgtgcccttaaagtattcgcctgtaaaaattgatacgggtattgaaaaaacaatacagatagcaagcgcaagaaacgatgttagaagcgtcccgacaataaatgcaagtgctccgtaacgctccgagccggcagtatagttccattcggatgagaaaataaagctgaaaaatccgtactccttaaaagctggcattgctccggtagttagggaatatatcattcctcctcctataatcaaaataagaagtgctgctaaaaaaagtgttattttaaagattctgtccttcataaaatcaattaacaattaacaatgagcaattaataattgagttaaaagtacttttcccttgcaccttttctctttctcctctactgatttagttgttaaatgtttaatatcgtaataaaaacaaagggtgttgcgagcaggaaccgtaattcatactatgcacaccctttggtgaaaatattggtaaagaaaatgaaaaaacgtgttttttgttcccttcggctctatccaacattggctgtttaacgaacaacttggtattagatttaagcctaagtatctcattctttattatttaaaaaaacttcaatagtggtttagctttctttgttggtatataccattctgtcaatatttttcagggcttgctctttaaccgaagcaggaattggtgcataatgtaccttttcagtgcttgcctgtacttcatcagaaagcatgtaacgaagtagagatttaagtgcttcggcgtctgcctctgtgcgtttaccgttattaagctcctcatatacaataatccatgtgaacagactaattggataagcacccggctcaggcgagttggttatcatacagcgtgagtctgcaggaatatcggtatctgcagcaattgaaattgagcttgacgatggtgtaacaaactcaccattagcattttgaatacttgcaaaattaagctgttgagcaaaagcatactcagaacctatatatccgatacttccgtcagtttggctaagtacgccagcaacaccggggttgcctttagctgcaaatcctgcagggaaagaaactgatttgtcgcctccatatttttctttccaatcgctatttactttgcttagataatcggtgaatacgaaagttgtaccactaccgtctgaacgataaataggggcaatctctttgtgtggaagattaacaccttcgtttacagcctttagctgttcatcgtcccaatattttatctgacctgcataaattttggcaatcaagtcaccggtaagtttaagatttgttactccctctatgttatatgctaatactactgcacccatacatgttgggatatgaattaccgaaggcatatctatcatctcttcatctgtgaggaaagcgtctgttcctgcaaaatctacaatactctcttttaaacttttgataccaccaccactaccaatacctccatacgaaacagtgttgtttgtagcttcaaaataggatttaaatgtcattaggtaaaagggttgcggaaaagtagctcccgctcctgaaagggttacagttcccttgttttgacaacttacagcaacaatgccaaaggctgccagcataataaaaaatgtgtttcttaatttcattttctttacttttatttattcatattttctcaacacaaagtaaccatgactaagtttcattcctgttacgaaattgttacgaaattgtaacaaccgcttaaacaatcttacagcttgatttccaggttaatatatcctgcaatttttggttctgtgggagttgcttttggtattgtaatccagatgtttggagatatgcgaatatgcttatttggagaatactgaaaacccaaaatagccgcattttcttctctatcgatattccattcattagccgaggagagacagtcccaacgtgcaaatatttcagcctttgcagtaaggcaggtatatataaaggctgagaatccatcttgatgtttaccttcggagttgcttgtattccaaatagcgctatactctactcctgcgccgaatttattattttcgtagcctgcgaagcatgaaagattttcctgtccggttaagaaatcgtacccgtgatcataatctttatatgtaccagttatgcgaagtgtaagacctgaaaagagtttgcatgtaagacccgcaccgtaaaggaaatatggatcaacactaatctttttaaacccttcgccgtttacaaacgtcacatcggcttcaaaaagcgaaccgaattgatactcggctatcatacccaaatcggcgacgtgagcaaatttgtatttgtcttgaaatgttctcataatatagcgatgtccccatgcttttagctgagtatcgtgcaatttcatatctaaaagaccaacatttagcgtaaagtttgattttttccacttaagaaaggcgtttctaagaaaacctattcgctgtaaatcgccaacatcagaagattctcccgcatcaaagatgactgttgtagagaatgattctgaaatcatatattgatagccaagataggctcgctgaatctcaaaacctgtattttcaatatctgtgaattccgaatggaaattcccaaaaatcataataataggtttcccgttttgttgtagtgacacttttagtgagtctatctgagcagacgtacgtagcgaagccagcaatagaacgaggaggagtatttttagtttcattttgtattacattctgtttgtccgtattgtttttcgagtgtattattatgtttactcaccatagaagtatttaatccactctttatatgtgtcttgcaccgaaaggcaagtgtcgagcagatattctcttgccgtgccgaactcttttaatccccggtagtaaaattgtttgtattgttcatcaataataaaagggatgatattgttccgcaggcattcccgaaacataatcaaacgtccgaccctgccattaccgtcttgaaaggggtgaatttgctcaaagcagtaatggtattctataacattctcaaactcaatagtgggcaatttgctataccaatcattaagcttattcatttcagagtcaacatcttgtggcatagtggttttcataccgcccacctcgttggctaactttttccaatcacctaaacggaaccagggtttggcggcatcggaagtacccgattttaaaattcggtgaaacgttttgattattgcatttgataatggctcgtctatgctgtctaacaagaagtcgaaggcaacaaagtgatttgatgtttcaataatatcatcaacaggcactgcttcctcctccttgaatcctatggtacgggtttcgaaaatatagcgggtctgctcctcggtaagccgacttccctcaatgcggttagagttgtaggcaagatttatctgtgtcttatggtataagccccctttgcgtttcgcctgtttttcttctataagtcggttttttaagttcattgatgcaataaaaagtagattcaaatatcaaatgcaattttattcgcaaatttaagaaaaatagtcaggttttagattttttctataaccattatttgcttttttgctgttgtataaagagtattatctttgccattattaataagcttataccaaaaagcaattgggcatgaaaaaagtaaaactatttttattgatattcggtattagcgcaatttgttttgctgaaacgccaacaaaattgcgaacagggcaaaacaagtttaacaccgtattaagtgataatcatggggattcaatttctcagcaaaaaaacagaactccgtttgttttaaagatatccccattccatattattcaaggggattttattacaaaaagtttttcggcaggcttaagttttgaaaaaccaatgaaaaacagatatagtttgcatattggggctagatatattttcacagataaaacagatgatctctttgacaaaagatttacagtcatattcgttgaacgagttaacggttttgccttagatgccgagctaagaagatattttggaaaagagaggctggcgatgtcgggtggatacctatcggcaaatttaaagaatctttacacaaaggcagatattgatagcaaaactgtggacagattttctacagcagcttttattaatataggatggcaagagatattcaaatcagggactgtttttgatattgccgtaggggtgggggctaaatatgtagtctcagcttcttcaactgctcctttttatagtgaaacgagacactttatggattcgggtaaaaagccctatcattcaggctatgcctttttcccatttgtaaatattaactttaatttggggtattgcttttataaggggaatagataaaagtattctgaaaatcaagtggttagatagcttcagttgtgattaaagattgtttaagtagtctttaaaatacaatgggactaacttaattaagttaatcccaaggccagggttgattagagatactccgtacaaccaattacaaatatacaaaacagtttttcattatacaagtggcgagcaaaatgacatcgttattaggctggttatggaagagttaaggtatatttttttctgttgtagaaaaattagtaattttgtttattgtggtaaaagacttttacaaataaaaaggtttccacgggtgtacgcggaaaccaagaaaatcttcggcttatagccttattgtgaaaagtctttcacaatttgtatctttttatgaagcaaagatacaataaaaatttgatttgtcaacaaaaaataaaattcgttaaatatgaaagtattaggtattgatttaggtccatcttcaatagggttatccgtccggaatgctaataggggtaacaatttacaagagcagttggagtatttttcatcagttgtttttaaatcgggtataggtaaaggacaatctggagaatactcttatgcagcagaacgcaggataaaacgctcttccaggcgattataccaagctagaaaatatagaatttgggcaaccttagagttgctgattaaagagggatactgtcctctttctttggaggatttggataaatggagaaaatatgacaagaaaaagggattaaagcgacagtatccaattcatgcccaaggatttgaacaatgggttcgattagattttaatggagatggcaaggctgattattcaagcccataccaattaagggcggaattaatgcagcaacaattcgattttactcaacaaggtgacagatacaaactcggcagagctttgtatcatattgctcaaagacgtggctttaaaagtagtaagggagaaactataaaagagcaagaggctacagaaacagaccttttgaatgaagttgaggttgatataaccgaagaattaaaaaaatcggaagaaaagaaatcaaaggatttgaaggcttatatggaagcgaacaatctgaaaacagttggttgtgcttttgctaaattggaagatgaaggtgtccgtatccgcgatagcgtttatcaggctgtacgaacgcaatataaagacgaaattaggcagattttcgagtttcagaaaggactcgatattaatagtgaattttataaaagactcacaagcgaaaagaaaggagaaggaacaattttttataaacgtccactacgttcgcaaaaatggttagttggaaaatgtactttagagggtagtaaaccgcgttgtcccattagtcaccctgagtttgaaaaatttcgcgcctatagttttatcaacaatattcaatacagaaaatctacagatgatgagtggcaaaatctaacattagagcaaaagcaaaaactgtacaaagacaagtttcttaggactgcaaaaggctttgattttaaggagattagagagtggattgaaaaggatattagagataatactcgtaattatatattaagatatgacagagataaagagaaacgtaccattaattatggtgataaaacaaatgtctctggttgtccaatatctagcagattgaaaaacttattggggttggattgggagaaagttgtgttgacaacggagaaagaacgcataaataaaaaaacaggagaagttcgtaaaattacttatacggcagaggatatttggcatatcgcattttcatttgacgaaccagaatttgtaagaatttttgccgaagaaacattgaagtttgataaagcaaaatcagacgcatttgtcagattgcataacgatattaaaccaggatactcgatgttaagcttaaaagccattaaaaacatcaactactttttagaaaaaggattcatctacaccgaatctgttttgttggcaaaactgcctgaaatatttggcgaaaaatggggagagaatgaatcagagatagtgagtcaaattagttcaattatttcagaaaatcgtaaagaaaaagatattaaaagtattgcaaacgcattgattgccaaatataaatcgttgtctttagatgacggcgagcagtttgcctataaaaaccatgaatacaaacttggcgaaaacgacctaaaagatattgaaaacgcctgcatagataaatacgggaaccgaacttggagtaagaagagtgatgatgagaagagagaaatcattaaacaagttgggcaatattatcaatccttttttaaatcagaagatagagattattataagttgctgagattatcagatagcttagctaaatatctgttagataattttgagtttttaaacgtaaaagagttgaaaaaaatctaccatccttctatgatcagtttttatatacctgcaaaagaacaacaaattgaggatggaagatggcttaaactgcttggaagtcccgtagttggggcaataaaaaaccctatggctatgcgtgtattacatacattacgcagacaaataaactctttacttaaagcggtggatgaagacggcaaccaattgatagacgaaaatactcgaattgtagtggagacagcccgtgaaattaacgatgcaaatatgcgatgggcaataagagcatatcaagatggacgagaagctgaaaataaagtatatgagaaagcaatcaatgagctactaaaagaggtacaagcaaccgatgataatatagacaaagttcgtttgttgtgcgatcagcacgaaattttaggtaacgatcagcttcaagaaccgagcagtgaggataaatctcaaaagaagaaaatatatttcgtagaggattataagaagtccaaagagaatgaaattaagaaatatcgtttgtggttagagcagggttgtcgctgtatttatacaggtgaaatcataaacattaaaaaactttttgatgacaatgtgtcagatttcgaacacactattccgagaagcaaatcatttgataattcgttggaaaatctgacagtttgtgatgcttattacaatcgtgctataaagaagaatcgtattccaacagagttggaaaattataataaagatgccacaattaacggtaaactatattctgcaatattgccacgattaaaaccttggtttgataaagtggatcgactaaaagataatgtggagttttggattgggaaatcaaaaaaagctgccgacaaggaacgtaaagattattgcattcgtcaacgccacttgtggcaaatggaacttgattattggcaaaataagctaaaccgttttacaatgacagaggtaaccgatgggtttaaaaacagccaattagttgatactcgaattattacaaaatatgcctatcactatcttaaaacagtgtttgacaaggttgaggttcaaaacggcagacatacttcagattatagaaagatgcttggaatacaaggcatagatgaaaagaaagatcgaagcaaacactcgcatcatgcaattgatgcaacagtgcttacacttataccagcctctgctaaacgtgaaaaaatgctaaaattattctatgagatagaggaggatagacgctctaataaagatataacagaaaaaacaaaggagcttaaaaaagagattgcccaatgcggtttcggtagaaacgtaaatgaaataggtaattttattgaggaaaatattctgataaaccacatttcaaaagaccaaactcttacacctacacgtaaacgttggcgaacaagaggtaaggttgcttggcaacgagataaagatggcagcattatttataaaaatggcgaaccacagccaaaacgttggattacaggagatagtatccgtgggcagttgcataaagattcatttttcggggcgataaaatatcctaaaacagacaaatataatattcctatacaaggtgatgatggtaaatatgtttatgaaacggataagagtggtaatgaagttattagcatggtaatacgagtgccgataacgagttttaaagatgagaaagatttagataaaataattgatccgacggtaaaaaacagtattttgaagacaattgcaaaacgccaatccgaaggaaaatcattttcagtatctattaatgagcccatttggcttttagatagtgacggcaaagaaattaaaaaagataaaaacggacgacttctactgcctattcgtcacgttaggtgcagagtggcggcaggaagagggttttttactaaagacaaagcaattgaaataaaagaacaaacttataaatccaaaaaagattataagagatattattatgctcaaaatgatggaaactatctgtgtttactttatgaatgttatcataaagggaagctggaacgagagtttaagtttataaattatttcgaagtagcaaagttggggataaaatcatctgatgatatcaaaaatgaaccttattttaatgaattaagcaaaaataaaaaacagtataaactctctgctattatcaagacaggaaccagagttttaatgtacagtaaaaagcctgaagaaatatttgacttagagaacacagaattacttaaacgtttatataatgtctataagtataacttcacaggtagtaaccgcatttatttgcaacaacatcttgaagcaagagagaatgaaaaaatcaaaaatgatgaagatttttctgtttttgataatacaaaatatcaagcaagattaaatcttgttgcaagtaactttaattgtattattgaaggacgtgatttcgagatttccgacagtggaaaaataaattttattaactagagatgataaaaaaaacactctattttggcaacccaacatatcttagtttgcgaaacagacagctgacaatcaagttgcctgaggtagaaaagtctgatttgcccgaaacttttaaagaggattcggttattactatccctatagaggatataggagtggtgttgcttgataacaaacagattaccattacacatggagtaatggaggcgttgttggaaaataatgtagctctgataacctgcgataatagccatttgcctgttggtttaatgcttccactctgtggcaacaccacgcagagtgagcgtttcacacagcagatacaggcttcgctaccattaaaaaaacagctttggcaacagactgttcaacagaaaatactaaaccaagcagctgttttagagtctgttatgggtgaagaggcacgtaatatgcgtgtttgggtaaatgaggttcgcagtggcgaccctgacaatttagaggggcgagcagctgtatattattggcgaaatcttttcccaaaaatccccgactttacacgcaatcgcgatggtattccgccaaataatctgctaaactacggttatgctattttgcgcgctataattgctcgtagccttgtatcaagtggacttttgcctacattaggtattcatcaccacaatcgctacaacgcttattgtcttgcagatgatgtaatggagccgtatcgcccttatgttgaccaaattgtgataaaacttttggcaagcggtatagattgctctaaaattacaaaagagattaaacaggaattgctacaaattccaacagttgaggtaataattggcaaaaggcgtagtccactaatgattgccgcgacacaaacatcgtcgtctctctataaatgtttttcgggtgaacttaggcgagtggtttacccaactttagagccttataatacagatggatagatttagcgaatatagaattatgtgggttttagtatttttcgatttgccaactgagacaaaaaaggagcgtaaagcagcagcaaagttccgcaagcagttgattgaagatggctttactatgtttcagttctctttttatattcgtcattgcccaagtcgcgaaaatgccgaagttcatataaaacgagttaaaggctttctgccggagttaggcaaggttggaatcctctgtattaccgacaaacagtttggaaatatggagattttctattgtcaaaaggaggataaaaagccatcaccctatcgacaattagaacttttttagaaataaaaaactgatatatataaagagaaaatcccgattttttctcgggattttttatttctaaaacagtctgtagtttattgattctcagcacggtgtccatattgtgctgttttagatcctaaagatacaaatttctgaaagcaattcacaacttaaaattagccgtgtttttggttgtttttgctgttttagatcctaaagatacaaatttctgaaagcaattcacaacctgttaagtcgaatactgaaagcgttatctgctgttttagatcctaaagatacaaatttctgaaagcaattcacaacgtgttttgtgcaatagggctgtggtggtttgctgttttagatcctaaagatacaaatttctgaaagcaattcacaactgcaaatatagcgaaattgttttaaattaggctgttttagatcctaaagatacaaatttctgaaagcaattcacaactgttttgatttgcttgtaatgctacaaaaggctgttttagatcctaaagatacaaatttctgaaagcaattcacaacataaggattagccattgcaaccttattaagctgttttagatcctaaagatacaaatttctgaaagcaattcacaacaacagcttttacggaggcggacacggtaaagctgttttagatcctaaagatacaaatttctgaaagcaattcacaacgtgttaattggacaattgacgacaccgacagctgttttagatcctaaagatacaaatttctgaaagcaattcacaactgcaatgggtatcgccaacacggcgcaaagctgttttagatcctaaagatacaaatttctgaaagcaattcacaacaatgtagccgagccgtgtcggtaatacaaggctgttttagatcctaaagatacaaatttctgaaagcaattcacaaccaaaagcgataacgaaaaaagtaattaatggctgttttagatcctaaagatacaaatttctgaaagcaattcacaacaagcgataaaaaacataaactttaatcctggctgttttagatcctaaagatacaaatttctgaaagcaattcacaactacggttgtaataacacgaacgaattagaagctgttttagatcctaaagatacaaatttctgaaagcaattcacaacattttacaaatttttgcaatcacttcgatagctgttttagatcctaaagatacaaatttctgaaagcaattcacaac

SEQ ID NO: 4005 - DNA, 16430 bp, synthetic construct
  misc_feature 1..16430: note = Synthetic
  source 1..16430: mol_type = other DNA
tatattgttttttaataattactaaatttctctttccgttctcgaaacaatcattcacttttgccactgctcccactttttgccactgctccgaattaagttgcaaaattacagactttttcaaaagtgaacaaaataaaatgccaaataattcaaataaaacgccatttcattcgttcaaatcgccgttttatctgtctttatctattcgttttgaactgttttcaatccatacgctataccctccaactgcatgaggcggtctctcttggggtgtcgcggacaatagacaaagcagtcaatcatcaccaaacgaccgtgaagctcgtcaatgaaacaatagttcacaaacggtcctcccatccaatcgccaaacaacctccacaaaccccgagtctcctcggcttcaaatcctccgattgacaccctctgagaataaaacgggctgcgggtttccgttcccatgtacgaatcctttgcaggtccgggaatgtttgcctttgccacagaatccctcattgcgataatctcctcttgcgaaggcagcatctttcccgaatatggttttgtgcaaatcataatatccagactctcgtccttggtctcctttctcagccacataaaatccgacttgtccgccgcaatgtaaaactcctccgacactgtgagccaaaaaccaaatcgtttcttcatctttctcgttacatcggtgttttccaatcgcttgaaagccgaatatactcttttgcgttcgttttcgtaaaattggttgcggattttgtcggcattgcgagaaagcaatgcaaaaaggctgtcgcgattgtccgtctcaaaaaggaagtaagcctgaggcgtcgatttgaaatcaactgtggctttcaacttgttggcgttgcctgccttcatgtcgataacgatgatatttctgtgcttctgcaacatctccgaattgaagaagccctcgggattcatttgcaccacatcaaacaaaggctccgcctgtggcagtccctcgcaagccttcatgaaacaatgacctatgctgtctttcaactcgcccttgtagagctgctccggcacaatcaccaacacctccaaagtctttcctcccgaagaaggtaaacccttaggattgtcgttcttcacctcgcttttttttgaacaaccgacagcaaaaaacatcggcaaagcaataaaacacaaccacttacaaaaactccacttactcataatcacaaaatttacaaagtgcaaaagtacaaaaaatcactcacattccgcatctttgtccgtcaaataggcttaaactgtccgtttgttttttcgacaagtcttgccaaacaatttcactttgatactaaaaacatcaaaatcttttgtatgcaaaaacaacgctctccacatatttggaggcattgcacacttcttacgatttttgcgaaaatgtgttctctgatttttttctttctacactctacatcccccctttagggggggtgtagaaagaaaaaaaagaacacattgcggagaataaattccacgaaagaaaaatcgaagaaaattgcagaactttgacgcaaaaccaaatctacaaacctcaacaagacgacaacgaaaaagaaaaagtatcaaagccaaacagaacaatacaagacgacaaagcactcatgcagcaagcaaacacagaaagacgcacgacatctgcgaacgctcaatctgcatcatcttgccaaaatctgcatcaaaagagacaaaaatgaggcagatttatcacctttgatgcagaaaacaaagagaaaatccgtaactttgcaacgacaaaaaaacacaatgtatgcacacattcgattacaaagaagctcccaaacagctattgacaccagacattgtcaatatgctgacagcattgcacgaatacagaggcagacaagagttatactcagcagccgaagccgatgtactgacagcattgttggacatagccaaaattcaaagcaccggagcgtccaacaaaattgaaggcatatatacatcagacgaacgattggaagcattggttatgaaaaaggcagaaccacgcaaccgttccgaagaggagattgccggatatagagaggttttggctactattcatgacaattacgagtatatccccgttcgtcctaacactatcctgcaactacatcgcaatctatatagtttcggcagcagcgatatgggaggcagatttaagaatgctgataatgtaattgccgaatcaggcaaaggcagacaacaacgagtacgatttatacctgttcctgcgtttcaaactcccgaggctgtggagaatttgtgcaacgagtttaactatgcaatcgaacgagccgaatatgaccccttgctgttgattgcgatgtttattatagacttcctttgcattcacccattcaacgatggcaacggacgaatgagccgcctattgaccttgcttttgctatatcgtagcggctacatcgcaggcaagtatgtcagcatagaaatgttgatagaacaaacaaaagaaacctactatgaagccttgcacaatagttcggtcgaatggcatgacaacaagagcgattatgcaccttttgtcaaatactatttaggaatcgtactgaaagcatgcaatgagtttcaaagtcgcatagagcatctcaaatatcgcaaattgtccaaaactgacagagtaaaagcagtgtttgaaaagaaactcggattagtcaaaaaagcagacatagccacactttgccccgacattagcgaaacgactattgaacgcactttgaaagaattgcacgaagcaggttttatcgaaaaagtcggcaaaggacgagccacaagctatgcgaagaagtaatcaattactttttctcatcagcaacttattagcgttgctgacagcgtttcgaggacaagttgtaagcagaagataagaccattgttgtctttccatgttctgaacaaacaatttgactacaaacaatcaacaccatatttgttgaaaatcaaaaaaatccgtaactttgcaacgacaaggttacattggtttaataccaaagcagcagtagttgtaatcaagatacaaaatcatggaagaagaccaagaaaagcaaccgagaaagcaaaaagaattgcaacattttgcgttagatgaagcagacaatatcatagacatcaaagatgttgaaacgaaagagtccggcaaaaaagtcgaacgtcatttcttttgcccgaattgtcatcaggaaatgtttccgaaacaagggaaaatacgaagacaccacttctcccataaagcacattcagattgccctcatgacggctatctgcacgctcttgccgaaaaactaatcatggattggttcaacaaacaagatcgtgttaatttgataatgaactcaacaagagtatgcgaaagcataaacacctgcaaattttccaacagcttatgcaaacaaacatggcaacaaggatttaacttgaaggaatactacgatagttgcacacccgaacgaacctacaaaggatttagagcagatttgttttgcaataggacaaataattctgatgacccaatcttcatcgaaatcttcgtaacccacaaatgcgaagaagagaagaagaactcgggtatcagaataatcgaaattaaaatagaaacagaagaagacattctaagcataatcaactccaacaaactgacagagggtgaaaacatcaaattgtacaatttcaagaaagaaacttcttgcaacaatattcatacaccaatttcaaaatatattctctttccttcacaaaaaagctttttagacaccaaattctcttgtaagaattatgacaaaaaacggagaggaatttttgaaatttccgtcaataggtttgacaatattcatagtggttctttactccttattggaaaatgtcaagcgtttatcaaggggtatctaaagaaagattgtcaattgtgtttttggcaaaaaacggatagtctttccaaagacttttgtatgctgtataaaaaatgtggaaaccctaaatactgcaaagacaacaatcctctatcgtgccaaatgttcaaaccaaaaatccctttcatacagatgacagccaaacttttagatccaaataaccccaccaccgaagaccattttgatatttgggagaagccactttaatacgcaatatatcgtcaaattttcttagctttgcaacaaaaaaaatcatgatagttatgaaattcaaaagtattacaaaaagagtatcgggcattgcactgctcgcattgttgtttgtatcttgcaactcaacatttttccaagttgtaacattggactattccgaaaatgtgaaacctaacgaaggttatcttgtgtcagaaaataatgatttgaaactcctgtacaacttttggagagaagggttgtatatgaagtttgacattatcaacaaaaccgacaaagatgtctttattatcttgccgcagagtttctgtatcaagaacaatcttgcaattccttatagcgaaaacaaagtaacctcaagcagtagttattcttcttcaagtctttccggcacaatagttaccacacaaagcactcaggcgtacaacaacctgcaatttgcctgcataccacctcactcatacataacgataggttcaattccgataatcaacgaacgttttaccgactgcaacccaaagcattcatttccctctgattatttcacttataactatttggcaaacaatactccgcttcaacttcgcaatcgtatagcatatagttttaaccgagatttttcaaccattcactatatcgacaacacattctttgtttcctcctatatcaacagcaagggaactgaaagggaaacattcattcctaaatgcgatgccaatgctcaacgtttcataacgacaaaagtacctatccaaaatccgacgccaaatatgttttacatagaatacgaaggaacagagtatatagggcttaatggggaatatttattaaactaatagtctatgaaaaagccgatagtaattttcatcattggcatgattgttggagcaaccctcttggcaatcgggtatctcattgcagcaaacattgattacgataccacagagtatttcaaaactgcgggagaatgcagagaagacatcggcaagttcatggtaaaagaacaaatctccaaagacaaggtttttgcgtacgttaattgcggcaaggaaatcacattcgtagccgacctgatcggaattgacgaagaccatttcccaatggcgttgctcattactccgaataaaaagagttattatgacaacgaaataatcgaagtcccttccggaaagtgtgcaaggcagattggtgtttataccatgtatcgtgatggtacgaaaagaacaatacctattttcagaatagagtaactctccacaaacagcctgctgttgtgtattcttttgtgatatgacggatttttcgtaattttgcagaccgaaaaagcagacgagttatgttagagaaattggaagctatccacgagaagtttttggagattgagaagcagatgaacgatccggaggtgatgaacgacatgaagcactatgtcaaactcagcaaggattacaaggatttgcagcccataatcgccgcctacaaggaatacaaaaacgttttggaaaatatagagaacgccaagtttgtgcttaacaacgaaaaggacgaggagtttaaggaaatggcaaagcaggagcttggagaactcaccgagaaacgtcagcagatggaagatgacattcgcctgatgctcattccgtccgaccctcaggacggcaagaatgcggtgtttgaaatccgtgcaggaacaggtggcgatgaggcaagcatctttgcaggcgacttgtacagaatgtacaccaagttttttgagaagaaaggttggaagacggagattgtcgatttcaccgaaggaacggtgggcggatataaggagattgtgcttaacgtttcgggagagggtgtttacggacagatgaagtacgagtcgggtgttcaccgcgttcagagagtgccgcaaaccgaaactcagggacgagtacacacttcggcagcatcggtggtcgtccttcccgaagcagaggagttcgatgtcgatttgaagatgagcgacattcgcaaagacactttttgttcgtccggtccgggaggtcaatcggtcaatacaacttattctgcaatcagactgacacacattcccaccggcattgtggtttcatgccaagaccagaagtctcaaatcaagaacttcgacaaagctctcaccgtattgagaactcgtttgttcgagttggaatacaacaagtatctgaacgagattgcctccaaacgaaaaaccatggtctctaccggagaccgttcggcaaaaatcagaacgtacaactaccctcagtcgagagttaccgaccacagaataaattggacgatgtacaatctgcctgtgttcatggacggcgaaattcaagatgtgttagatgctctccaacttgcggaaaatgccgagagattgaaggaagctgtcggtcaatagacaacaaataatcacaaggataaaatacagggggaagttcttacgttccccctatgttgttttaagtatatatgccgatgaagagattttgtcttagcgttatatttgtcgttttcgggtttgttgcctcacaggctcagtattacaactctgcaataggtcagtggcaggaccatttgtcctactatgcaactcatgcggtcttttcgaccggaagctctgtcttggcagcttcggagagttcgctcttttatgtcaataagtacgacagatcaagcaaaaggttctcgaaagtaaacgggctgtctgatgccggagtaaaggtaacagcatacgaccccgaaacaaaatctacaatcatcacctacgacaactccaatatcgacattgttcaaaacgacaaggtgtacaacatatcggacataaaggtgcgaagcattgagggtagcaagtcgataaacaacatctgtttcaactccggcaaggcttatctttcgtgcggcttcggaatagtggtcttggaccttatgcgacgagagatttacgacacctactacataggaacaaacagtgcaaaggtggcagtcaatgcggtggcaatcaacgacactgcaatctttgcggcaactgccgagggacttctgtacgctcccaaaaacagcaatgccttggcgtcgagccaaacgtggcaacgcatgagcgacattgccaataccggaaaaggggactacaacatcaactttcttttgcaaattaacccttcggagctgcttgtcggcactgcttccgaaagctcgaccaacagcaccatatacatctttgacggaacaaactggcgaaccgcattcgacgaccaatatgtccgcaacctgcgattggaggacgatgtgcttaccttggttgcttacagaagtgtcaatttctatcacagcaacgatgtgagttcgggacatgagttctttcacctgagcgatgagtggaatccgcttcacaatgcccacttggacgtgtgcgatgcgataattgacggtgaggatatatggttggctcacgaatatgagggcttgttgtgctatgagaactacaagcaaggctctctgactgtcaaaaagtacttccccgacggtccgatgagcaacgatgtcttctcgattaccgcctcggaagacggaaagatatatgtggcaccgggaggcaagagatatatgtggcaccgggaggcaagacaattcaaaacgctccccgaggcatcaaagccaacgtctatatctttgacggatactattggcaggctcttgacgaaactcctgcattggacacactcaaagacgtgctgaacgtagctatcgaccctcgcgaccccaaacatctcatgctttcatcgtggtggaacggcgtaatagaggtacgaaacggcaagataataaacgtttacactcaagagaacaccaacaacaccataatccctcacccctactgctatcgtattgcaaaggttgagtatgacgaatcggcaaacctgctgattgcaaactccatggtgcaagacggcttttgttatctgacatacgacaacacttggggcaagttcgagacctattcggcaataggactgaacgagataatgggaatggaactcgacaagttttatcactacaagttcctctggacggcaaacaacaagatattagtgttggacaacaacggcaacaaagttctgctcgaccccaacaatggttcgtatgacaagacgaccaaggtgaactgcataacgcaggacatggacggcgaaatgtggattggaacagacaaaggcatcaaagtggcatacaacattgccgacatctttgaaacaagcgacggattgacttccaaaaccgagtgtcagaacatcatctaccaagaaaacggcattgctcaataccttctcaacttcgagaacataacctgcataatgattgacggaggcaaccgcaaatgggtaggcaccgaaagaaacggcatctatgtcctctctgcttcgggcaacgaacaactctttcactttactgccgagaacagccccctgatttccaaccgtatcatctgcatggctcaaaacggcaaaacaggcgaggtattcattggaacagaccgcggaattgtgtcctacaaagccgaatcgaccaagggtgcagaagaggcgggcaagctcacggtctatcccaaccctctgagaccacatcacagtggaacgattgcaatcaagggatttgtggcagactctgacgtaaggataacagacgttgcgggcaagacggtggctcatctcaaatccataggaggacaggcagtatgggacggtaggaacttcaacggcgaagaggtggcaagcggagtgtatctcatcttctcttcggcagaggaaggcagccggacagcctgcggaaaagtcctgataatacgataagagcaatgatttacaccacacgtgcaatcatcataggcacaacagcctacaccgacaacagtctcatcatcaaagcctacacccaagagttcggattgcagagctatatcttgcgttcggctcgcaaaagtcgtggcaactccaagcctcagcactttcaggctctccgtgtggtcgaattggaaataagtcagaccccaaaagccaagctgagcagcattcgttcctcacaacttacaggctcatacgaacaaatctctaccgacattgtcaaaactactcttgctctctttctgaccgaggtcatcaatctgtcggtcaaagagagcgttcccaaccgagagctgttcgagttgctcgcaagcgaaattgcagccttggaggtggcagaagccaaggatacggcggagtttcacctgcgtttccttatcaagctcgcaagcattctcggcttctgtccgcaagacaactacgatgccgcccacccctgcttcaatctgagaacaggagctttcgttgcaacaatgcaggaaagcgacacccttgctcccgaagcctcggaaagcctgcacagactgctctccctgccaacagaacgcataacccgaacccttgccgagcgaagagaactccttagcaacatcttgcacttctacgcaatccacatcaccgccggcagaccaatccgctcccacgaaatcctctgcacaatattggggtaaaaagaaaggaaaattgtataaaacgcccttaataaaaagtaattttgtatatttgccgtgtgattggcagcaaaaaaaatactcccacggagtacgcgggagttagataactcttcggcttatagccttattgtgaaaagctttcacatagtagtatctttgctgcaaaggtaagaagaattttgaaaatggcaataaactaattaaaaaaatgagcaagattttaggcattgacttgggaaccaactcaataggattggcagtcagagacacagacaaaggtaattctttcgttgaacaattagatttcttcagttctgtaatattcaaatcgggtgtcggtacaggtacttccggtgaattttcatacgcagcagaacgaacgaaaaaaagatcaataagacgattgtatcagtcgagaaaatacaggatatgggcaacattggaattgcttatcaaaaatgattgttgtcctttgtcgatggaagatttggacaaatggaggaagtacgacaaggagaaaggtttgagaagacaatatcccattgatgcagcagagtttgaacaatgggtgaggttggatttcgatttggacggcaagcctgactatacaagtccatacgcactgcgtgcagaaataatgcaaaaacaatttgactttacacaacaaatcgacaggttcaaattgggaagaatactatatcacattgctcaaagaagaggatttaaaagcagcaagggtgaaacactgaaagaattgtccgaagccgaaataacaggagaacttgatttttcgacagaattaaagaaatccgaaacaaagaagtctcagaaattggttgatttcatggagaaaaacaacattccaacagtcggatatgcttttcatgaattagaaaaacagggcataagaataaaagaaagcgaataccaagcagtaagaagtcaatacaaagaggaaatcaaaaaaatatttgaatttcaagaaggattggacaccaatagtgagttcttcaaacgtctgacaagcgaaaagaagaaagaaggaacaatattctacaaacgacctcttcgctctcaaaaaggcaaggttggcacttgtacgttagaacccggcaaagcacgctgtccaatctctcaccccgaatttgaagaatacagagcatggtgctttatcaacaacatattgtacagaaccaatccgaccgcagaatggcaacgtttgactttggaacttaaagagcagttgttcaaagaaaagtttttgagagtaaaatcatactttccattcagcgaaataagagagtggctctcggcaaagttaaacatagcactatcaaatgataaaggcaaagaaacaatcaattatcctgacaaaaccaatgtttcggcttgtcctgtgtctgctcgtttgaaaaacctattgggcgatgactataagcaatggacttttgaaaccaataaagagcgaattaaccataagacaggagaggttcacaaagtaacttactcctaccttgacctttggcatatttgtttttccttcgatgaacaagaatttgttgaagaatttgcaaaaaacactcttggctttgatgacaaaaaagcaaagcaactatgcactatttacaacaacatccaacaagattatgcctcattgagtctcaaagcaatcagaaacatcaatccattcttaaaaagaggtttgatttataccgatgcagtacttttggcaaaacttcctgaaatatttggagataaatggagcgaagttgagaatgatgtggtggaaaaacttaaaactatcacagccaacaacagacatcaaaaggaagtttacaacatagttaatgatttaatctcggattacaaatctttggactatgaccaacgatttgccgaacacaatacagattatgtactgcaagagaatgattactctgacattgaatgcaaactcaaaagacattttggtgaaaaagcatggactgaaaaaacaaaccaagagcaagaagaaatcagaaagaaagtcggcgaactatatcaaaacttcttccgcaactcttcgagaaaatactatgaacaaccaaaattggcagacagccttgccaactatttaacagagacttatttctatcttgacacaaaagacttgcaaaagatatatcatccatcaatgattgaaatctatccgatagcaagcaaggttgtattagatgattgcagatgtgtcagattgttgaaaagccctgtaatcggagcattgaagaaccctatggcaatgagaatactccataccttgcgttctcaaatcaacaaactaatcgaagaaggaaagattgacgaaagcacaagaattgttgtagaaacagcccgagaagtaaatgatgccaatatgcgttgggcaatcaaagaataccagcaaagacaagaagatgaaaataaagcgattgaaaagataatcggagaatactatccaaatgaacctatttctgatgaccgaataagaaaagcaaaaatcctaatcgaccaagcaaatattacggacactgataaacaagagaaagacgaggtctcaaacaaaggaattaacgacacttggacaaaagtaaaaacaagcaaaattgcaaaatacaaactatggcttgaacaaaattgttgctgtctttatacaggtaagaccatttcgataagcgagctgtttgatgaaaacaaatttgacatcgaacacacaataccacgcagcatttcttttgatgattctctctcaaatcttactatttgcgatgcccgtttcaaccgaagcaccaaacgaaactctattccttcacaacttccaaattatgatgaaatcaagccacgattagaaatgtgggaaaagaaagtaaaatcactgaaagaacgagtgtatcattggaaagaagaatcgaaaaaagctcaaacaaaagacagaaaagactactgcataaggcaaaaacacttgtggaacatggaactctcatattgggagaagaaactaaatacatttacaattacagaagttaccgatagtttcagaaacaaccaactaaatgacactcgtatcataaccaagtatgcatatcattatttaaagactgcatttgaccacgtcagcgtgcaacgaggtgaaatcacctcaactttccgcaagattataggaatacaacaaatagacgaacagaaagacagaaacaatcactcccaccatgccattgatgcagctgtgcttacccttgtcccatcggcaaaagaaaaggagaaaatgatgagattgttctatctgatgaaagagtacaaaactaaccctgcatacagacaagaactcgaaaaagaaaaacagacttatttcccgaatgatgttacagcagtcaaagactatatcgaacaaaatatttttgttacacatatagccaaagaccaaacacttacacctgcaaaacgtcgcaaacgcataagaggaaagatagacagaaagcacgaacaatggataacaggcgactgtatcagaggaagtttacaccaagatagtttctatggttgcatagaaattgacggagaacaacactttgttatcagacgtgtcctaaaatacaaagcaaacgaaaaagacaaaggttttaagaattggaaagaattggagaatgcaatagtagataaagctctatataaacgtttaataaaacctttctgtccagagggatcagaagtaccttcggttgatttcaaaacggcaatagcagagaaaggtggattgtttgacaatggaagaaaggtaagacatattcgttgttatacttccgtaaagaaacctttacaaataaaagagcagacgtacaaatccaagaaagactacaaaaactactactatgccgaagttggtgatttatgtaccatgtgcaagtatgaaaacaaagacacaaaagaagtaaaatacattccttacaatctctttgaaatagcacaaaatcacaaagaatgtggggagtttattcctcgaacaacccaatcagacaacaataatacactttacctctgtcagaaactgacacgggggcaaatggtacttatctacaaagacactccacacgaactatttgatatagacaacgaccaattatcaaaacgcctatatgtaatcaatggttttgagaaaaaatcatgtttaataaaactcattcatcacgcaaatgcccaacctgacaaagaacttggcaaaggtgaaagtataaaaagctttgacaacattcctcaaaagataaggcaaagcataaacggattaaagtatctgcttatcggagtcgattttgaaatcataaacggacgaattgaatttttgaacaaatcaaagcactatgattaagcgaacgttgtgtttttcaaatccggcatatctgtcggtgaagaacaaacagttggttatcaagttgccagaagtggaaaacaacgacactctgcccgaaagtttcaagcagagtgccgttaccaccattccgattgaagacatcggcattgtcgtcttggacaatcaacgtatcactatcacccagagcgtcttggaacaactgatagacaacaactgtgccgtgataacctgcaaccaaagccacctgcccatagccatgcacctgccacttgcaggcaacaccacccagaccgaacgaatgcgttaccagattgaagcctccctcccactaaaaaaacaactatggcaacaaaccatcgtcgccaagatacaaaaccaagctgccgttcttcgagaatgcagaggcgtcgaagtccgcaatatgctccgctgggctacacaagtcaaaagtggcgacagcgacaacatggaagcccgtgcagccgtctattattggcaaaacgccttcccctcaatccccgactttgttcgttcgagagaagccgcaccgccaaacaacctgctgaactatgggtactcaatcctccgagccatagtggcaagaggcttggtatcgagcggactgctgcccacactcggcattcaccaccgaaacaaatacaacgcctactgtttggcagacgacatcatggaaccctaccgaccatacgtcgataaacatatcttcaatatatttgacaacaatcccgattgcagcgaattaaacaacgaattaaaatcccaactcctccaaataccggtactcgatgtaacaatcaactcacaacgcagtcccctcatggtggcagtcagcaccaccaccgcctcattacaaaaatgctattcgggtgaagcaagaaagataatctatccaacaatataaccaatgcaaagatttagcgaatacagaattatgtgggtaatggtactttttgatttgccgaccgaaaccaagaaagaccgggcggcagcagccaaatttcgtaaaacccttttggaagacggttttaccatgtttcaattctctatctatgtgcgacattgtccgagcaaagaaaatgccgatgtccacatcaaacgagtaaagaacgccatgccggaacatggaaaagtaggaatgttctgcataaccgacaaacaatttggcgaaatagaaatcttctattgccgcaaaccggaacaacaaaaaggctgcacccagcaattagaactattctaaactcgccgatttttattttctaatcagccctataaacaactaaatccgagcaacttacccggattcaggttgtgtttacaactgcaaagatactaatttgaaagcaattcacaactatccaatgtgatgcttccaaagaggaaatggttgtgtttacaactgcaaagatactaatttgaaagcaattcacaacttttgttggaaatttccaattttcaacaagttgtgtttacaactgcaaagatactaatttgaaagcaattcacaactaagacaggcgtttattgctgactacgagagttgtgtttacaactgcaaagatactaatttgaaagcaattcacaacaacctgccttgcaacgctgtccgcatcatggttgtgtttacaactgcaaagatactaatttgaaagcaattcacaacgtcttggcaccaatcgtttacggcttagtgggttgtgtttacaactgcaaagatactaatttgaaagcaattcacaacatgcacctcttataggattagcacaaaacaggttgtgtttacaactgcaaagatactaatttgaaagcaattcacaacaagaaccattcgacgaaaaaggtaatatgaggttgtgtttacaactgcaaagatactaatttgaaagcaattcacaaccatggttttactaaaacatacctatttgaaagcaattcacaactttgtctgactatctcggagtaccaacaaaggttgtgtttacaactgcaaagatactaatttgaaagcaattcacaactttggatttaccaaaacataccttgacagagttgtgtttacaactgcaaagatactaatttgaaagcaattcacaacacattatctgcaaccaggcgaaaattgggagttgtgtttacaactgcaaagatactaatttgaaagcaattcacaacaactcgaacaactccaataaaagcttacctgttgtgtttgcaactgcaaagatactaatttgaaagc

SEQ ID NO: 4006 - DNA, 15726 bp, synthetic construct
  source 1..15726: mol_type = other DNA
  misc_feature 1..15726: note = Synthetic
ggagacaatgcggtaagtccatctttctcgttgccgtctatggattatttttcgatttcgggaaagcaacgctctcgcaattattggcgtacgcgcgcgagcgaaacgcgtataggcacggaatcttcgtatgaaccattgagtctacttggcgaggattctaaaattgctgaatttgttgatattaagcctcaaggtgcggctgaattgaatttcggtttgaagttcaccaacaatcataatcctcgtttgtcgaaaaaacaacaacgtcaattacagttcgatttcgacaataaaatccaaatgagtgtgacgggttctatcggcgataaggtttccatgacgattaaatacgatacggagtcgcagtttgaattcgaacaggaaattaagttgcaatacgaaggcgatgaagacgaaattataaaaaatatcgaagtcggtaatgtttcgttcccactttcaagttctttgatatcaggaagttctagcttgttcggtgttaagtctgacttgcaatttggtaaattgtatttgagcggtgtgttctcgcgtcagcgtggagaaatgtcttcgatttctgttcagggtggggcgcaaacggaggatttcgaaatccaatgcgaccagtatgatattaacaaacacttcttcttgtcgcagttcttccgcgaacattacgaggagtctttgaagaatcttcctgaaatcaatagtggaatcgaaatccgtaaggtcgaagtttgggttacacagacttcgagtggtaaggaagatgctcgtaatattttggctttgactgatttaggtgatgtgtattctggcggcattggtggcacaaaagaatatgaattgcctgaaaatggtaaactttataaacagataaaaaatatgtcgggtatccgtaatatcaatacggtatcgactacattgaatggctcgtatgagcaaggtcctgattatgagaagattgaacaggctgttttgttgaaaccaacggaatacgatgtcaataaaaagcttggttacatttcgttgcgctcgccggtaagttcttctaaaatcttggcggttgcctacgaatatgaatataaaggtaaggtctatcaagttggtgagtttaccagcgatggggtggaacatcctgatgtgcttattgtaaaattgttgaagggtacacagtcaaatcctgcatatcacaactgggatttgatgatgaaaaacgtgtatgctattggtagttaccaaattagctccgaagattttgttatggatgtcttatatcaagacgatcgtaccggtgcaccgattccatatctttcggaaggaaatttgaaaggcaaaagtttgatttctgccttgaatttggatcaattgtcttctgatttacaaccatattccgatggtttgttcgactttgtggaaggtgttacgataaagtcttcgcgtggcttgatttatttccctgttcttgaaccatttggttcttctttggaagaaaaaataggggatgacgcattggcgaaaaaatatgtgtataatgaattgtatgactctactcaaagtgcggcacgtcaggttgcagaaaagaataagttcattttgaagggttcgtacaagtcaagtgtgtcttcggagatttctttgaatacgactcaggttaagtcggtgaaggtgatgtgtggtggtcttactttggtcgaaggttcggattatacggttgactattcgtcgggaacggtttctattatcaatgctggtattttggaatcgggttctaatatcaatattacttacgaaaacgatccgttgtttagtacaacaacgaagacatatatgggtactcgtgcggaatatcgctatagcgataagatttcgttcggtggtacgttaattcatctttccgaggttccttcggttgctaaggttggcttcgacgaatatccaatcagtaatacgatttggggcttggatgccaaatattctacggaatctatgttcttgactaaattggtggataaaattccgctaatcaatacgaaggaaatgtcgtatgtagaggcttctgctgaatttgcacaattgttgccaggtcagtcgaaacatatttccgatgctgtttctatcgatgattttgaaagttccgaaggtcgtatttatttgcgtgaaccaacagcttggaaaattgccagcacgccacaaggacaaaagtctttgttccctgaagcgtcattggttaacgacttggctttcaactacaacaaggctttgatttcgtggtataatataaatacctcgttctacgaaagaagttcgccggtaagcaaatcggtacaggctgaacaattctctcgtacggtgtatcagtcgaatttgttcccaaatcgcgacttgtcaacctacgaagatgtgcctatgacattgttgaatattgcctactatccgtatgaacgcggacagaataactacgatactaaaggtcgtgctggtatttctgcaggtttgaattccgatggtcgcttgaataatccagcttctcgttggggtggtattatgcaatcgcttacaactaccgacttcgaggctagcaatgtggaatacattgaattttggatgatggacccattcattaacgatgaatttggattacataaaggtggtgacttctacattaacattggtcgtatttccgaagatgtgcttcgcgacggacgtaaatctgctgaaaatggtatggtaaccgacaagtctcgtttggacgaaacggtgtggggtatggttccaaactattctattgttgaaactggttttagtagcgatattgaccgaaaaattcaagatgttggtcttgatggattgagcgatatggccgaaaagcgtttctttgcacaatatctgcaagatgtaaaagaaatcgtgactccggaggtgtttgaactattcgaaaaggacccttcgcacgatgatttttcttcgtatcttgacaatagaggcgaggaacacgacatcgtttggcgttacaaatattttaatggtactgatggcaattcaccatcggaaacgtcacaaggtttgtctacttacagacccgacgttgaagatttgaaccaagataatactttgcaggaaacggaagcatactatcaatatcacatcagtttgcgtccagaagatatggtggtaggtaaaaacttcatcgaagatgaaactatcgaggtggtgaacaacgaccattatcaaacacaagcaaaatggtatcagttcaaaattcctatcaatagcgaggaaaaagaacgtatcggtaacatttccgacttccgcgacatttcttctatgcgtatgttcttgcgcaacttcaacgattctatcgttttaagaattgctgaatttgctttggtttacagtaactggcgtgtgtacgaagatcctttgtttgagtctggggaatatgaccttttctctgattctaaggttgacatttcaagtgttaatatagaggaaaatagttctcgttctccggtaaattatgtgttgcctcctggtgttgaccgtgtaattgatccaactagtacgacattggaagaattgaatgaatctgcactttctatgaaggttatcgacttggaggatggtaactcaaaagctatctataaacaggttaataaggacttccgtcaatttggtagtttggaaatgttcgtacacgccgaagctttgatagacgaggaatctatgcttaacgatggcgatttgtatgcgtttattcgtttgggttccgactatgttgacaactactacgaatacgaaattcctttgaaattaactccacatattccagaaggttcggttcgttacaataacaacagccataacgatagattgattgtttggcctgccgacaataaaatagaattgcctttctcggtattgaccgacattaagttggaacgcaataaaatgattgccgatggcattattcctgatcttgaatcgtatcatacttattcaatttcgtacaacggcaacagagttagcattaagggtaatccgaatattggcaatgtgcgcacggttatgcttggtgttcgtaaccgtaaaaagaaatcttctaatcttgaagacgatggtttgaaaaagtctggtattgtttggtttaatgaattgcgtttgaccgatatgaacgaccaaagtggttgggctactgttggttctgttcgtgcaagtttggccgactttgcaacggtttctttggcagggaaggtgagcaagcctggttttggtagcgttgaccaaaaagtttttgaacgtagcaccgaaaacttgtatcaatacgatgttgcttcaagcgtgtcgcttcaaaaattcttcccggaatcgtggaagttaatgttgccattctatattgacttgtcggaaacgtacattcgtccgcaatacgatccaacaaatccagatattacattggagcattcgttgtcgaatcttactactcaacgtgaaaaggattcgttgttgaacattacgcaagatttcactcaaaatttcagttataacttcacaaatgtgaagattgctcgtactccgaaaaaacaacatccattcaatatttcgaacttctcgggtacatttgcatataaccgctatcgtgcacacgatgttgattatcaattagattataaacaccaatataaggctgcgttcaactatgcgtacaatatgcgtccaaagaactatcagccgtttaagtctaacaagattcgtatcattaaggacttcaatttctacttgttgccatcgagcgtgtcgttcaaaagcgagtgggatagaacatataaggaacaacaacgcagaaatctttctgcctatacatttgaattgcctaaaacagcaagcaaatggttctactggtatcgtacctataatgtgaattatcctgtttctaagggcttaaaattgtcgtataacgcgacaaataattctcgcttgaacgaaccaagtggggtaatcgataagaccgacgatgatgtttggcacgaatacaaacgcgagatttggaacagtgcaaagacatttggcgagaatatggaatttgttcaaaaatggaatcttacttggcaagtgcctatcaacaagttctctttgcttgattggactacggtaaactacaaatttgcaggtagttacaactggcaaatgggtacggaaactatggacgacgagttggattacggaaatttcatcacaaacacgggtacacatacggttgacggtactttgaacttctcgaaattgtacactaagtcaaaatatcttgctggtgttcaaaaacgtatgaaacaatctgattctaagaagaatacaaaccaaaagaagaaggaaacagttaaattcaccaagtcaggagtgaagacgaacgatgataatgaaatcgttatcaaccacaaacttggaactacagatgtgaaggtgactgttcttgacgaaaatggtcaattggttccttcggaaacagaagtgatttctcctaagaaagttaaggtgacttgcaaacgcgaggtagaaaaaggaaaagttaccgtaactggtaaaaaggacgtacaacaaactgcattgactcgtgctaccgacaaggcggtaaatacattgatgatgttcaaaacggctacaatcaactatacgcaagctgagggtagtttcgttcctggatataaatacgataccaagattttgggcttgaataaaccattctcgtcttcggtaactcctggttggggctatgtgttcggatttgttccttctgacttggaatctcatttgaatacaagcgattggttggttgataacgataacattagcgataagttgaaatatacgtattcaaatcgcttaaaaattcaatcgtcgttggaacctattaagaatatgaaggttacactttcttcggaacgcagtttttctaaaaattatacgaaatatttgtggggcgacgccactgaaaatgaacgtaataaattgacgaacggtaactttagtatttcggctaatactttggcttcggctttcaattccgataaagcatacgaacgctttaaggaaaatcgcttgactattgcacaccgtttggcacaagataaattcggcggattatacgaaactgacattgaaaccggtttcccttcgttatataacgaaatatcgcaagatgtgttgattcctgctttcttctctgcctatacaggccagtcggtagacgatgtggatgtgaatacgtatttcactccaatgttctctagttttgctaatttccttcgttctttgaactggaaagttacctacaatggtctttcgaaattgccgttcttcagcaaatactttaaaacggttaacatcaaccacgcttatacttctacgtacaatatgggagcatacgaaacattctcttcggcaaatacttacgaggatgaattctatatcgatcctgttgatggttcgttgtatgtctctccagattacgatgtgtcaactgtaagcatttctgaacgcttgaatccgttgattggattcgattcaaaaatgaaaaacaatgttaccgctaaggttgaattgcgtagaaatagaacggtgacattgtcgtttacgaatacggaaatttctgaagtttcgaactatgaatatgttgtgggagcagggtatgtgttcgataactttaagttgaatatcacaacttcgggcaagagtcatcatttcgaaaatgacttgactattcgtcttgatttttctgttcgcgacaaccaaacaattcgtcgcaatattgccgaagatattactcgtaagatttctggtacaaaatcgtatgcgcttaaaacatacgccgaatatatgttgaatgaacgaatcacgttccgtttgtatttggattacacaatgaatcaaccacttacaaatggatacagaacatctacaacaagtggtggtgtgaatatgcgtttctctttaatgtaatatgatgaaaacaaaaatatacacgataatttctgcttgtttcgcactgcttgcgacaagtgcttttgccgaagatgatcctaccgatacagcaaaagtaaaggaggttatgatgtggtcgtacaatgcgacacatacgcagcgctcacgcgaaattattgatactactgtcgattatttctatctacatgaaccaaatggcagtattgccgattttaaggttgatgttgctggatatgcttcgcctgcgttttcattgcaattttctccattgaaaaacgagccgttctatttgggtgcatacgaatcgtcgctgattagaaccgaaaatatgccagattatactgcacaacatccatacacaacattaacctacacaggtggtttaaatggtgaacaatcgggtaaggtgttgcatacgcagaatgtaaataaatatctgaatgtcggctttagtatggacttttacaaaactgtgggagagttcgataaccaaaatattaaaggacagcatatcgctccgtggatttcgtattatggaccaaagttttctacggttttcaaatactcgttcaacaacattctacgtcaggagaatggcggtattgtggcagattcgttgttgaattacgagaagttgcgaaggatgaaatttaccaatgcaaaatcaaatgttcgctatcaaaatgttgactttgtgcaaaaatggaacttgggtgccaaacatcgtgaagacagttcttcgctcgatattcctgtgtataaaattgcgtgtggatatcgtttgaattttgagtcggcaaaacgaacttatagcgattcaaaaccagatactgcttactacacaaatgtgttgtacgattccttgaatacaacggattcatcggaatacaagattttgtcgaattcattgtttttagagttctcgaaaaacattggcgcggcacgcattgttgccgactttgattttggtacggaatatcagtccttggaatatttcgactataattattctattccagaatattttgaacatagtgaatattacaaaggtgcgtttgactttacgttcccgaatgaattagcgttaagtcatacgcatttgttttatgttttaggtccgtcgaaaggtcaattttcggtacaaacaatgctttcgaaagaatttgcgataggagaacagtcgcttggggttacattgtcgcattcgtatgaaaaagcggatccacatccaacattcttagattatgaggcaaataactacgcttggcacaacaatttcgtgccagaaaaattaaccgattgtaatctgcagcttgcttcatcgtttggaaatttgtcgctcgatgcacatttgtatagtgcaagaaactatgtatatttcgctaaaaatggcaacttgcaatatatttccactaactctgtcgatatggcgtttacggttttactaaagaagaaaacagcctataaacatttcatgatgaccaatggtttgttggtacaaagcgtttctatgggagaacaagactatccaaattttgccacatacaattcaatggaattccgttgtgcaatgttgcataagttaattcatctctcgttgggcggtgagttgttgtattatccaaaatataatgctccagtgtacgatgcagcattaggtgcattcttgccacaaaataattacaaatacggaggtttcccattggtaaatgcatacgcaaccataaaatacaaaccaattcgtttgttcgtgaaatatagcggtttatatgccctattcgaacaaaattatgcagttgccagttacccacaaagcaacggaacattgtcgtttggtttaacgtggttgttcaataattaattgacaattgataatggacaattgacaattattgttttccccgaatagggtaaaccattatctgtagaatttcatatccgtggagacgcaaaattttgcgtctccacgaaaattttgtgtttctatgaaaattttgtgtctctacaaaaatttcggaaaatatttttccgaaaatttcgttatttgtttgaaacatcatccaattattataaccaataaaaattaaccgcaatggtcgaaaaatttcaaaacaaataccgtgttccgtcggcacgtgcctcgtggcacgaatacaatggtggtgtgtatttcataacgatatgcacaaaaaatcgtaaacattatttcggggaaattgacaatgagggaatgaaattttcggaaattgggaaatttgccaataaatgttggctagaaattccccaacattttccacatgtcgaaataccattatgggttattatgccaaatcatattcatggaattattataattaatcccatttgtgaaaacgcaaattcctgtggggacgtaaaatcctgttggaacgaaaaaaaatgttgggacgcaaaattttgtgggaactgtagagacgcaaaattttgcgtctctacgtcaacgtcaacgccgccgccaccgccaacaacaacgccaacgaaaaccaccaacaaatttggtccacaatcgaaaaatttggcatcggttattcgtggttttaaaattggtgtaaccaaatttgccaatgaaaataatattccatttgcctggcaaacacggtttcacgatcatattgttcgcgaccaaaaagaattaaatcgtattgccaaatacatcgaaaacaatgtcggtaattggtatttggacaaattccataaatgacgattactgtcgttcttcatttttactgcaaattattcttattttttatctctatgcggagatttcgcgttctgaggtgttttatttgtggaaaataaatttgaaatgctgattctaaaaaagaaaaatgctcccacggagtacgcaggagcaagaactcttcggcttatagccttattgtgaaaagtttttcaaatttgtactgcaaatatatgttttttttctataattttaaacagtaaaaaataattaatcatgacaaaaattttaggacttgatttaggtacgaattctataggaattgcggttcgtaatacagaaaaaggaaaaaacttacaagagcaattggattacttcagcactgttagatttcaagaaggagttggaaaaggtaaaacaggagaattttcatttgctgcagaacgaactaaaaaacgttctactcgtagactttatcaagcaagaaaatatagaatttgggcgactttagaactactaataaaaaacaattgttgtcctttgtctttagaagatttagagaaatggagtaaatacgataaaaacaaaggtttaaaacgtcaatatccgataaatgcagaaaaatttgaacaatgggttagacttgattttgatggtgacggtgtttctgactatagtagtccttttcagttacgggctgaattaatggaacgccaatttgattttagtaaagaaattgaaagattcaaattaggtcgagctttgtatcacattgcacaacgaagagggtttagaagtagtaagggggaaactattagtgaacaagaaaaagaagaaaacacaatagttgaaaatgaagatttgtcggttgctttaaaaaaatcagaagaaaagaaatccggagagcttattgcatatatgcaattgcataaccttccaactgttggttgtgcgttcgcccgattggaaaaagaaggggtacgaataagaaatagcaaatatcaagcagtgcggtctcaatataaagaggaaatagaggctatttttacattccaaaaaaacttgtcgcgagtagatggtttttataaacatttaataagtgagaaaaaaggagaaggtagtattttctacaaacgacctttgcgttcacaaaagggattagttggaaaatgtttgttagaaccaggaaaatcaagatgtcccattagtcatcctgaatttgaaaaatatagagcatggtcatttataaataatatccagtataaaaaacaagatgagtggtgtgagttgaccttagaacagaaaaaaactctttataatgagaagtttcttcgaactaaaaactatttcgaatttgaggaaatacggaaatggatagagaagaatataacatttcatgagttgaaatatgatagagataagcaaaagaggactattaattataaagataatacaaatgtttcggggtgtcctattactgcgcgtttaaaaaatctattaggcgaaaattgggaaaatataactatcgaaacatgtaaagaaagaacaaatagtaaatcaggagaggttcattcagtgacttattccgcagaagatatttggcatgtatgtttttcttttgacgatgttgaatatgtagaaaattttgccaaaaatgattgtggttttgaagctaaacagataaaacaaatggcgactctttggggtgctattcttcaaggatatagtaatttaagtttaaaggctataaaaaacattaatcgttttcttgaaaaaggttatatctatacaaatgcggtattgttagcaaagcttcctgacatatttggaagtcaatgggaacaatatagttctgttctagaaaagtctttggatgatatattgaaagaaaaccaatatcaaagaaacgtttattccattgtaaatactttgatttctaactataaatctattgaccatgagaataaatttgcatataaggattacacctataaattacagaaaaatgattttgagggtggggctggattaaaaggtataaatgaagttacggtagagttctttggagaaaaaacatggaaatctaaaacaacagaagaacaaacaagaattattgagagtgtatcttgtttatatcaaaaattctttgaaagtactcaacgagattattataagattcctaaaatatctgatgcattagcagattatgtatctacacattatcaatttgttagtaaaaaggatttaagtaaaatctatcatccttctatgatagaaatttatcctaaagcaaaagaacagttgttggaagacaatcgttttatgagagtattaggaagtcctgttattggtgcattaaagaatcctatggctttgcgtgttttgcatgcattaaaaaagcaaataaatggtatgttgctttctggaattattgatgaggatacaaaaatcgttgttgaaacagcaagagaattaaatgatgcaaatatgcgttgggctattgcggaatatcaaaaacaaagagagcttgaaaataaagaaattttagagattttaaaagaattttataaagacaagtctattggtgatgatgatatagataaggcaaggttattaatggaacaaccccaagaaaatgcaaaagaagataaggatgaaaaagattttaagtataaaaataatgtattgaaatataaattgtggaaggaacaaggatttcgatgtatgtatactggtaagattctgaaacttagctctttgcttaatgaaaatgaggtagatatagaacatacaattccacgcagtatttcttttgataattcactgtctaatttgactgtttgtgatgcatattttaatagaagcattaaaaagaatctgattcctacccaattggcaaactatcagaaggaggcaaatggatattctgcaattatcgataggttgaaaccttggataggtaaggttgaaaagttaaaagacaatgtaaactattggaaaaaacaatctaaaatagcacaagcaaaagaaagaaaagattattgtattcgtcaaagacatttgtggcagatggaattggattattggcaaaagaaagttaattcttttacaacaacagaggttacaagtggttttagaaatagtcagttggtcgatactcgtattattacaaagtatgcgtatcatttcttaagaactgtatttaataatgttgctgtgcaaaaaggtgcagtaacagcagaatttagaaaaatattagggttccaaggtattaatgagaagaaaaatagagataagcattctcatcatgcaattgatgcagcaatgttaacattaataccattttctgccaaaagagagaaaatgcttgatcttcattatagaatcctggaagcacaaaaattgggcggtcattattcatcaatggttcaagaattgaataaagagattgtttcttgtggtttcggctctattaatggtatagattcttttatagaagaaaatattcttgtaaatcatattcaaaagaatcaagtattaactccagcacataggcgtatgcgaattcaaggcaaagttatttggaaaaaagatgagaaaggagaagtcattttggatgagtatgggaaacctataccaaagtttttgataacaggtgatagtataagaggacagttgcatggggatactttttatggcgcaattaagcaaggaaaattaaaaaaaaatggtgctttaataagagataagaatggaaaagttcagactgaagaagaaataaaatatgttgtaaggcgagatttggtttataaaaaatcttctaatgatcctggcttttcgaattgggatgaattggagaaatgcatagtaaacaagaatctaattccaatgatgaaaaaacaatttaataaagagatgtcttttaaagaagcttgtgaacaaggaatttatatgttggataaacaaggtaataaagtaaataaaattagacatattcgttgttacacatcaataaaaaatcctttagcaataaaaaaacaaacttatttatcaaaaaaagagtataagcagaatgtgtatgctgaagttggagatttgtatgtaatgtgtaaataccaaaataatgagttgaaaaatttgtatcaagtttttaacttgtttgatattgtgcaaaatcgaaaaataaatggggatagtataccgaatataatagaaaaaaaagaaaaaatatataatttaaaacaggttcttaaaagtggtgatatgctattactatatcaaaaatctatagatgaattaaaagagatggataaccaatctttatcacaaagattatatgtggtagaaaggtttgaaacagcaggaaatctagttgttttaaaaaaacatataaatgctcaaatcgataaaatattgggcagaggtgaatctgtaaaggattttaaacgaactcctgaaagaattcgatgtggtatcaataccttgaattttcttgttaaagattctgattttatattttcaactaaaggtattgaattttattgaattcgttttggtctaatctttgaaacggatttagggtataactctaaatccgttttttatgattaaaaaagttttatgttttagcaatcctgcatatttatcgttgcagaatgctcagttagttctcaaattacctgaagtagaaaaaaactcaacatttcgcagttcttttaagcaaaatgcaacgagaactattcctatagaagatataggtgtcgttgttctcgataacaaacaaataactctaactcaaggtttgttggagagtttattggaaaacaattgtgcagttataacttgcgatgagcgacatttaccagtaggtcttatgcttccgctcgaaggtaataccattcaaaatgaacgtttccgtagtcagttggatgcttcgttgcctttaaaaaaacaattatggcaacaaactgttcaatgtaaaatacgaaatcaggcagctgtgttacaacgagtatataatgaaactgccgataatatgttggcatggtcgcaatcggtaaaaagtggtgatagcaccaatcttgaagggcgtgctgctgcgttttattggaaacaggtatttattgattcaccacattttattcgtggtaggaaaggagaacctcctaacaatttattgaactatggatatgccatagtccgtgctattgttgcccgtgcattagtttcgagtggattattgccgactttgggcatacatcatcataatagatataatgcatactgcttggccgatgatattatggaaccatatcgtccgtatgttgatataaaaattcttgaaatattggaacagggtatagaacatgatgaattgagcaaggaatgtaaacaaatgttattgagtattccagttatggatgtaagtataaatggacaaacaagtccgttaatgcttgcggtaacgcaaactacagcttcgttagtaaaatgctttaatggagaaagtagaaaaattatatatcccgaattgtaatggaaaaccgatttaaccaatatagaattatgtgggtattagtgtttttcgatcttcctacagatacaaaaaaacaacggaagtcagcttccgattttcgtaagcgattattaaacgatggttttactatgtttcagttctcgttttatgtacgacattgtccgagttccgaaaatgccgatatgcatattaaacgaatcaagggaatattaccagaacaaggacatgttggattattgaaagttactgacaaacaatttggagaaatggagttgtatgtgggagattgtagggaacaagcaccaccaacgtatcagcaattagaattgttttaggaataaaaaaatgcagtataaagagaaaaatccagtctgtttagactggatttttaatcttgaaacaatttgtaatgaattgttagtgaaatagttctgttgaatgtattgtttcaacgaactcaaaaata

SEQ ID NO: 4007 - DNA, 15394 bp, synthetic construct
  source 1..15394: mol_type = other DNA
  misc_feature 1..15394: note = Synthetic
tcatcatcaattcccatatataatctggaataaacgtcacttctcagattaaaactgtctaacattcgtatcgtattatcctctgcattatagagacatatcaaatcctttctaccaggcatagaagtctctaatgtacatatacagaacttttcattagagtacggattgatttttgactcaattcttaagctatagctatttgatatatttatcatttttgcttgctcgaaatcagcattactctgagctttgcattctatatatccatttccaatcatggaaacaaggataagtgtcatcaattttttcatctattatttctattattctctccaatgtggttctattgaatatacccaatgtggcttttgtggtaaattatacccgtttggtaaatctatcaaccctcgatacaacatcgtaatgactttaaacctgttttgcttctttttctttttcattttgggaaagtaaaaactgttattaccccaacattcttcatttttctctttatctattggtatcaatttgttctttctaatcaaaagaggaaattcttctaaatagacatgctcttgccaaacatcattatcaagtattttgattttataataccgtttcggaagctctttgccaattctaaacctgtaactatatacactatatttaattacaatcaagtctcccttgtagaaaaagttagagcctaaaaagacttctgttgggtcatcacaattctgaattccaacccactcatctatttgataatagcgttctccttcaactctataatgcttaatgatgtatcttgatgtgcaattgctattaagcggttcttgctctgaacattctataagttcatatttccttttacaaaccgaattcaaaaacaaggtatccccaattctatggtagtgaccaatgtcataaaagatgtttggtgaacacgtcggcatttcatagaatgaaatagaatatgttgaatcgttcttgattaccaattcgccaaagtcaccttccccataataatattcttgtgcattactgctatcaggaaataagatgaaagccatcacagtggctgtaactatttgagctattctcattatggcttttctttgttgttttactctgcaaagtaaaacgaaattattgaaactgccaaattttcttttgtttttctctttcatagtgcgaatctatcaatttttctatctcaatttgcatcaccaaatagcgaatttatgcgtttatgccattgcttccttgattgcaatacaatacaaaattataagagtttgctatattttttcgcgtttcggagtattttcaatcgaaatgttgtttttcatatagtgaaatagcctctcacatcaaaaaaacaacatttcattacttccgaataagtatcggataaaacaagacctcatttctttatggcaaatgaatgataatctttatctttgcaaacttaatatggatagtattggagatgataacaagtgcgattaaaaaaggaatattgttttatgccgaagtattgcttttatgctgtggtctgcttgcacagaataaaagcctgcattgccgcgagctgtttgaaacggctaaaaagttctactcggaaaaagggcaatatgaaagcagggaacaattcgaggaggtattcgactgtgatgacgaaaccgtcaggcgggaggcactgaattggttggttgaacatagcacaggcgttttcaacgtaaacggtgttaagttcaaaatggtgaaagtggaaggcggaacatttctgatgggtgctacgataaaacaagataaatatgctgacaacgatgaaaagcctgttcaccatgttacactttcggattacttcattgggcaaacagaagtaacacaagaactttggcaggcggtaatgggtaacaacccttcgttcttcaaatgcagaaattgccctgtggaacaaataagttgggaagattgtcaggcatttctcggcaaattaagagaattgaccggtttgccgtttcgcttacccaccgaagcagagtgggaatatgcagcaagaggtggtaacaaaagccggaattacaaatatagcggaagcaataaaatcgaagaagtggcatggtgcgaagccaacagcaacaacagaactcacaaagtcgggacaaaagttgcgaatgaactcggattatatgatatgaacggcaatgtggcagaatggtgcaacgattggtatggagaatatcgggattttccacagatgaacccgaaaggtacagaaggaaaagagcaacgagtttacagagggcgtgcatggaattacacgggagaaagcatgcgcatatctcatcgaaattgcgattatcccaagcaagcaagtttcaacataggttttcgccttgctctctgattgcattcatcggcagcttgataagtcagccgaatttactccggcgacaaatcgggaaaacaaaaagcctctctcattcagatgacataagtagtgaggaaaaagaaatcaggatttaatgaggaaaaatttgctttggtgagaaatttgctgtatttttgcagacggatacttatacacggtttcgcagaatgaaagggtataaaaatataacttacgttttggcattgcttgcgatgatgttgatttcgcaaagcggtgtcgatgtatccacacgtggctgcaaatcttaccttttcaagacttcgttgacttctttcggcaaagccaagccatacggcaagctattcaacgccaaagagtgcgaaacgagaaacaatatcgaaatagctctttcggaaagcaggtataaggtcagcaatcatcaagaagtattcgactttaatccgccttacgatttcgagtttcacaaaacgaggatattgaacgagcgtcttcaaagcatgaaggcaggcttgttactcaccaagaacctttatcaattacaagtgttactgatataaaagaatatctgccaaaggtggctttggcttttgtccgatattcttttgtttttaacactctcttgtgtcggtttcgtgtaattctttgttttaacaccactaaaatttcaagagactacgcaagagcaaattgggacgaaaaaatttttcatcgaataaatttgatggtttgataatatcaaggctcggtgcattcaaaaagcgttcgagccttttctcttgcctctttatctgctatacttccaaggctttgattagttttctgcggtaagattgtgccgcaggcgtgctttgcagagcgagttgtgcggcaaattcatgcaattcgtctttaatccaaccctctttttctttgtagaacaacagaagttcgcaacacatctgctttacggagatacgtacattcgggttgatgatgaaagaaaagcaggcttctatgagtttgtcgggatttatggaaagtaacattgcggagagtgtttcatgaagtattcctcgcttttgttgtcgcaaaagacgagatagcaacttggcatacgtcctcatgctgctttgattttgtattttagtgaagtttcctaccaactcttcaacgaataactccccataatcaggtgttttctcacatagcttttccaaaatccaagcagcatgaaaactcaccttatcattcctttccatactaagatcatacagacaaacgaccgatagttcgccatcttctatccttcctatgaaacgccctatcgcagcaatgcccatactgcaatcaagctccttgatgagactttccttttcggttttactcattttcagaaagcatatcttgctccaataatgcctacgaagcgttgtgcagggtagttgtagtaattgtaatagcgttggaatgcaagattattcaattccgtaaagaaagtccattggtcggagtatttataggaagcattaaggttcaaatcgaaacgagatttcaatttgacgacttcccttttttcattcaagcatttgacagaacttgcaaaagtcggtatcaaggctacggtcaatttatccaccgaatattcgacagatattccggttttgaagttcggaacataccatgctttttccaaatcctcggttttcatgttttggaaagaagcattggctttcaaggtgatgtctttcagtttataatcgaaacgaaggtcgacataaagtcgcttaacattgtcgtgtacgatggaaaacatattgttgagagttgcattggtgtcaagagtatagaaatacttgtcttgaagcgaagcaaatcccaattccaactctgcatgcaggttgttcgaaccgctgtatgaggctttggcaaaaaggcttatggtactctgcaatttcgtttgcaccgaaggcgaaatataggggttttccctcaccatggcattgagtgtaggaagttctgtttcggacttcaatccgccttccacgcctatatgttctgtcagattaggcaaggatacgactatgtcgggaagaaaataaaactttccatgatttccgaaacatggagcgagggataaagctgtgtgaatgttgaattgctttatcatgaaatccatgtaagcatgtatatcgacaatcccttgtctgtttttgtaatcttcaagacgtaattccggattaaagaacggcgtaaggtcttttgcggaatatgaaccgacaatctgattataatttacctgcaatccgaggtactgtgtttgattgttgaaaagcgaaagttcttttcttgctcctgccacaagatttatatccgtttctccatagccccatttacccgaagtatgcttgaaagcaaaggaagcgaaattatgcagcatgctttcatctctgtacagacttcgatagttgagacgtgttcctattgtgtgatatgtggtgcggtaatcgctctttgccttgtctatcgtatcggaaaaaccgtaataatagtacctttgatgttcgtaaaagatgtctgcgtccaaggaaaaactctcccatatcttttttgcgtacaaatgcaggtcgttttccgcatacgtggagtgtgcataatcctttatctgaccgagagatgacctatgcttgaaatccgcactgtaaaccaaatccttggaacgtgtttgcgagtacgaggcttccaaaagagaggtaaaataagtgcctatgcctgctttaatatgagcattgtacaacttctcagcccgttcgtctttcacgtttgcaggctttatcttatcgaaagtcatgaatgtggggaattgtttacccgttttatcgtatttgaatgccggaagttcgaacgtggagtcgaatacgcttggcttactcgtcagtttgtacgcttcattcaccacaggagagaacgtactctttataacgacgctttcgttatactcatctttttttggttgttgggcttttgcactcatgcccaacaaacagaaaaccatgatggcggatatatactttttcatgtaccgatttctttttgtgtttgtttcttttattgctcttgttcctctattatgacctcatcgactgccgcattatgttccatgcgtttggtttcattttccttacgtgtcttatcctgctcttcggtcagttgaagaagtttttgttttgctgtctcgatcagttcttcatctccatcgtaattatcgactatgctttgcaatgtctgctttgcctgcaaaacattgcccttgcttttgaatatgtctgcccaaagcacaaacgtttttgccaaccagtattcgctcgacgggtttgcgttgatttggtgtatcatcttctctgcaccatcagtgtctcctgcaagaaaactcaactcagccaaggtgtattgagcctctccggcatattcgggattttttgcatggctcaaacgtttcagttcgacaatcgcttgtccgctgttacggtttgcaagcaaagatttcgccaaaatatacgttgctctttcctttacggtctcatctaccttttcaagcgaaagcagtttattggcatacattgttgcagaatcgaatttgcttaaatggaaacaacattgcatttgtccgtccgatgccaagagtttatgcgtacttacttccgctatcgcctccaaacggttgtactgctgttctgccttctcgtaattcttggcttcaaaattcaattcagctgctttaagcaaggatttttcggtgaacacattcttgggattttctatcactgcttcgtaatgcttcaaggcctccgtctttctgcccgacttgttcaaacaatctgcgaggtagtaatccgcattcacaaagaagattcccttcgggtatttgctcaaatactgctcgaaacctatgattgcattcgcacaatctccttccatatacaaattctccgccgcctgataacttatggaatccctatcccctgccgatactctcgctgtcggtaatttctcggtgtaagccaagtaatcatcgaccttattggctgagacatatatcgccttgatatttgccaaagccgcacgcgcttcctcactttccggatatgtcctgaccaatttatccaaatagtccaatgctttggcatcttcgccgagtttgtaatgaatcatacctatctttgcatagcaatccttcacgtgaagcgactgcggatataaagttatgacgttttgataagtgtccatggctttgcggttttcctccaaagcgagataggtatttgcaagttcgtattttattgttgccgcatagtttcctttgttgtaattctcatacgctcgctccaaaacctcttttttacgttcgtaattgcccaatgcaccgtatgccatggctgtctgataagacgcatagtctgcatcggggtgttgtttctcaacaatctttccgtactgctctatcgccgaatagaaatccttacacatatacaaacaatcggcatatcgcaacacggcatcctcgctttgcttggcatcgagtttgccgattgttctttggaaatagttctttgccgtggaatatttcttttgtttgaaaagattataacccatggtataatcggcttgggcgagatacgggcttttcgccgcacctgccgaagcatagaaggcattgaggttctgcacggacaaatcatattctcccatttggtagtaagcctcggctttcatatagtatgcagtagccgtaagtatattatcatgtgcctgagacaacgatttatccaaataaatcaacgcatcctctgccctcccctcgttgaacacttctattgcacggttcaagcacaatcgctgataagccttgtttgcagacaggctgcgttcagacatttgctccaacatctcaaccgcatcgcgataattcttcatgtttccgtacaactgtgcaagatactcctttgcctcatcggctttgtcggagttcgggaacatgtccgcaaacgcttggaaagccttgacagactcgttatacgccggagcggtttcgtaggaaacctttgcgtaattcaacaaagccttctcttgaacagccttatcgaaatccatctcccaagcctccttaaacatgacttgtgcattctgcttttctcccaattcaaggcagcatattcccaaatgatagaaagcgttttgagccaaagagtccctgttatccgtcgctttcaaaaggtaaggcttcgccttggcatattccttttcctccaaaagggtgtaacccaaaagataataatcctgagcatcggcactctcttgctgtaccgccttttccagataaggaattgcttccttgtaccgtcccaatttgtaataagcatcgcccaacatgcgattcaactctccgcttcgtttggattgggatttttccgaaaggctcggagcaatctctatcaactcctcataatttccacgatagtagtaaatctgggcaatataataaggtacaatctttccgaagtttttatcctgctgcaagtcgaggaattctttcaatgcaggctcgtactgctgctgttcatacattatgtgagcgtgaaaatagcttgccgaagccgcatacctgcttttagcctccctaaccttatccaattccgtcacggcctcatcataattaccattcaagaacagacaatgaccatatttgtaattatactcataccaactctccccttcaagagccgaagcattcattccgcgatatacagccaaagcccgctcgaacttttttgcatcggaatagaaatccgccaaaagaaaagatgccttattcaagtacggagattgcggatactgtctgatgaagtcggaaagcaagacatcggcatctgcattcgtcaaagcgtgagaagctgccgcacgatagaaaaaagcctgctccgagaaaggattatcctcctgcggataacgggaaagaaagtccgaaaagccctccaatgacgaagaataattgccgctcatatagttatcatatgccgccttgtagtcggaaacacaacgttcgttcatgattaccttttgagaataagcacaaaaggcaaacaaaacaatgcttgcgaaacaatagaaaccacctgaaagtatcctcatgataatgtagattttgattttgctaaattaactccgaaacacggcctgaaagtatatcctccctcctttttatcaaccatggaatgtttacaacgaaatcagaagcacgggaaacaaacaataatgcgataaaacaaacctctaagttctccattccgaaaggcaaaaagctggctggaaagcaagacatcaaaacagcgaaaaagcaaaccccgattcattgaaattgaatcgccgaaagaatttcgcgaaacgccgattcgattttttctttcggcgtttcatttcaacaaaacgccgttttgcagaaagacaaagaagcaagataaattcatgtcaaccatttggagacatgaataaggcaaacaaaaatgtgtttctatgcaatgattccacaagaagagaaagctctccgaacaaaaaaagcgacgatttcgcaaaacgaaaccgccaatagttctttatactacactgctgcaattttcatcagaaaaaatgtctataccaaaactttattttgtacatttgcaacaatttcatgtagcaaaaaaatactcccacggagtacgcaggagttagaaagatctgtggcttatagccttattgtgaaaagctttcacaaagtatctttgctgcaaaggtagtaaataatttgaatacaacaatcaaaacaaggtaaaattatgagcaaaatcttgggaattgacttaggcacaaactctattggtttggcaatcagagatacagataagggagaaacttttgtagaacaagtagatttcttcagttcgataatattcaaatccggtgtcggcagtggacaagcaggagaattttcatacgcagccgaaaggacaaagaaacgttcaataagaagattatatcaatcaagaaaatatagaatatggaccacacttgctttactgatagaaaacggatattgccctctatcaatagaagatttagataagtggagacgatacgacaaagaaaaaggattgaaaagacaatatccaattgaagcaatacaatttgaacaatggataagattagattttgacggagatggcaaacccgactacataaatccttacgaattgcgtgcagaaataatgcaaaaacaatttgatttcaacgaagaaattaatcgatacaaattaggtaggattctgtatcatataacccaaagaagaggcttcaaaagcagcaaaggagaaacgctcaaagaactttctgaaaatgagataaatgaagaccttgatttgtctgttgctctacaaaaatctgaggaaaagaagtctcaaaaactaaaagatttcatgaaagaacacaacattcctactgttggttgggctttctatgaacttacaaaacgaggaatcagaataaaagaaagcgaataccaagctgtaaggatacaatacaaagaagaaatacaaaagatatttgaatttcaagaaggattagatacaactagcgatttttacaaacatctcatgagcgaaaagaaaggcgaaggaacaattttctacaaaagacctctccgttcacaaaaaagtaaagtcggtacttgcacattagaaacaggcaaatcacgctgtccaatctcacacccggaatttgaagaatacagagcatggagctttataaacaacatcaagtatagaacaagtactactgcagaatggaaaactttgcctttgaacctcaaacaagaactattcaaagataaatttctcagaacaaagtcatacttcaaatttgaagaaattaaaaactggctctcttcaaaattgtgtcttcaattggaatacaccaacaagaaagaaacttcaaccatcaactacaaagataagacaaatgttgtcggctgtccgatttcagcacgattgaaaaacatattaggagaagactataaacaatggaaattcaatagtgataaagaacgcactaaccgaaagacaggagaagttcacagaataacctatgactatcttgacatttggcatatatgtttctcatttgacgaagcagaatttgtcgaagaatttgcaaaatgcaccttgaaacttgacgacaaacaagcaaagaaactttgcacacttcacaacaacatccagcaagaatacgcttcgttgagtctcaaagccattagaaatatcaatccgtttttacaaaaagggttgatttatactgatgccgtactcttggccaaattacctgaaatattcaaagacaaatggaatgaagtagaaaatgatattgtagcagctattgatgacatcatcaaagaaaacagatacgaaaaggaaatattagatatcgtaaatgacctaatagccaactacaaatccttagattacggcgagcgatttgcagaacacaatacagaatacatactacaaagtcaagattacaccgatattgagagcaaattaaaagggcattttggcgagagaacatggaatgcaaaaccatgcgaagagcaagaacaaataaggaaagacgttcgtaagttgtatcaaatattctttggaagttcttcaagaggttatttcaaacagcccaaagtttcagaaagccttgccgaatatctgaaaaagcaatacacctacttaaatgatgatgacttgaaaaagatatatcacccatcaatgatagaattctaccctaaggtaaaaccaacactcttagatgataacaaatatgtaaaacttcttggcagtcccgttataggagcattgaaaaaccctatggcgatgaggattcttcacaccctacgcacccaaatcaatcaactaatcaaagaaggcaaaattgatgaatatacaaagattgttgtggaaactgctcgcgaagtaaataataccaacaagcgatgggcaatagaagaataccaacgaaaacaagaagaggaaaacaaagaagtagagaaaataatcagacagtactaccaaaaggacaacatttctgatgacgaaatcaaaaaagcaaaaatattacttgaccaatttgatgtagagaaagataacaaacaagaaaagaaaaaagatacacaaccagacaagctaagcgatacttggagcaaagtaaaaagcaacaacataaaaagatacaaattgtggcttgaacaaaactgctgttgtatgtacaccggcaaagtaatacgcataagtgaattatttgacaatgataagttcgacattgaacatacaatacctcgaagcatctctttcgatgattctctttctaatctcacaatatgcgattctcatttcaaccgtagcataaagaagaaccaaataccaacacaacttgacaactacaatgagataaaatctcgtttggaactatgggaacagaaggtcaaatccctgaaagaaagagttgaatattggaaggaacaatcaaaaagatcacagacaaaagaccgaaaagaccaatgtatcaaacagagacttctatggcagatggaacttgattattgggaaaagaaacttgcttcatttacaatcaaagagttcattgacggtttcaggaacaaccaattaaatgacacacgtatcataacaaagtatgcatttcattatctgaaaacagtttttgaccatgtcaatgtacaacgaggcaatattactgccactttccgtaagattgcaggaatacaagcaaaagacgagaagaaggataggagcaaccattctcaccacgctattgatgcagctatactcacccttattccaagtgcaaagcaaagagataagatgttagaactattctataaagttgaagaatacaaggaattgcaaaaagaaaaagagcaggtagcatatcaagagaaattagaaacagaaaaaacagcaaacttgccgaaagatgttgcaaagattaaagaccatatagagcaaaatatttttgttaatcatatttctaaagaccaaacgcttacaccaaccaaacgcagaaaacgtataaaaggtaggatcgacaaaaacaaacaatgggtaataacaggagactgcataagaggaagtttgcataaagacagtttctatgggtgtataaaacttgatggtgaaagacattacgtcattagaagagtattgaaatacaaagcaaccgaacaagataaaggtttcaaaacttggaaagaattgtacgaagcaatcgtagataaaacattatatcaaagattgataaaaccattctgcaatgacaattcagacgaacctgccattgatttcaaaacagcaatgcttgaacaaggaggattgtatgataatggtatgaaagtaaggcatatccgttgctatacatcaatcaaaaatccattgcaaataaaaagacaaacatacaactcaaaacaagactataagaactactactatgcagaggtcggggatatgtatgcaatgtgcagatatgaaaacaaagagacaaaagaagttgaatacaaaacatacaatttatttgaggttgcagaaaaccacaaaagcatgcttgagtttattcctcatcaaataatatctaagaaaaataatcgattgtattttattcataagttgattgatggcgatatgttgctcatatatgataatacagcaacagagttatttgatatgtctaatgaacacctttcaaaacgcctatatgttgtaaagggatttgaaaatccttctacaataaaactcgtacagaatagcaatgcacgacaagacactgatttaggcaaaggagaaagcatcaaaagcttcaatgatcttccacaaaagataagacaaagcataaataaattgcactacttgcttcgcggtactgatttcgagattataaacggaagaatagagttcttgaataaaatgaaccattatgattaaacgaacattgtgtttctcaaatcccgcatatctgtcagtaaagaacaagcagttggttataaaactgccggaagttgagactaatgatacactgccagatagcttcaagaagaataccgttaccacaataccgatagaagacataggaatagtagtgttggataatcagaggataaccattactcagggtgttatggaacaattattggagaacaactgtgccgtgataacctgcgaccaaagccatctgccgataggcatgcacctaccattgaacggaaatagcacacagaccgaaagaatgagataccagattgaagcctctttaccattaaagaaacagctttggcaacaaactattattgccaagattcaaaaccaagctgcaaatctcaaacaaatcagaagaacagaagtacgcaacatgctcaaatgggcagcagatgtcaaaagtggcgatagtgataatatggaagcaagagcagctgtttattactggcagaacgctttcccctccatatctaacttcatacgcacaagggaaggcattgctccgaacaacttactaaattatggctatgcaatactcagagcaatagtagcacgtgcattggtatcgagtggtttgctgccgaccctcggcatacatcaccgaaacaaatacaatgcctattgtcttgcagacgatattatggagccatacagaccgtatgtcgacaaattagtcatggaattatttgaccaaaaccgaaactgcgaagagctaaacaaaaaattaaagtcgcaattacttcaaatacctgtgatagatgtaatcatcaattcacaacgcagtcctttaatggtagcagtcagcaccaccactgcctcattacaaaaatgttactccggagaagctcgcaaaattatttaccctgttatgtagcaatgcaacgtttcagtgaatacagaatcatgtgggtaatggtactttttgatttgccgacagaaacaaagaaagatagaactgcggcaacaaagtttcgaaaagcactcttggaagacggctttaccatgttccaattctcaatctatgtgagacactgcccaagtcgtgaaaatgctgacgtgcacatcaaacgagttaaaaactccctgctggaacatggaaaagtgggaattttttgcatcacagacaaacaattcggcgagattgaaatctactattgtcgcaaaccggaacatacaaaaggctgtacacaacagttggaactattctgaaacctttgttttttcttttctaattaccagtataaacaactgaatccgaggaaatttcccggattcagttgttcgtgcactgcaaagatactaatttgaaagcaattcacaacatgaccttatacagcttcaatgtaccaattgttgttcgtgcactgcaaagatactaatttgaaagcaattcacaacgagatatgaataagaaacatgaaacaaaaagttgttcgtgcactgcaaagatactaatttgaaagcaattcacaacagatgcctgcgaagacggtcaagggcaacagttgttcgtgcactgcaaagatactaatttgaaagcaattcacaacctcacccgaatggctaatcttaggcaaagggttgttcgtgcactgcaaagatactaatttgaaagcaattcacaacttgcgtaggtatgtcctcggagcttgcgagttgttcgtgcactgcaaagatactaatttgaaagcaattcacaactagattgtatgtcggattgcaaatcatacagttgttcgtgcactgcaaagatactaatttgaaagcaattcacaacgacaacgccgttaatgtgattggtaacgtagttgttcgtgcactgcaaagatactaatttgaaagcaattcacaacgaaaatcggaaatccgttgctcc

SEQ ID NO: 4008 - DNA, 15050 bp, synthetic construct
  source 1..15050: mol_type = other DNA
  misc_feature 1..15050: note = Synthetic
ccggtacaatcaacattatcaggctgtaaaggcacctgtacaattacatcccggacttagccgggtcgacggtttcctatacaccagggacatcaggcataacgcccgacaccccgcttcttgtactacttctctgtcttatgaaatctgtcaaagaactccttctttatccgctctcccgtgccgcgggacgacccgtttccggaaaagcgagtgcaaaggtacactttttatccgaaccgccaaaacttttcgcaatattttttcaaaaaatctcattttttccgaaatggcgacaaaaccgagaggaagcaaacactcctataccttattatattatataaggtgatgggtatcggtgatgggtggtggatgtcagcaactccaaaatgctctgcggacatattggactccattttccttttgcccaaatcgatagttggactatttctatcttgcccatgttataatggttacaaccgacaaaaaactctgttaaatgacaatgcatttttttattatttcacttgtcttttattccaatatttcttatatttgcaagcgaaaataaaaaaactcccacggagtacgcaggagtaagaaatcttcggcttatagccttgttgtgaaaagtctttcacttcgtatcttgactgcaaagatacagtataattttgaaataaccaaattaaatcataaaaatatgtcaaacaaaatattaggaatagaccttggtacaaattctatcggactatcattgaggaatacggagatcgtcggtggagttaaagagcaactcgaatattttacatctattattttcccttcaggagtagggaaaaacaaaaccggtgaattctcatatgcagcagagcgaacaaaaaatcgttcatctaggaaaatccataaagttcacagatataggaaatgggaaactttgaaactgttaatagaaaatgattgttgtcctctgtcaatggaagacctactgaaatggagcaagtatgacaagagcaaaggacttaaacgtcaatatcctatacatgcaacccatttcgagcaatggatacgcctagactttgacggtgacggcaagcctgactatactagtccctttgagttaagggcaatactgatggaaaaacaatttgatttctccgacaagactaaccgttataagttaggacgagcattatatcatattgcgcaacgaaggggcttcaagagcagtaaaggagagacattaaaagaacaagagaaaaacgagaaagaggaactcctggaagttgacatcaatgaagcattgaagaaatccgaagaaaagaaatcagggaagcttgcagaatacatgaaggcgcacaatcttcctacggttggctgcgcgttctaccatatacttaaggacggtatccgtgttcgcaatagcgaatatcaagccgtgcgctcacaatacaaagaagaaataagtcgcatttttgaattccaaaaaggcttagataaggaaagtgatttctacaaaaggctagtaagcgaaaagaagggagagggaacaattttctacaaacgaccgttgcgttcccaaaaagatgcagtaggtaaatgcactctcgaaccaaataagccgcgatgccctattagtcacccggagtttgagaagttcagagcatggagtttcattaacaacatcaaatttggcgaggaacttagagaagaactctctccagagcagaaaaaagacctgtataaggagaaatttctcttatcaagaaagtctttcaaatttgaagtcattcgtgagtggatatgcgaaaggacaggaatgacactgaactacaagaacaaaacaatcaactacaaggacagcacaagtgtttctggttgtcctatatcaggaagactcaagagactgcttggcgatgaatgggaaagttggaaacttgaatctacagaggagaaaatcaacaagaagactggcgaggtgagaaaaatcacatatgatgtctacgatttatggcatgtctgtttctcttttgacgaggcagaatatgttgatgattttgccaaaaataaattgaaattcgatgacaacaaagcaaagcaattagttgccatattcaatgacattcagcaaggatatagccaactgagcctgaaagcaattaggagcatcaatatgttcttacaagaaggaatgttatataatgatgccgttttgctggcaaaactaccggacatctttagaggtagatgggatgaagcaaaagagaacgttgtttctcaaatagataatataatgaaggagaacaggaaagaaaaactactgttttccattgccaaccatcttattggcaattacaagtgtttgacttatgatgaacgctttgccgaccacaactatgattacattttagacgattccgattataaagacatcaaagatgctatccttaatgttgtaggagaaaagaaatggtcaaagaaagatgcgtcggaacagtccgagatattaaatgatgtggcgaaactgtatcaagattttttcgcatcttcaaaacgggattattacaagacgaggaaagttgcagatgctttggctgactatttgtcaagcaagtatgatttcctgtcagaaaaagaattgaagaaaatttatcatccttcaatgatagagttctactctccggcaaaagagcaaagactcgatgacggcagatggctgaaactattaggcagtcctgttataggagcgctgaagaacccaatggcgatgcgcgtgctgcacactttaaggaaacgtataaataccatgctaaagaaatctatgatagatgccgatgatacaagaatcgtcgtggaaacagcaagggatcttaacgatgccaacatgcgctgggccatcgaagcttatcagcgagaaagagaaaaagagaataaggaatacggaaaaatattaaaggagtattatcccgaacgaagcatcagcgacaaagatatcgtccaaatacgtctgatgtgcgaccaacatgacatccctggagatgacaacaatactgatatggaaataagaaagacagttaaagataaaaaagatgaatctcctgtttataagaaagatgttactaaatatcgattatggttagagcaaggctgtcgctgtttgtatacgggaagaattataaatatttccaatttattcgacgataatgcttttgacatcgagcatactatacctcgaagcatctctttcgatgactctttaaaaaaccttaccatatgcgatgcccattacaatcgttcggtaaaaaagaatcagatgcccacacaattggcaaactataataaagatgccaatggatacacagcgatactgccgagactgcagccgtggattgagaaagtggagcgattgaaggacaatgtggacttttggaaagcacagtcaaaactatcgcaagataaagaaagaaaagactattgcatacgccaacgccacctttgggaaatggaactagactactggaaaagcaaagtggagcgatttaccatggccgatgtgacatcaagttttaggaacaaccaacttaatgacactcgtatcataacaaagtatgcgtaccattacctcaaaactgttttcggcagggttagtgtgcagaaaggcagcgtcactgctaacttcagaaaaattctcggcatccagagtgttgacgagaagaagagccgtgacaagcattctcatcatgcgattgatgccacagtgcttacattaattcctaatgcagaaatgcgggataaaataataaagactttctatagcatccaagaaaaagaacgtttcaacgaggatgtttctgcactgaaaaaagaattgaccaaagagttgaaaaactgccaactgcctagcaacatctctgagatagttccatttatagaggaaaacattctagtaaatcacatatcaaaagaccaaacgcttactcctgctcacaggcgcaaacgcataagaggaaagattgttcctaaaagagacgaacatgggaacatcgtatacgaaacgaatgctgatggctctacaagaaaaaacaaacatggccaccctattcctcaagcaaaggaatggataagtggcgacagcattcgtggacagttgcacaaagattctttctttggagcaataacacaatggttaaaagatgacaatggagaaaaagttcttgacaaagaaggacatagaatatcagatacaaaaatatactatgttataagaagactgttgaaatataagtcatcagatattgactctggattcaaaaattgggaagaacttaaatctgcaatagtagataaggatctattcataattataaagaatcagttcccggagaacacttcattcaaagaagcctgtgaacaaggaatatacatgtataagaaaaacagaaatggcatattagactattccgatgaatgtaagttgacaaagattcgccacattagatgtttcacatccgtaaaaaatccacttgcaataaaaagtcagacttatatatccacaaaaccatataagcaaaattattatgcagacatgggagacttgtatgcaatgtgcagatacgaaagtgttgacaaaaaagaaaaggaataccacctgtttagtttatttgatatcagcaaaaacaggaaacttggactggaagacattcctaccactattgagagcaagaagaatcacagattattccttaaacacatgttgagaaagggagacatgctattagtatatactgattcggaagaagcacttaaagaaaaagactataaaacattattacagcatttatatgttgtaagaggatttgaaaatgatggaaatagaattattctccaaaaacatgtcaatgctcaacaagataaggacttaggaaaaggagagtctgtcaaaggctcacaccaaatgccagaaaaaataagatgtggtataaataccataaaatacttattatgcggtatcgattttaaaattactcccaaaggcgttgaatttgcctgattatttccgattgtcatataaatgtcatcatgataaagaaaacgttatatttcggcaatcctgcctatctatcactaaggaacaagcaactggtggtaaaactgccggaggtggagaagaacgatttgcctgacgtcatcaagaaggatagcgtcaggacaatacccattgaagacataggcataatggtacttgacaatcagcagataaccattacacaaggactgatggctgcgctgcttgacaacaatactgcggttattacatgcgatggcaggcgcatgccatcaggattgctgttgccactcgaaggacacacgctgtacaacgaacgtttccgcaatcaaatagaggcatcactacctctgcgcaagcaactgtggcaacaaactataaaagctaaaattgagaaccaagccttttgtttgcaaaagaacactcccaagtcttatgcacctctccatgtcatggcaagggacgtgaaaagtggagatcccgataactatgaggcacaagcagcagtttactattggaagaacattttcaaagggaaaccagattttattagggcgcaagaaggagacgttccaaacaatctgctgaactatggatatgccatactccgcggtgtggtggcacgttcacttgtaggcagtggcctcttgcccgtttatggtatccaccatcataatcgttacaatgccttctgccttgccgatgatataatggagccatatcgtccctttgttgacgaccttgtaataaacgtaatgtcacgcatggaagtccatgaagacctcactatagaattgaaacgtgagatgctcaacatccccgtaattgatgttcgcatcaacgggaaacgcagtcctctgatggtggctgtcgggcagaccactgccagtctagccaaatgttttaacggagaattgagaagaatcagttatccagagtttgtatgaacgaacgttttaaccagtatcgcatcatgtgggttctcgtgatgtatgaccttccaactgaaacgaagaaagaacgaaaggctgctgccaagttccgaaaagagatcatgggtgatggtttcaccatgtttcagttctccttatacgttcgtcactgtgcgagtatggagaatgctcaggtacatataaaaagagttaaatcgctacttcctgaaagtgggaacgtaggaattctgtgcataacagacaaacagtttggcgacatccaaatattctctgctaaaaaagaaaagaaaactaccgtaccataccaacaactagaactattctaagaataaagattccacgttgttttgtggaatctccattctttttggcatgttttttatttctattatgccacgtaaacacctcatttacaacctattgtcccaatcgggatgttttttcttgtgcaaagatacgaaatttaaagcaaatcacaacatgcagctggtagtcgtaacgagtatcaggatgttttttcttgtgcaaagatacgaaatttaaagcaaatcacaacaaggaagaagcctacccgacgctgcgcggtgatgttttttcttgtgcaaagatacgaaatttaaagcaaatcacaactggtaggagatagataactgtgacatactgatgttttttcttgtgcaaagatacgaaatttaaagcaaatcacaactatgtataatttaatatagtttttattatgatgttttttcttgtgcaaagatacgaaatttaaagcaaatcacaacataatcaaccacacatgtggtattttagggatgttttttcttgtgcaaagatacgaaatttaaagcaaatcacaacgatgttgattctaatcttcgttatgttactgatgttttttcttgtgcaaagatacgaaatttaaagcaaatcacaaccattacctttgtctcgttgttgttactcagatgttttttcttgtgcaaagatacgaaatttaaagcaaatcacaactgaactacacaccagttggcaagcgttatggatgttttttcttgtgcaaagatacgaaatttaaagcaaatcacaacacccagcgcgttcacctcctcgaaatgcggatgttttttcttgtgcaaagatacgaaatttaaagcaaatcacaacggcacgacggccatcgcttgcatcaaggagatgttttttcttgtgcaaagatacgaaatttaaagcaaatcacaacggagagcggcgttgttcatactgctgactggatgttttttcttgtgcaaagatacgaaatttaaagcaaatcacaactgaggaactgcaaaaggaatacaccgccaagatgttttttcttgtgcaaagatacgaaatttaaagcaaatcacaaccctcgtcgtgctttgccgctgcatctatcagatgttttttcttgtgcaaagatacgaaatttaaagcaaatcacaacttctatcagtttatatcttccaagaaatatgatgttttttcttgtgcaaagatacgaaatttaaagcaaatcacaacctctctacgctcgactctatgatggagtgggatgttttttcttgtgcaaagatacgaaatttaaagcaaatcacaacggtataacgggaggttagtcggagatcatgatgttttttcttgtgcaaagatacgaaatttaaagcaaatcacaaccggtgccgttatcgaagatttgaaaatcaagatgttttttcttgtgcaaagatacgaaatttaaagcaaatcacaactggcagccattatgcaattccgacaaacgggatgttttttcttgtgcaaagatacgaaatttaaagcaaatcacaactgcagccaggaggcgaacatgcaaaggtagatgttttttcttgtgcaaagatacgaaatttaaagcaaatcacaactgatttcgtttttctttgcatccataattagatgttttttcttgtgcaaagatacgaaatttaaagcaaatcacaaccgactgcagaccagagttgaaggagtggttgatgttttttcttgtgcaaagatacgaaatttaaagcaaatcacaactaacggcttcggttcttctgcgaaaacctgatgttttttcttgtgcaaagatacgaaatttaaagcaaatcacaacggcgaacggtggaaccggtaagtcattcctgatgttttttcttgtgcaaagatacgaaatttaaagcaaatcacaactgaatgggatgctgagaaaaaaaagttaaagatgttttttcttgtgcaaagatacgaaatttaaagcaaatcacaaccgacgaggaggacggaaacaaggtgtatgagatgttttttcttgtgcaaagatacgaaatttaaagcaaatcacaacttctaaagttcgacgatgattcaattatcgatgttttttcttgtgcaaagatacgaaatttaaagcaaatcacaacagtaatttagttcagtatattgatggttgtgatgttttttcttgtgcaaagatacgaaatttaaagcaaatcacaactcaactctgagtgactggcgtctaatggaagatgttttttcttgtgcaaagatacgaaatttaaagcaaatcacaaccaacaagccgtcgttctacaagatatacagatgttttttcttgtgcaaagatacgaaatttaaagcaaatcacaacactccgatggcaagcaatctctgagcagttgatgttttttcttgtgcaaagatacgaaatttaaagcaaatcacaacttggtggcttgatctcaaatgctagcaatagatgttttttcttgtgcaaagatacgaaatttaaagcaaatcacaacacaatcagcctcacatgtggttttttaatgatgttttttcttgtgcaaagatacgaaatttaaagcaaatcacaaccagcagtagttgcatttattacaggagcagatgttttttcttgtgcaaagatacgaaatttaaagcaaatcacaactctgttcaagaagtgttaaggtcacccctgatgttttttcttgtgcaaagatacgaaatttaaagcaaatcacaactcttgccctgcaatagtaatcacgatgttgatgttttttcttgtgcaaagatacgaaatttaaagcaaatcacaaccgtgtaccatgtaggcaatttcaaggttcgatgttttttcttgtgcaaagatacgaaatttaaagcaaatcacaacgataaatgttcgcatgtttagagaaactcagatgttttttcttgtgcaaagatacgaaatttaaagcaaatcacgacggcgacatgtctgagtttcccatgcagatagatgttttttcttgtgcaaagatacgaaatttaaagcaaatcacaactgcagccgtttctttgtactccgtgccggcgatgttttttcttgtgcaaagatacgaaatttaaagcaaatcacaaccctccgggaacgtgccacttgccgtcacatgatgttttttcttgtgcaaagatacgaaatttaaagcaaatcacaaccgttgacctgcacacgaatgatgttataacgatgttttttcttgtgcaaagatacgaaatttaaagcaaatcacaacgacacgcgcaataacaattagagtgagcgagatgttttttcttgtgcaaagatacgaaatttaaagcaaatcacaacatcagtcttcttctcaccaatgaggtgaatgatgttttttcttgtgcaaagatacgaaatttaaagcaaatcacaacataatccccagcgtaataatctgtcttggagatgttttttcttgtgcaaagatacgaaatttaaagcaaatcacaacctctgaaggtgtcatcatcccaactgttgcgatgttttttcttgtgcaaagatacgaaatttaaagcaaatcacaactggggagggggagcgccgagcggggagcgcgatgttttttcttgtgcaaagatacgaaatttaaagcaaatcacaactgcgtcgcgttctgcgagcccacgatgctggatgttttttcttgtgcaaagatacgaatttttaagcaaatcacaaccacgatccagcagcagattacgaaactggaggtgtttatccttgtgcaaagatacgaatttttaagcaaaagccccatcgctgactcttcaacggggcgctgtgaaatcaatatcgatgctaactatgtaatacgatatgagcctataaatgttcctatttcagaaaaagcgcggtttagaatctgtttctgttcttcggttaatgtatacacctttcccctcactggatagccattaacacgctgtgtcagccatgacacgcttttcccgaaataattctttgctatgtatgaccaaggaatgagtttatatgccttttcgcttatttgctctcgtatagccgccttctttatttcctcgttctccacttccatgttggcgagccattcttccataaaagcttctatctccttctcgtgtccttccttatgttcaactatccattgcataagttctgctttcctcgccccactctgcacgtcggaatatccagtaaccgccttcaattcctctaatacttttgttatctcttccataataattattgtgtttattaagattttactctttttcgtttgcttaaagttctgtatctttgattatttcacattgcaaaaatacatattaatatttatatgtgcaagttttatatatactagtttgggagttgcatacaattatatttttgaccgccttactgtaaacgtgaattagttctatattacctagccctaggcaagcactaagcatgccctaagcatgctgttaagtatgcctagaaggagagaacaaggagagaagaacgagagaagagcgagcctgctccttgggtcgagcgagggaatgacctctgaagagtgaggcaaaaccacctttctatatttccgtcacgcttcgtcacacgaggcaggggattgtcgttcgccagtaacgacatttgacgtgtcaaagatacatgtttgggaacgtcaggaggcacaagtgagaatgtcaggaggcacaagtgagaatgtcacttgtgcctcctgagcagatgagtaatatgttttcattatttcgtttgccacaggtcactctccactatgcggcggagtccctcggcaagtgtggctcgcggacatgcgagattgatgcggatgaatgagcgctggtgctctccatacgcctcgccgtcggctatccacaccttgtctttatggtacagatggtcggcaatggcaggtgaggagagacctgcagcggagcaatctacccatgcaagatatgttccttcgtgcggagcgacccacagttgcggcagtttttcggcgaataggtcgcgcaggtagttgtagttgtcgagcacatagtcgtttaactgcttgagccactctgccccgccatcgataaatgctgcctctgtggccactattccgaaagggttgacatcacacgtctcaaagatattgatggcgcggtcaatgcggtaacgtttatcgggatcggcaacgatgatgtcagcattctgaagtcccgcgatgttaaacgccttcgacgccgccacacatgtggcactgttctgcaggaactgctctccgagcgatgagaagggggtatattgatagccaggtgcaacgaactcacaatgtatctcatcggagatgacgaagacattatggcggaaacatatctcgcccatgcgctggagttcctcgcgtgtccataccctgccagcggggttatgagggttgcataggaggaagatgcgcaccttggggtctgcacatgctcgctcgaaggcttcccaatcgatggtaaaggcgggggtagcgttgagggttgagcgttgagggttgagcgaagtgagcggggaggcttcgtcaagaagaaggggaacttcctctgctatgcacccttggttgcggatgcttgagaagaagcagttatagacaggcgttgttacgagcactttatcgccaggaagtgtgagtgcgtgaattattgcggatattgcgggcaccacgccgatggtatagatgaaatgctctcgtttccattcttttgctccgtgacggtcgcggaaccagcgtatcacggcatcgtaataactctgtggcacgagggaatatccgaacacgccgtgttcgacgcgtttgcggagtgcctctacgattcccggatatacatggaagtccatatcggccacccacaacgggatgatgtcggggtcttctgcctcatcccatttaatgcagttggaccctcgtcgagtaatgatttcgtcgaaattgtaattcatagttttaaaggttatgggttataggttataggttatagttcctttctattgctacgctttatgaaagcgcccttacgggtcgagcgatgggttattggttaaaggtgttttgccgctctgtaatcttgcagtcggctggctgcttgatgttctcgtcgatggtgatgcggccgatatggtcggccacgatgctgcccgtacgagggttcttgatttctgtgatagaacctatgatggtggcgcagacatcagaatcctcgaagatgcggtcgctgtcagcaccgaaggtgcagtcttcaagcaccagttgctcggcatagcacagcggctgctcgcctgtgatgtgacatctcacgagtcgcacgttctttgagtgccacgcaagatactcgccgttgagttcgctatcatatatagtaacattctcaacctcccagaaagagtctttcgtcgttatcttggcgttatgcacctcaacgtttttgcaatactggaacacatacttcgagtcgctcacaagcccgtcaacaaagacgttctcgcagaacatgaaaggataggtgccttcgtgaagtgtgacgttcttaatcttgatattcttcaccttccagaaagtctcgtcggcatcgttgaaggtgacgttctcaacggtaacgttattcatctcgcggaacagtttcggagcgtctattattgtatctcgcatcaccatatcgttgctataccagatggcggaacgcgagcccacctcaaagtagcagttagttatcagcgagccgtcgacgtgccaccagggatatttcccaatgaaacggcatccgtcggcctcgatgtttgtgcagcatttaatgcccgactcgccttcagttatggtgacattctcgagcctggtatcatgaattgcaaagagaggtcgctcgcctccgaattgtttgtcgcgtattatattcattgcagtattatcgttttcgtttgcaaagatacaacaaataatggagaaatgacatacctttttaacggataaatttatcattaatacgaaaataacaaaaagaaagtgctaaaaaagtataaaacggcaattgttcaaatagtttttattaattttgccgcactaatctaaaattcaaattattaggaaaacataaaacaaaagataaatctaaagaaatggaacaacaaaaagttaagcctgcagatggcaaattaggtattatggttgtcggatgtggtgccgtgtcaacgacattcattactggcgtactcatgactcgcaagggtctggcaaagcctgtcggttcaatgacacaatacgacaagattcgcattggtcgtggagcagacaagaagtacatgagttacggtgacatcgtaccattgacaaaactcgaagatatcgagtttgccacatgggacgtttatccacagaacgcttaccaggctgccatgtatgctgaagtattgaaagaaaaggatatcaatcccgtacgcgacgagctcgagaagattgtgcctttgaaggccgctttcgacaagaactacgccaagcgtcttgacggtgacaatgtgaaagactgcaagacacgctgggaaatggtagaggctctgcgcgaggatatccgcaaattcaaggcagaaaagaactgcgcacgtatcgttgttatctgggcagcatctacagagatttatgttcccgttgacgagaacgttcacggaactctcgctgcactcgagaaggcgatgaaggaagacgaccgcgagcacatcgctccgtctatgtgctatgcatacgctgcccttacagaaggcgctccgttcatcatgggcgcaccaaacaccaccgttgacatccccgcaatgtgggaactggcagagaagacaaagatgcctatctccggcaaggacttcaagacaggccagacattggtgaagagcggtttcgctcctatcatcggcactcgctgtctcggtcttagtggatggttctcaacaaacatcttgggcaatcgcgacggtcttgtgcttgacgagccagcaaacttccgcaccaaggaggtttcaaagctctctacacttgagaccatactgaaagccgacgagcagcccgacctttacaccgactactatcacaaggtgcgcatcaactactatcctccacgcaatgacaacaaggaaggatgggacaacatcgacatcttcggatggatgggctacccgatgcagataaagattaacttcctctgccgcgattccatactggcagcaccgctgttgctcgacctctgtctgctcagcgacctcgctgctcgcgccggacgctacggcattcagcgtttcctcagcttctacctgaagtcgccaatgcacgactacaccgtaggtgaggaagccgtgaacaacctctaccagcagtacacaatgctgaagaacgccatccgcgagatgggcggctatgaggctgacgaggaaatcgactaaaagaaatgtctaaacgtaagaaacagaacccgcgacgtctgctcagatggttgtgggttcttttggtttttgtcgtggtgtcatggataggatggtactgcatgcccatgactgcaagccagaaagagcgtaacaagaccaccattgagtacaggagttgttacgcacttatgtctggtaaagatacattatt

SEQ ID NO: 4009 - DNA, 14571 bp, synthetic construct
  misc_feature 1..14571: note = Synthetic
  source 1..14571: mol_type = other DNA
gtttcatgtgctacgcacgtttatgagtttgaatgtttctaagtttatgggtttaaaaccaactgaaacaatttcaaaccatttcaaaccatttcaaaccatttcaaacaatttcaaacaatttcaaacaatctcaaacaacctcaaacaacttcaaacaacttcaaacaacttcaaacaacttcaaaccacttcaaaaaaatcacctttcaatcgtcttcgtttttagcaaaaaaagtgcttaatttgcaaaattttttagagaaggaaatggctgacaaggaatgtataacgctgaaaggcgtaagggttaacaacctgaagaacataaatctcgaaatacctcgcaacaagcttgttgtaatcactggattatctggttccggcaaatcgtcattagcgttcgacacactgtttgccgaaggacaacgtcgctacgtcgagagcctgtctagccatccgccagaaggtcaacacccgcaatcctcgttctactgtcggcacttctaccgaaatatacgactacctgaaactattgttcgcccgcattggaaaaaccttctctcccatttccggcaatgaagtcaaatgccacagtaccaacgatgtaataaacacaataactgcaatgccagaaggcacaaaggtgctggtttgcttcccttatacattcaataagaagcaaaagaagggcgaacagctcctgctcatttcaaagcagggctatgtaaggtttgtcgacaacggtaaacttcagcggacagacgaagtcgttgagttaaagtcgattggcgatactatacacattgtactcgaacgtctaacagtaaaacccgacgacaatactcttgtcggtcgaattgccgactcggtgcaaactgctttcttcgaaggcaaaggcgaatgctttgtttatgaatatggagacgaactgaagcagcatccattctcgaaccgtttcgaagccgacggaataaccttcgagcagccatcggtaaacctattcagtttcaacaatccaatcggtgcttgtcccacctgtgagggatttggaaaaattctcggcatcgacgaggaccttgtcattccgaacaagggaatgagcgtttacgacggcgctgttttctgctggcgtggcgatgtcatgaagcagtggaaccatgatttcatgattaaaagtgctagtttaaacttccctatccatcgtccttattatcaactgacagacgcagaaaaggatttgctttggaatggtaacaaaaagcacgacatctatggcataaacgacttcttcgaatatctcgaaactcagaaatacaagatacagaaccgcgtgatgatttcgcgctacagaggcaagacaacttgtcccgactgcaagggcaaacgtctgaaaaaggaagccatgtatgtgaaagtcggcgacaagaacatcggcgaccttatcgacatgccaataagcgaactctgcaagttcttcgacaatctgaaactcacgccgtttgacgaggaagcttcggcaagaatcagaaccgaaataaaagttcgccttgaggcaatgattgaagtcggacttggttaccttacgctaaaccgtacagcatcaacactttcgggcggcgaatcgcaacgaatgaaccttgccacggtattcggttcgggacttgtcggctctctgtacgtcctcgacgagccaagcatcggtctgcacgaacgcgacacgcaaaacctgataacaatactcaaaaagttgcgtgataagaaaaacactgtggttgtcgtagaacatgacgaagccataatccgtgctgccgaccacataatcgacataggtccgcttgccggtgaattcggtggcgaagtggtattcgaaggcgacatcaagaagctagaaaaagccgacacgcttaccgcaaaatatctgcgtggcgaactgcagaaccccaagaacgacaatccgttgaagtggcgcaactccataaagattgaaggcgcgcgatacaacaatctgaaaaacataacggtaacgtttccactcaacgttgcaacggtaattaccggcgtaagcggttcgggaaagaccagcctcgtcaaaggcatcctctatcctgccatccgacgcgaacttggcgtatcggccgacaaagccggcgacttcgacaagatttcgggcgacataaggatgataaagaatatcgaattcgtcgaccagaacccgattgcaaagtcaagccgctcaaatccagccatctacatcaaggccttcgacgagatacgaaaactttttgcagagcaaaagacagccaagctcaatggactgaaagcctcgcatttctcgttcaacaccgaaggcggacgctgcgaagtttgtcagggcgagggcgaaataaccgtcgagatgcagtttatgtccgacatacaccttgtgtgcgaagcctgcaacggcaaacgtttcaaggacgagattcttgaaataaaataccgcgacaaaaacatctacgacgttctggaaatgagcatcgccgaggctgtggaattcttctcgcagagcgacggcaaactggaaaagaacatcgtttcgttgttacaaaactacatcaacgtaggacttggctacctgaagatgggacaaccgtcgagtacgctcagtggcggtgaaagtcagcgaattaagctggcaacattcctcagcatggaaaacgccgaaccaacgattttcatcttcgacgaaccgaccacaggcctgcatttccacgacatcaacaagttgctgaaagccatggaaagtatgcgcaccaaaggccatacgctcatcatcatcgagcataatcccgaggttatcaagtttgccgactggattatcgaccttggtcccgacggtggcgaaaacggcggaaaccttgttttcgaaggcacaccagccaacctattgaaatgcaaggagtctattacaggaaaattcttgaagaagtttatatagaagtttttaggaatactactaaaaaaaggaaactatatacgtgttgacacaatgtactttttgttattggctccttagtcattccacaagacaaagcgaaccgactaaggaacgtgtcgtgtgagcttgtctatgcggaatctccattgaaatctcatttcacgggagattccgcatagttgaacaatattacgctccccgttccgtatcgcgttattgttccaacttacggaatgacagtttgatagcacaaaatttactcaacttgtatatagttaccccaaaaaatgacctttttttttgattgaggcgaaaacttatcaacacttcacattttgcacaatccacctcactcccctgttaatttctttttcatacaaatatattgcaaaacatattttttattatgtttgtatgctcttaattagaaatgtatgtattcgacattgaaagaaactattgaacgcatttgggagcatcgcgaattgctcgaaatgcctgaaaacataaaggttatagaagaaaccataaaacttctcgatagcggcgaaatccgtgtggccgagcctgttggcgacaaatggcaagtgaacgaatgggtgaaaaaagccgtaatcctctatttcccgacacaaaaacagcagaaaaccgaatctggcatcttcgaataccacgataaaattgccctcaagcacgactacgacaaacttggcgttcgcgtagttcccccagcaacagcccgctacggtgcctacctcgccaaaggcgtgattatgatgccgtcgtacgtgaatatcggcgcatacgtcgacgaaggcactatggtcgatacttgggcaaccgtaggttcgtgcgcccaaataggcaagaacgtgcacctctcgggtggcgttggcataggcggcgtactcgaacccgttcaggctgcgccggtcattatcgaagataactgcttcatcggttcacgctgcattgtggtcgaaggcgctcatatatgcaaggaggccgtactcggagcaaacactgtaatcactgcttcaactaagataatcgatgttactggaaacgaacctattgaatacaaaggatatgtccccgaacgctcggtggtaatcccaggaagcaccgcaaaacaattccccgcaggaacctattacctgccttgcgcactcataataggcaaacgcaaggaatcgaccgacaagaaaacctcgctcaacgaagctttgcgcgaaaataatgttgcagtctaaaaattggcactatgataatcggattcgacgcaaaaagagcattcgtgaacaaggcgggactcggcaattatagccgcgatgtcattcgctcgctgcaagatttgtatcccgaaaacaagtatgtgcttttcagtaccgaaaacccttacggacttgttgaggaaaagtactgcaacaacttgataatgccgacacaaggttcgtcaaaatttgcattggcaaaatggcgttcgatgaaacttggcgaacagatcgagcagcagggaatcgaaatcttccacggactaagcaacgaactgccacgcgacatcaataagacaaaagcaataaaggttgtcacaatccacgaccttatcttcttgaaattcccgtacttgtacaaatacttcgaccgcaagatttacgactacaagttccgctatgcctgcgaaaagtccgaccgtataatcgctaccagcagtcagaccaagaaagatataatggaattctacggcattagcgacaaaaaaatagatgttctgtatcagacttgtaatccaaagttcgcacagaaaataagcgacgaggaaaaggaacgcatcaggaaggcgaacaacctccccgaccatttcctgctttcggtaggcactatcgaaagacgcaaaaatacgcaccgcattctcgaagcagtgtacgaacacaacatcgacatcgacattgtgatggttggccgtaagaccgagtatttcaacgaaatacaagcctacgccgattcgcatggacttacctcgcgtctgcatgtgctcgaacgacttggcaacgccgaccttcctgcaatataccagatggccgacattttcatatatccgtcgatgtacgaaggctttggaattcctattctcgaagcgtttttctctggcactcctgtgattaccaacagcaacggaagtactggcgaaattgctggaaatgcagcatttacaatcaatgcaccacacaaggacaatcttgccgaagcaataaaatatcttctcgacaacgaggaagaacgcaagaaacttgtccagcgcggctacgagcgcagcaaacgcttcgaccgtgcacttattaccgaagaactaatgactttttacaataaactatgaaaaacattgttgacgaaacttgtaaagtcttggaaaacggaggcacaatcctctatcctaccgacacaatatggggattaggctgcgatgcatgcaacgaaaatgcaatcacacgcatttacgacatcaaacatcgtgacaagggcaaaagtatgctgatacttgtcgattcgatggaaatgatgaaaaaattcactacatcaatccccgaaatagctgtcgacctcattgaggcggccgaccgtccacttacaatcatctacccagaagccaaaaatctgcccaaaaacctcgtcgccgaggacggttccatcggaatacgaattgtaaacgacgatttctgccgcgaagttataggcttgctcggacgtccaatagtctccacatcggcaaacctttcgggatgcaacccgccactcggattctgcgacattgcaaacgaaataaagtcggaagtcgactacgtcgttccgctacgacaggacgaactgagccgaaacagaaattctgacatagtaaaggttgacgaatctggcaacattcaggtaatcagataaatgacgatatcacagttcatccgcaacctttcgtcgcaactcgaagcaagctacgacaaaaacgaggctcgctccattgccgaggtatttgtctgcgacgagctgaaactttcacgcacgcaaatgcttgtcggaaaggacgatgaactcgacaaaatcatacttgaaaaactctcgcagaaatcggctaggctaacaagcggagaacccgtgcaatacgttacaggaattgcttcgttctgcggaatggagttccatgtcgacagcaacgtgctgatacctagacaagaaaccgaaatgcttgtcgaaacgctgatttgccactttgacgccgttcgaagtgcaaaaaaaataagaatcctcgacatcggtactggcagcggttgcataccgattgcaataaagaaaatgcgccccgaagccaatctttttgctatcgacatttccgaaaaagcactggaaatagccaagcaaaacgccgaaaccaacaatgccgaaattacatttgcaaaatacgacattctttcggatagcagatttcctttcgacgagaaattcgacattgtggtaagcaacccaccctacgtcatgaatagcgaaaagtcgctgatgcacaagaacgtaaccgacttcgagccatcgctggccctatatgtcgacgacaacgaccctctgctattctatcgcagcatattaatgtttatcgaaaggcatcaacccgaatgcaagccattggttttcttcgagataaacgaaaatctaggagcagaaatgcttgaactttgtcgctctttcggttacgatgccgaaatcatcaaggatcttaacgggaaaaatcggtttgtaaaagcaattattctccacatgaacatctaacccatcattataaattgtcaattatacattgttaattatcaattgtccattatcatgcaaggaaaagacaacaaaccacacataggaatctacggcagacgcaatgccggcaaatcgtcgttaatcaactgcctgtcgggacagaacatttccatcgtctccgacctcaagggcacaaccaccgacccagtgaaacgttcgttcgaaattctcggttacgcaccagtgattttcatcgacaccgcaggaatcgacgacgaaggcgcaactggacagctccgcatacaaaggtcactcgatacgctcaacattatcgacatggctatcatcgtgatttccaacaacgaattcggcgactacgagcgcaaaataatcgagcgtctgcgcgaactgaaaaccgttttcttcattatccacaacaagtccgacattgctcccatcgacgacaaactgaaacaaagtctcgaagccgaatacaaagttcccgtaatcgacttttctactgtcaaccgcgacctggttccgcttgtcttcgataccataaagcagattgctcccgaaagcacatggaccttcggttcgctgcttggcgacattgtgagcgaaaatgatattgtcctgctaatcaccccaatcgacagcgaagcaccgcagggacgaatgattcttcctcaggttcaggtacttcgcgactgcctcgacaaccattgcatggcaattgtcgtgcaggacaccgaagtcgaggaattcttccgtcgaggcataaaaccgcgtctcgccattaccgattcgcaggttttccacaaagtaaagaacttgattcccagcgatgtgccactcacaagtttctctattgtgctcgcccgcagcaaaggcgattttgccaactacctgaaaggaacaccgcacattgccgacttgcgcgacggcgacaagatactgatgcttgaaagctgtagccatcatgtttcgtgcgaggacattggccgcgtaaagataccaaacgcactgcgcaagttcacaggcaaacaactggaattcacctttgtagctggactcgacagcattcccgaacctatcaccgactttgccatggtaatacaatgcggtggttgcatggtcacacgcaaacagcttatcaacaggctcaagccagccgtcgatgccggcattcccatctcaaactacggaatgactctcgcctacctgacaggaattttcgacaaggcagtggaagtgtttaaataaaaaaagcgacacccgaaagtgcacctttaatgttttcaaatttcagaaataagcatttgattttataaataggtattgttatatttgcaaacgcaaaacacttaagacgaattacaataaaaaaaaagtcccacggagtacgcaggacaaagaaaaatcttcggcttatagccttattgtgataagtctttcaagtgcaaaattaacaataaattgtaactaacaagaatttttatggaaaaaagtttagggcttgacttaggcacgaattcaattggtcttacattaagaaatgatgactatagcaaagatattatagagcaaattgaatatatcaattcaataatttttcaatctggggttggcaaagaaaaaagtggagaattttcatttgctgcaaaacgaacagaaaaacgctctgcaagaagattatatcagtctcgtaaatatagaatctgggcaacactaaaacttttaatagaaaatgactactgccctctttcattagcagatttagaaaaatggagcaaatacgacaaggagaaaggattaaaaagacaatatccaataaaagctaccgatttcgagcaatgggttcgattggattttgatggagacggaaaacctgattattcaagcccatttcaacttagggcggaactaatggaaatacaatttaatttcacaaaccaagccgacagatataaattaggtagagcactatatcatattgcccaacgccgagggttcaaaagtagcaaaggtgaaacaataaaagaacaggaaaagaatgaaatagactatagttcagaaatagacatttcaacagaactgcaaaaatctgaagttaaaaaatctggcaaattaacagaatacatggaggaacacaacctgccgactgtaggttgtgcttttgcccatttggaaaaggatggaattcgtgtgcgcaatagtgattatcaagcggttcgttcccaatataaagatgaaatcaaacaaatctttgaatttcagaatggattaaacacaaatagtgatttctacaaatgtcttgtaagcgagaaaaagggcgatggaacaatattttacaaacggccgttacgctcacaaaaaggacttgttggatattgtacaatggaacccaacaaatcacgctgtcctataagcaacccagaatttgaaaagttcagggcattttgtctaattaataacattagattcggcgaagaattaaaagaatcgcttactttggaacaaaagcatcaattatacaaagaaaaattcctattaacccgtgtctcattcaagttcagcgaaatcaaagaatggattcagaaaaaaacaggcaaaaaattagagtactcaaaaactacaaaaacaattaactataaagataatacaagcgtctctggatgtcctatttctggaaggctaaagaatttacttggcgaaaattgggaaacatggaaatatgaatctacagaagaaaaggcaaacaaaaagaatggagaaataagacgcatatcatatactaccaatgatttatggcatgtatgtttctcttttgacgaaccagaatacattgaagaatttgcaaaaaataaactgcatttcgatgatgaccaaacaaaacaacttgttcgcatatatggttcaatccagcaaggatacggaatgttaagcctaaaagccataagaaacataaatcgtttcttggaaaaaggtcttatatacactgatgctgtgctattggcaaaattaccagatattttcaaggaaaaatggaacgacgtggaagccaacataatatcacgcatcgacgaaataataagcgagaacagaaagcaaaagcaattgttctttatcgttaactcgcttattgccaactacaaatcattagacgttactgagcaatttgcatacaagaactattattacaaacttgttgcttccgacttcaatgatataaaaacaactacaataaatgttattggacaaaaaacatgggaaaagaaagatataaatgaacaaaacaaactgttaaacaacatagctgatttatatcagaaattcttctcatcagaagatcgagactattataaacttcccaaagtttcggatgcattggcagaatttgtcagcagggaatatcaatttatttcagcatctgacctgaaaaaaatataccacccatcgatgatagaattttacgctccagcaaaattggaaaaaacagaagatgacagatacttaaaactacttggaagtcctgttatcggagcattaaaaaatccaatggctctacgggtattacatatattgcgaaagcaaatcaatgatatgctaaaggcctcaatgattgacgaaaacactcgcatagtagtagaaacagccagagaacttaacgatgctaatatgcgctgggcaatcgaagcatatcaacgagaaagagaatctgaaaataaagaatatgaaagaataatcaaagagttttattctggtagagatataaaaacttctgacatagaccaagttcggttattatgcgaacaacatgacatttccgaaaatattatagaaaacaaacaaaaagggaatatcaaggttcctacttacaaaaaggacataacaaaatatagattgtgggcagaacaaggttgccgctgcatatacacagggaaaataataaacatcacaaatcttttcgatgacaacgcatttgatatagagcatacaattcctcgtagtatttcattcgatgactcattggcaaacctaactgtatgtgatgctcattacaaccgaacaataaagaaaaatcaaattccaacacaacttcctaattatgaagaaataaaacttcgcatccaaccttggatacaaaaggttgatgagcttaaagacaatgttgaattttggatatcacaatcaaaacgagctcaagacaaagaaagaaaagactattgcatacgtcaaaggcacttgtggcaaatggaacttgattactggcaaaacaaagttaaccgttttacaatgactgaagtaacttccagttttaggaacaatcagttgaacgacacaagaataattacaaaatatgcataccattatttgaaaactgtcttcaacaaggttgaagtccaaaaaggaagcgtaacttccaactacagaaaaatgttaggaatacaaagtttagacgaaaagaaaagtcgagacaaacattcgcatcatgccatcgatgcaacagtattgaccttgattccttctgccgctcaacgagataaaatgcttgaattattcttcaagatacaagaaaagaaacgactaaatgaaagcacagaaacatttgagaaagaacttgaaattgaaaaaaagaaatgtggaatagcaggaaacatttcaaagatagttccgtttatcgaagaaaatattctagtaaatcatatcaacaaggatcagaaacttacaccagcacacagacgcaaacgcataagaggcaaaattgttccgctaaaagattcagatggcaatgttatatatgaaatcaatgatgacggcacaataaaaaaagacaaacacggacattccattccacaagcaaaagaatggattacaggagactgcataagaggtcaattgcatggtgaaacattctacggagcaataacacaaggattaaaggatgagaacggaaaactactccgcaacgacgatggttcaataaagacaaatgaagaaatcctatatgttgttcgacgtgaacttaaatacaaggcaaacgacaatgattctggctttaagaattgggaagaactcgaaaaagcaatagttgacaaagatttgttcaaaataataaaaaaccagtttaaagaaaacacattattaaaagaagcatgtgcatctggcatatatatgtacaaaaagaacaaatctggtgttattgattattcagatgaatgtaaagtaaacaaaattagacatataagatgtctgacatctataaaaaagcctctagaaataaaagaacaaacatacttgtcaaaaaaaacatacaagagaaaatactatgcagaaatgggtgacctttatgtgatgtgcaagtatgaaagttccgacaaaaaagaaaaggaatttcacattttcagtttgtttgatgtaagcataaataggaaaactggtattgaagacattcccaattgcatagaaagtaaaaaacgaacaaaacttattctttcccagcaattaaaacgaggtgatatgctattgatatacaaaaatagtgttgaagaaataaaagacatggacactaaaacaatatctcagaatttatatgttataaaaggatttgaaaatccaagtttaataaaacttgtaaaaaatagtaacgcacaagcagacaaagatttaggcaaaggtgaatccataaaggattacgaaaaaatgcccgaaaaaattcgttgtggaattaacactttgaaatatcttattaaagacaaggatttttatttgacacctaaaggtattacttttaggaaagatttataggacaatgaccaacatcaaactatttcaggacaagaaaatccgttccgtatggaacgaagaggaagaacagtggtacttcgttgttgaagatgtagttgcggcattaaccgacagttctgaccctaaacaatatgttaaacgcatgaaacagcgtgatgccgaactagctaaaggatgggtacaatttgtacctacccttgttgttccaactgcaggtggcaaacaacgaatgagttgtgcaaatgtcaaaggtctgttccgcataatccaatcaattccatcacccaaggccgaaccattcaaacaatggctggcaactgttggctacgagcggatgctcgaaattgaaaatccagaacttgcacaagaacggatgaaggaactctacgaacaaaaaggctatcccaaagattggatagacaagcgtttgcgaggaattgcaatcagacaaaaccttaccgatgaatggaaaaagcgaggcatttccgaagaacgcgacttcgcaatcctaactgccgaaatcagcaaggcaacatttggaatgacaccttctgaatacaaggaatttaaaggtcttacaaagaaaaaccagaatctgcgtgaccacatggacgaccttgaattgattttcacaatgcttggtgaacgagttacaacagaaatatcacaaaaggaacatcctgaaacattccaggagagcaaaaagattgcccgtcgtggcggaaatgtagctggcattgcacgaaaagaaacagaaaaggaactcggaagacctgtatcaaacaccagcaatttcctgccagaatccgacaaccacaatgatttattgacatcagccaacaatgaagaaaattaaactatgattaagcgcaccctatatttcggcaatccaacctacctttcgcttaggaaccaacagcttgtagtgtcgattccaccaaaggacggcgaggaagccacagaacgaaccatacctatagaagatttaggcttcgtgatgctcgacaatccgcagattacaataacacacggtgcattgggtgcgcttatcgaaaacaacaccgccgtagttacctgcgacagccgacacatgccggcaggcctgctattgcccaccgaaggcaataccacgcagagcgaacgctaccgcaaccagattgaagcctcgctcccactgcgcaagcaaatatggcagcagacaattcaggcgaaaatccgcaatcaggcggcagctctggagaaaagacgcgggaaggaattcggcaatatgctcgcttgggctgatgatgtgcgcagcggcgacagcgaaaaccttgaagcacgtgcagcggtattctactgggacaacctgtttgccgtagagatagacaagttccgccgcgacccagatggcgacatgccaaacagcatgctcaactacggctacgccatacttagggcgattatagcacgggctctggtcggaagcggcctcctccccaccctcggcgttcaccaccgcaaccgctacaacgcctactgccttgccgacgacattatggaaccctaccgtccgtatgttgaccttatggtgtgcgacatcctcgatgacattggaatgcccaaggaaatgaaccgcgatataaaggcacggctacttacaattccgaccatcgatgtaatgatagatgggaaacggtctccgcttatgatagctgcatcgcagacaacagcatctctcgcccgatgctacgcaggcgaaatccgcaaggtaagttatcccgaaatgtaatggaacgattcagcgaataccgaataatgtgggtgctagttttcttcgaccttcctaccgaaaccaagaaagaacgcaaggtgtacgccgatttccgcaagaaactcattgccgatggcttcacaatgttccagttctcaatctacatcaggcactgcccgagtagcgaaaatgccaacgtacacatcaagcgtgtaaaactgcatctgcccgagct

SEQ ID NO: 4010 - DNA, 12958 bp, synthetic construct
  misc_feature 1..12958: note = Synthetic
  source 1..12958: mol_type = other DNA
atgccgcaacaagccgtcggaagaacttccactttataatttttcggcaaagataacattttttccatgcaggcagttcctatcaatgccttttgctggcaatgtccgtgaagaatgatatgctcctccttatcggtgaatgaggaactctttattctgttttcatctatctctttcgcaataaattcatcgaaaagatagacatgatgattcatttccgtcaattcgttgtattctcttgccaatacaggatattcatctcgcaaactcaataaagccgatggctccaaaccaaccaagggtgtgtcttttgaaatcacggaaagtaaggcttctatattctttctcgcaattttttttgctttcttcaacattcccttacttatggctattcttccgctttcgcatataggagctttcttcactctgtaacccaaagcagcaaataatgccactgctttcttcgccacctttgtatcttgaaaacgagaaaattcgtctatatatatgtatatggtagatttatctgatttttcaagactttcattcagtccgacttcttgtttaatcagtttatcgaagttacaggattgaattgtcggcagttttctctcttccgcaaagcccatgacagacttcaacaatcctgaggtaaagtcgttagaaacaaagaaattatacaccgacggcattactgcagctattctctgcattcgtgtcagactgttcatcaacaatacgctcaaaggataagcatgtttatcgtaataatgctgcaaagcttcgcttttcaacttgcttatatccacattggaggaacattcccttttacaagccttacacatcaaacaatcgtccaatatctgcttcacttccttgctgcccaaggggtctttctctttggaaaatgaaagcatttccctaacaatgttcgctcttgcacgtgtactctcctcttctttgccgctgaccttgaaagtcggacacatcaaaccaccgattatgctgctctttctgcattctgccgctccgttgcactgctccgctgcacacaagactccttgttccttggtgaaatcataatacgtatgcacttcactccgtttcgtcccctcgtaccgcaaattgtcgttcatggcaggagtgttcactattttacccggattgaaaacattatccgaatcccaaacatgcttcatctccctcatcaggtcatacactctttcaccatacataaggggtatccactcaccacgcaatcttccgtccccatgttccccgctcagacttcctccatatttctttaccaacaaagcagtatcgtatgcaagtcttcggaacaactcgacatctttcttttctttgaggttcaatacaggacgcaaatgcaactctcccgttgcgatatgagcatgatatacacacctcaaaccataagcgtcaagcatattttgaaactcccgcatgtaatccggcaatttttctaccgccacagccgtatcctccaccacagatacaggtttcaaagagccgggaacattggtcagcagtcccaaacctgcttttctcaaactccacactctcttcgtatcctctccataaacaatactgaaatcatatgccttaccctctgccttgaaatcctgcacaagtacctctgcttgctgttccagctcctctctttttgcagctgaaaactcgacaatcaatactgccttaggcttaccttttatgaagaaagtattctctctttgttccaaattcctatatgcagcctctattatattgttatccatcagctccactgccatgggattgtgccgcaaagctgtcagatttccataaaaactgtcttgtaaagatttgaagtgtacacacaccaaggctttctcctttggtggtaaaggaagtaaattcaatttgaactcagtggcaaaagccaaagttccctcactgccgcaatacaaacgggcaagatttaagggaaagccctccgtcaaggtatccaaagcataaccgttattccgtcttgtaagacttttatcggggaatgcttcttcaacagccctctttatctcacaatccgaataggtatcaagtatatatctgtatattctgccctccgaagtttgcttctctgccttttctcggcactctttctcatcacatcttccaagcacgacctcctctccgtctgcaagaattaccttagcctccaagatatgctctctcacacttccataaaccaaggaatgtaaaccgcaggaattattcccaaccattccacctatacaacatcgatttgctgtcgatgtctcgggggcaaaaaataaaccataaggtctcaaaaagatattcaactcctccaacacgacacccggctgcaccctgacccaacgttcctccttatttatctcgattatctcttttaagttcttactcacatcaaccacgataccctctcccacaacctgaccggcaagagaggttcctcccgcacgagggataagcgacactttattatgcttacaaaaatccaaaagcaatcttatatcttccacacaatctttgcacggtacaaacacagccaaaggcatttgcctataagccgatgcatctgtagaatacaatatacgacttactttatcaaaacgcaactcaccttttaagcgagatttcaaactttccaaaccttctttcaccatcgcagaacactgaaaaagaaatgcaaaggtacaaaaaaatattcccaagtccgaagcccacagaaattcacagtcccctattgatagaactgccattttacaaaacaatcttcgattaaatactgttctacaaaagtagaatcataagattgataaacacacaaataaaatgaataaaggtaatgcttcaaaagaaaacttctttcagaaataatggtaaacaaagaaaaagcgacgattccgtccgaagaacgaaaccaccactcttaatgttctcacaacggaattcttataaattagtgccacttttctcggttttcatctcatcttatcccacccctcaaatcgcacttccaacttgatattatgcatttttaccatatttacaatttctacaagcagtaataatcgaaaaaatttcaggaacttgttcacaatccagaaaatataagtaactttgtcctcgatgaatatagagattattgatgtaatcttatattttgtttgacgcttcaaaaccacaacaatcctcgctaatgactgaatttataaacgaatactttaacatgaacatgcaaaaagaagatacaaaaaatttctcccacggaataagtacgcgggagatagaaaaatcttcggcttatagccttattgtgaaaagctttcacaaagtatctttgctgcaaagatagtaaataatttgaatacaacaactaaaaacgaaaaaagttatgagtaaaatcttgggaatcgatttaggaacaaactctattggattggcaatcagagacacagacaaaggagaaacttttgtagaacaaatggatttttttagttctatcatattcaaatcaggtgtcggtagtggaccatcaggagaattttcatacgcagccgaaagaacaaattcgcgttcaataagaagactatatcaatcaaggaaatataggatatggacaacgcttgcattgctaatcgaacataaacattgccctctatcaatggaagatttagacaagtggcgacgatacaacaaagaaaaagggttgaaaaggcaatatccaattgatgctatcaaatttgagcaatgggtaagattggattttgatggggacggaaaacctgactatacaaatccttatgagctacgagcagaaataatgcaaaagcagtttgactttaactccgaaattgatagatataagttaggacgaatactgtatcacatagcccaaagaagaggcttcaaaagcagcaaaggcgaaacactaaaagaactttcagaaaaagagatgaatgaagaccttgatttgtctgatgcacttcaaaaatccgaagaaaagaagtctcaaaaactaaaagacttcatgaaaacacacaatattcccactgttggttgggctttctacgaacttacaaaacaaggaatcagaataaaagaaagcgaataccaagctgtaaggatacaatacaaagaagaaatacaaaagatatttgaatttcaggaaggattagacataaatagcgacttctacaaacacattatgagtgagaagaaaaatgaaggaacaatcttttacaagagacctcttcgttctcaaaaagggaaagttggcacttgtacattagagcaaggcaaaactcgttgcccaatctcacaccctgagtttgaagaatacagagcatggagtttcataaacaacatcaagtatagaacaagcacgactgcggaatggcaaactttgtctttgaaactcaaagaagaactattcaaagataaatttctcagaacaaaatcgtactttaagtttgaagaaatcaagaattggctttcagcaaaactaagtattcaattggaatgcaatgataagaaagaaaattcaaccatcaactacaaagacaaaaccaatgttatcggctgtccaatttcagcacgattgaaaaacatactgggggaagactataaacaatggaaattcaaaagtgataaagaccgcacaaacctaaagaccggtgaagttcacagaattatctacaactatcttgacatttggcatatatgtttctcttttgacgaggcagagttcgtcgaagaatttgcaaaagatagtttgaagtttgataacaaacaagcaaagcaactctgcacactccacaacaacatacagcaagactacgcttcgttaagtctcaaagccattagaaacatcaatacgtttttgcaaaaagggttgatttataccgatgctgtactcttagcaaagttacctgaaatattcaaagacaaatggcgtgaaatagaagatgatgttatcgcagatatagacaacatcatcaaagagaatagataccaaaaggaaatatccgacattgtaaatgacttaatcgccgactacaaatccttagactacgacaaacgctttgcagaacacaatacagaatacatattacaaaaccaagattacactgatattgaaaacaagttaaagagtcattttggcgaaaaaacatggattgcaaaaccatgcgaagagcaggagcaaataagaaaagacgtttgtgagctgtatcaaatattctttggaaattcaacaagagattatttcaaacaacccaaagtttcggaaagccttgccgaatatctaaaaaataaatacacctacttgaatgatgatgatttgaaaaagatatatcatccgtcaatgattgaaatttatccgatagcaaaaaaagaaattatcaatgggaataaatatgtgagaagactcggcagtcctgttatcggagctttgaagaatcctatggcaatgagaatacttcatactttgcgatctcaaatcaacaaactaatagatgagagtaaaattgatgaacatacaagaatcgtcgtggagactgcgagagaagtaaatgacgccaacaagcgatgggcaatagaggagtatcaaagaaaacaagaagaagaaaacaaagaaattgagaagattataagcaaatacttcgaagaaggcaatatctcagataatgacatcagaaaagcaaaagttttacttgatcaatttgacatagaaaaaaatgataaacaagcaaaagaaaaaaagacaaaatcagacgacaagctaagtgatacatggagtaaagttaaaagcgacaatatcaagaaatacaaattgtggcttgaacaaaactgctgctgtatgtacacaggtaaagtaataaccataagtgaattgtttgatggagataaattcgacattgagcatacaatacctcgaagcatttctttcgatgattcactttccaatctcacaatatgcgaatctcatttcaatcgtagcataaagaagaatcaactaccaacacaacttgacaactacaatgaaatcgaagctcgtttagagacatggaggaagaaagttttgtcattaaaagatcgtgtaaacttttggaaagagcaatccaaacgagcacaaaccaaagatcgaaaagaccaatgcatcaggcagagacttctatggcagatggaacttgactattggaagaagaaacttgcttcatttacaatcacagagtttatcgacagtttcaggaacaatcaattaaatgacacacgtatcataacaaagtatgcgtttcattatttgaaaacagtttttagacatgtcagtgtacaacgtggggaaatcacttcgaatttccgtaaaattgtaggcatacaaaaagaagacgaaaagaaagataggagcaatcactctcaccatgctattgatgctgcaatacttactctaatcccaagtgcaaaacaaagaaacaggatattggaaacattctaccaaatgaaagaatctaaggaaactaacaacaaagacaaattggaaaaaacaacaaaagaattagaaaaagcaaaacgtgctgccttgataccagatgccgttgcagcaataaaagatcatatcgagcaaaatatctttgttaatcacatttccaaagaccaaacacttactccggccaaacgaagaaaacgaatcagaggtaagattgacaaaaataaacaatggataataacaggagactgtatcagaggtagtttgcacaaagacagtttctatggttgtatcttaattgatggcaaaaaatatttcgttatcagaagagcattaaaatataaagcaaatgacaaagataaaggtttcaagacatggaatgaattagaaaatgccattgttgataaagcattgtatcgtcgattagtaaaaccattctgtcaagagggagcagaagaaccttctattgatttcaaaacagtcatgttagaaaaaggtggattatatgataatggcataaaagtaagacatattcgttgttatacttccgtgaaaaatcctttacaaataaagaaacaaacttacaaatcaaaacaaggctacaagaactactattatgcggaagttggcgatttatacacaatgtgcaagtatgagaacaaaaaaacaggggaaatagtctatcaaccatataacctatttgaggttgctgctaaccataaaatcacccatgagtttattccgtccaagtatgacgacaaagttcttacacaacaattagtcaaaggagatatgttacttatctacaaaaataatcctaacgaattgtttgagatggacaatgtacaactatctaaacgtctatatgtaattgatggttttgagagaaaatcatgtttgacaaaactcattcgtagctcaaatgcccaacaagacaaagaattaggtaaaggagaaagcatcaaagacttcaataatcttccacaaaaaataagacaaagcataaataaattgcactacttgcttcgtggtattgattttaagattataaatgggagaatagagttcttgaataaaacgaagtattatgattaagcggacattgtgtttttcaaatccgacatatctgtcggtgaaaaacaagcagttagttataaagctacctgaggttgagactaatgatacactgcccgagagtttcaaacagaatgccattactaccataccaatagaggatataggcataatagtgctggacaaccaaaggataaccatcactcatggagttttggagaaattattggagaataattgtgccgtaataacatgtgaccaaaatcatctgccgataggcatgcacctgccattaaatggaaacagcacccaaaccgaaagaatgagataccaaattgaagcctcactacctttgaaaaaacagctttggcaacaaacaatagtagccaagatacaaaatcaggctgcaaatctcaaacaagtcagaggaacagaagttcgcaacatgctcaaatgggcaaacgatgtgaagagtggagatagtgataacatggaagcacgagctgctgtctattattggcagaacgcctttccttctgtacctaacttcgtgcgaacaagagaaggcattactcctaataacttactaaattatggctatgcaattctcagagcaatagtagcacgagcattggtatcaagcggattattaccaaccctcggaatacatcacagaaacaaatacaatgcctattgcttggctgacgacatcatggaaccataccgaccatacattgataaattagtcatggaattgtttgaccaacaccaggattgcgaagagctaaataaaaaattaaaatcacaattacttcaaatacctgtcattgacgtagttatcaactctcaacgcagccctttgatggtagctgtcagcactaccacagcctcgttgtataaatgctactctggcgaagctcgcaaaatcatatacccgaccatgtaacagatgcaacgtttcagcaaatatagaattatgtgggtaatggtactttttgatttaccgacggaaaccaagaaagaccgggcagcagcggcaaagtttcgcaaaatacttttggaagatgggttcacaatgtttcaattctccatctacataaggcattgtccaagtaaagaaaatgctaacgttcacatcaaacgagtaaaaggtgctctgcctgaacatggaaaagtaggcatattttgtataaccgacaaacaatttggcgaaattgaaatttattattgccgcaaacctgaacgctcaaacggttgcacacagcagttggaactattctgaaaactctattttttattttctaatcacccctataaacaactgaacccgagtgaatttctcggattcagttgttcgtgcactgcaaagatactaatttgaaagcaattcacaacctggtcgatactaagcctatgacgacaaggttgttcgtgcactgcaaagatactaatttgaaagcaattcacaactcgaagattatttaaaccctgccgttggtggttgttcgtgcactgcaaagatactaatttgaaagcaattcacaaccggtgttgtcactgatttggttgatgctatgttgttcgtgcactgcaaagatactaatttgaaagcaattcacaactcggtgcaggtttacagttagcaagttcaggttgttcgtgcactgcaaagatactaatttgaaagcaattcacaacatggcgttacgtatcctattggtgcgattagttgttcgtgcactgcaaagatactaatttgaaagcaattcacaacgagagttgttgttaatggtatgaatcaagtgttgttcgtgcactgcaaagatactaatttgaaagcaattcacaaccaacaagcaactaaccgtgccaatgaagaagttgttcgtgcactgcaaagatactaatttgaaagcaattcacaacgagtagcagccgcacaaaaaattctaattgttgttcgtgcactgcaaagatactaatttgaaagcaattcacaaccaacgggagaggctgttgcctctcatattgttgttcgtgcactgcaaagatactaatttgaaagcaattcacaacgctttgccaagcgttgaagcgttgtaataggttgttcgtgcactgcaaagatactaatttgaaagcaattcacaactgaagaacgaattgaagcgggataagtggagttgttcgtgcactgcaaagatactaatttgaaagcaattcacaactgcagaatatggcaatcatttatgggcgtcgttgttcgtgcactgcaaagatactaatttgaaagcaattcacaacgaagagaagatacacctgttgacgtttaccgttgttcgtgcactgcaaagatactaatttgaaagcaattcacaacctgtttacagaggaagtgatagcagaccaagttgttcgtgcactgcaaagatactaatttgaaagcaattcacaacggatagtgattattcttataatagatacagttgttcgtgcactgcaaagatactaatttgaaagcaattcacaactatcctcatttggtattttactgtgctgaagttgttcgtgcactgcaaagatactaatttgaaagcaattcacaaccggtaagttcgcctccttcgcaggtgaggcgttgttcgtgcactgcaaagatactaatttgaaagcaattcacaacgttaacggcttgattgacaagttcaattcgttgttcgtgcactgcaaagatactaatttgaaagcaattcacaacgcgttcagatggtgagcgacgaagcatacggttgttcgtgcactgcaaagatactaatttgaaagcaattcacaacaaacggcggaaacggctgtaactgcggcaagttgttcgtgcactgcaaagatactaatttgaaagcaattcacaacgatggcgaagcaatcgcagacgacggaagggttgttcgtgcactgcaaagatactaatttgaaagcaattcacaaccggtgtatatattccatggtgaagatgaagttgttcgtgcactgcaaagatactaatttgaaagcaattcacaaccttcgtcgagtttttttcgacggatagcgagttgttcgtgcactgcaaagatactaatttgaaagcaattcacaacaggaggattgtatagcacttaatgcagagtgttgttcgtgcactgcaaagatactaatttgaaagcaattcacaacttgcgacgagggtgcagagggtgagaagaggttgttcgtgcactgcaaagatactaatttgaaagcaattcacaacatgtaaacaagaacttacatattggcacgagttgttcgtgcactgcaaagatactaatttgaaagcaattcacaacgacgagcggaggggttttcttgaaagctggttgttcgtgcactgcaaagatactaatttgaaagcaattcacaacctgcttcttttatttttgcctcaacctctggttgttcgtgcactgcaaagatactaatttgaaagcaattcacaactagtcaagtatatctacgcaggaaaggcttttcctgtctttctgttggctgatactcaaaaaggaagtcaaaataacctcctacgtcggtacatcgacaacaccacgcaaacaagttcacgtggcttttgtcaatgggttaagctataagccaaagtaccaaagtagccaaaacaaaaatcttacaaagattatgccagcaacaacataaaccgatactctaatagccttaaacatcttctctttctctgtcatatcacataaatttaacgtccaatcatgcgaggcaaaacacctgtaccattaaaatacttaattcctttacctgatggcataccaataccacgaggcggggtacgctgttcaggaacatccaaagaaattccatcacgtctatttgaaatcaaagtacgtcgcattgctgcttcatcggacatatcttgaataatcaaaggcaatacatcttccatacaatcgccaagaaatttcatattatggtaaacgtttttcttcgttttactctttaacatctcatgcgttatatagtagttgtcgtaccactctttccaactgcaaagatactaatttgaaagcaattcacgacaagggatgtttaagagtttttgattttgcgaaaagcctctttgatagcgtctcccaatccttcaaaactgtaagcaatacctgcacagatggcgaaaataaagccaatgatgcaagcgaggctgaatacgattcctatgagttttaacatgtggcaaagataaggaaaaatggcgacacacgagataaatttcaactttaatattagttattcgtgtactgcaaagagtgtcaactttggcatccctccttctcttcggtgctggtctcaagtgggtcagcgacacctcagcactcggagcatacttcttattgtagtcaaaggcttcgtcggcattctcgcttgaatgggttaactgacctttgacttcgcgtttcttgtcatcgacaactttctcggctttgcttttcagcttgttgccgagatcattgaacctggttcttgccgatacagtagtcgcgttcatcatcagcaagaccatcagggcgatgctgctgttcctttttaagcgtactcataatgtttttaggttattattcatttctttgccttgaagccaaaccactggcggaatacatttttaaggttggaaaacgaacggatttttctaatcacagttacattgttccagcgatagataaaccagtcagccacttcgttgggcaaagcatttatgaagatgtttcttgccctgttgacaacgatgctcttaactgaagacttggctgtattggatacaacgcctttaattatttcactctgagtcggtgtgccttcaggcaacttgacatatttggcaaacctggtaaacagttcgctgtattgcatattgagcggagagtcggcgagacgcttctcaaactccgcttgatcatggctttcatcggcgagatgtctcatgccgtcaaaaacctcttccgcctctgctttagcctgcgggggtagattgaaattgtcgtagaggctgttctttctgacagcaatccaattttctttattcatatattcatattatttgtgcgatgcaaagatagtaatttggaagcaattcacaagagaacaattcgaagaaatgaagaaagggagtgaaacactccctttttacttgcaggcgagggtatgtatcttacgtatcttccccccatctgcctgcaaagatacaatcaaagcaccactcctgccaagtctttgcatgttaaatattgtaaatctccacctttctctctgatactcacc

SEQ ID NO: 4011 - DNA, 4962 bp, synthetic construct
  misc_feature 1..4962: note = Synthetic
  source 1..4962: mol_type = other DNA
aataatccttattgtgaattgctttcattttatgtggcaaatttatacaaaaaaaaatttcgcaaaaaagcaaaaacaattttgcgaataaagaatatattattagatttgtgctgaaaaaaaatgccccacggagtacgcggggcgaagaactcttcggcttatagccttattgtgatttgtctttcaagcgcaaagataaatcatattttggaaaccaacaacaaaaaaacaaaataaatggaaaaaattttaggtcttgatttaggaacaaattctattggattggctgtcagggattttgataacactgttccaatcactgagcaaatagaattagtgggtacaaatatatttccttccggcgttggcaaagacaagtcgggcgaattttcgtatgccacagcgcgaaccaaaaagagaactgtgcgtagaatgtatcaagcacgtaaatatagactttgggcaacattggaactccttattaataataattgttgtccgctttcgattgaagacctcgacaaatggagaaaatatgacaccaaaagcggcttaaaacgagaatatccaattaatgccataaaatttgaacaatgggttcgttgtgattttggcgatggcaaaaatacaaatccatacgaactccgctacgaattgatgaaccgtcaatttaatttagaagatgaaacagagcgtatgaaacttggtcgcgctctttatcatatagcgcaacgtcgaggtttcaaaagtagcaaaggcgaaaccgtatcagataaagacgacgacaaggttgtggaaaaagaggacgttgatgtgtctgaaatgatgaaaaaatcggaaattgacaaatctgccaaattggacgagtatatgaaagtcaataaattaccgaccgtaggctgggcttttcatcatctaataactaatggagtacgtgtacgcaatagcgatttccaagccgttcgctcgcagtacaaagatgaaatcaaaaaaatatttgaatttcaaaaacaacttgatacagaaagcgacttttacaagcaccttgtaagcgagaaaaaaagtgaaggaacgattttttacaaacgtcctctgcgctcgcaaaaaggacttgtcggcaaatgcaccctcgaaccagacaaggatagatgccccattagccatcccgattttgaaagattcagggcgtggtgttttatcaatacaatcaaatttggtcaagattgtcaacaagaattgacaaatgagcaaaaaaagaaacttttcaatgaaaagtttatgctcttgaaatctgattttaagtttgaagaaatcaggaaatggattgaaaaagaaatccgcaaacctcttgattacaaggcaaaaaccatcaactacaaagaccgtacaagtgtttcgggctgtcctgtgtcgggaagattgaaaaaactactcggcgataattggcagtcttggaaatatgaaacatcattccagaaaaagaacggcgaaacaaaacacgcttgctatgacgcatacgacttatggcacgtatgtttttcgtttgatgacgtggaatacgtggaagaatttgccaaaaacaaattgaacttcaacaatgaacaaaccaaacaactcgtaaaagtttttggcgcaatcaaacaaggatatgcaatgctgagtttgaaggcaataagaaatataaacagattccttgaaaaagtaatgttatattctcactcggcattgatggcaaaactccccgaaatttttggagaagagaaatgggcagaaaacgaaaataaaattgtttcgcttttgcaaaatgcaactgacgtaaacagaaagcaaaagacaatttattatattgtcaactcattgattgccaactataaatcgttagagccaaacgagcaatttgcacgtaaaaacaccgattatgttttgtcggaaagcgacaaaaacgacgtgtctgcaatggcacaaaaaactttcggcgaaaaaagttggcaaaacaagtcctcagaagaacgaaacgaaattattgccaccacagaaaaactctatcaagagttttttgcttcatcagaccgcgactattacaaactgcccaaacttgccgaagcgttggcagagtgcatcaaaaaggaatacgattttatcgacccaaaacagttgaaaaaaatctatcatccatcaatgattgaagtttatgctcccgcaaaagaccaaacaatcgaagatggcagagtgatgaaacttttgggaagtcctgttattggtgctctcaaaaatccaatggcaatgcgtgtactacattcgttgcgccatatgataaataagttgctgaccaccaacgatgaaaacggcaatccaattattgatgaaaatacccgtattgtagtagaaacggcacgcgacctcaacgatgccaacatgcgttgggcaatagaaacatatcaacgcgaaagggaaaacgaaaacaagaaattcgctgaaataatcaatgaatttctgcccaatcgagaagtttctgacgaggacaaagaccgtatgaggcttttaatggagcaattgaaaacacctgaaaatcaaaaagaaaaacagaaattcgagcgttacaaaaaagacgttacgaaatacaggctttggatggaacaaggcggtttgtgtatttacacaggcaaaccgattaatatcacaaatctgtttgccgaaaacgcctttgacatcgaacatacaataccgcgaagcaaatgcttcgacgattcgttggcaaacctgacgatatgcgaagcgcatttcaataggtctatcaaaaagaaccaaataccgtcgcaactcagcaattatgacgatattctttcgaggattcagccttggaaagacaaggtggagcatctcaaagacaatgttgagttttggaaatcgcaatcgaaaaaagcgatgaccaaagaacgcaaggatgattgcatcaggcagaaacatctttggcagatggaactcgactattggaaaaacaaggtggaacgttttgaactgaaagaagttaccgatggattcagaaacagccaacttgttgacactcgcattattaccaaatacgcataccactatctgaaaaccgttttcaacaaagtggaagtgcaaaaagcaggtgttaacgttgcatttaggaaaatgcttggaatacagatagatgaaaagaaatcgagagacaaacattcacatcatgccattgatgccgcaactctaactctgataccaacagcggtacaacgtgacaaaatgcttgaattgtttttcaagaaattagaaggctatcaaacttctgattgggaaaaccaattgaaccaggaacgccgaaaatgcggtttgggtggtgatttgtcggctattgtgccatatatcgaaaacaatatcctgataaaccatcaatcaaaagaccaaacccttactcctgcacaccgcagaaaacgcatcagaggaaagattgtgccaaatgtttggttgacaggtgattgtttgcgtggtaaactgcacggcgaatcgttttacggtgcaattaagctcggcaaaaaggatgctgacgggaagagccttttgcgcaatcctgacggttcaatcgttcaagaaaacgaaaaaaaatacgtcatccgacgtgaactaaaattcaaaaagaacgaccaagaaagtggttttaagaattgggacgaattggaaaaagtaatggttgacaaagctcttttcgcaactatcaaatctaaattccccgaaggaacatcattcaaagacgcatacgaagccggaatcacagacccgcaaggaaacaaaatcaggcatattcgctgttttgaacctacggtgaaaaatccgttggcgataaagaaacagacatatctctcgaaatatccgtataagcaaagctattatgcggcgatgggtgatttgtatgtaatgtgcaaatacgaaaacataagcaaaacacaaaccaaatacataatttggagtttgtttgacattagtcaaaacaggaaagaaagaactcccgatgtcgaggatattccaacgacactgaccgtagaagacaaaaaacacaatacattcgtcttgaaccttgtctgcaaaatccgcaaaggcgatatggtattgctttacgaaaactcgcccgacgaattggtagaagccgacaaaaatcttttgtcgcaaaggctctatgtagtaacgggttttgaaaatccaagcagaatactaatggttaaacatataaatgcgcaaaaagattctgacttgggtaaaggtgaagcattaacaacgtttgacaaaatgcccgaaaaaatcaggcaatcaattagcaagttaaactttttattgcgaggtaaagatttcgatttttcggcggattatggtatcgttttcaaataaaacggcacacaaaagttaaccttcacaataggcaaagtagcattatgtgcatcaccaataaacgatgaactcttttgaccaccaattagaaacagaaaaacccacctttcggtgggtttttcattgtcaaaaacaacatttttttcgtttgcgaaaagcgtataactttttgtaggtcaacacattatccatatcatgttgtttatgaccctgcaaaggtaataattttgaaagcaaatcacaacatgggcaggacagaggaaatacacacgaagttgtttatgaccctgcaaaggtaataattttgaaagcaaatcacaacaacgtcagaaattttggagcaacaacaaagttgtttatgaccctgcaaaggtaataattttgaaagcaaatcacaacggtgaggatgatgccatcctttgcgccgttgttgtttatgaccctgcaaaggtaataattttgaaagcaaatcacaacccatcggactatcagagtccttcgcatacggttgtttatgaccctgcaaaggtaataattttgaaagcaaatcacaac

SEQ ID NO: 4012 - DNA, 24605 bp, synthetic construct
  misc_feature 1..24605: note = Synthetic
  source 1..24605: mol_type = other DNA
acgctcaccggaacagaaacaggagccaaaggctttctcacgctcgaggtcgaaaaccccggattcagctgtaaggacgacagttactacctgcaacagtttgaacgtctgcgcgataaaaggaaggtgaacaaagccctgaagatgctcgatatgctcatcaggcgcgacccctacaacacttcttactacgacatgaaacgcgacttgctcgagtcgaagaaagataaataatcctatgatcgaaacactcaaccagctcgacaccagtctgtttctgtttttgaacggattacacgccgcctggctcgatccggtgatggtttttatttcgggtaaattcacctggctgcctttttatctggtgttgattggtttgatcatccgccaatatcgctggcagtcggtgatggtgctgttgtttgtggctctgctgatcaccctttcggaccaactctcggtgcgtgctttcaaatttgtttttgaacgtccacgcccctgccacgaacccggtcttcaacccctgatccatctggttaccggaaactgcggaggggcatatggttttgtctcgtcacatgcggccaacagctttgccatggctggttttgtgtggtttctgttgcgaagcagcttccggcacattggttgggtgctcttcccctgggccattttggtgggctacagccgtatctacttaggtgttcattatccgggcgatgtttttgttggcgcgctcttaggcctgctcgtagcctgggttgtagtgaagatctatggatttgtgagccgtcactggtgcggcagtcaggcctgttaaagcctagagaaaagtaaccaccactgagttgttgcgctcgatgccgcagagcgaagctgccttgccctggttgatggcaatctcgagcagaccatgggcaccaaacagcgccaacagatctgcaataccaacatcgttgtagcccgactggattttatacaatttgtagcccccaaaataaatctcgaaggcgcgtccctttcgttcactgcggaagagcttttcggtgatattggtgatgaggttttcgtaagcatcgatatgaatcaccatgcccttgatggtattggtgtcgatggttggctgaaacaggatgcgttgcatcaggttttcgtgcggatcgcccagcgatgaaagcggcacgcctttgatgatctgcacagcagccttaacaaaacggtcgcgggtgctaaaggtaaagaaatcagaatcctgcggtatgtcgagctccaccacttcatccatctcgtcacccaaaatcatagagaaaatgccgttgtcggtgcctacaaaataatgtccgtttgcatagatggcaatgtgaggtgtttcaaccgattcttcggtatttataccaataatgtgaaccgtaccaggcggaaatgcacggtagcagttgcgcacggtaaaagcagcgctctccaggtcgaatggacggatgtggtgcgaaatatcgacaatctgcacatcgggcatttgcgacaatatggttccttttaccgctgcgaggtaatagtcggaagttccccaatcgcttgtgagtgtgataattgccatagctatcctgctgttgcccattggtggcagccaaactgttgctgccagatgcgtttctgctgatttcagggcaaagatactgaaatccgtttcgaatgaactgattgtacccccgaaattatttgaaactgtcggaattttcttgccaactgcaggttgctgttttcgggctattttattcgtcatcacagcttttggtctgaacttttttaccaaagtcatgcgccgactggattttaatcgcgcatcttgaatatctttgtcgcaacaaaaaaaactgccctacgcaacctatgagtgaacaaattattcagatcgaaaatgtaaatccgatcgacctgtacggaccatccgatatccacctcgactacatcaaatcattttttccgaagctgcgtatcatcgcgcggggcgatttcatgaaggtagtgggcgatccggacgagatcgacttttttgtaacccgctttgaattggtcatgctacatctggagcgttttgggaaggttactgataagatcattgagcagattatggtaggcgagcccgattcggaagtgagccgcaaactcaccgacagcgatgtgctggtgcatggacgtggcggcctgcaggtgaaagccattaccagcaaccagaagctgatggtgaatgccagcgacaaaaacgaccttatctttgccatcggccccgccggcacaggcaaaacctacactgctgtggcattagctgttcgtgcgctcaaaaaccgtcaggttaagcgcatcatactcacccgtccggctgtagaagccggcgagaacctcggttttctgcccggcgacatgaaagacaagctcgatccgtatatgcagccgctctacgatgccctgcgcgatatgttgcccacgcagaagctactctcctacctcgaagacggcaccatcgaagtggcgccgctggcctttatgcgtggccgaaccctcgacaatgcttttgccatcctcgacgaagcgcagaatgccacacgcagtcagctcaaaatgtttctgacacgcatggggcgctcagccaagtttattgttacgggcgacatcacacagatcgaccttcccccacggcaaccatcaggactgctgcaggccatggatgtgctgcacaaagtggatggcatacaatttatcatgctcaacgataaagatgtggtacggcacaaactcgtgaccgaaatcatcaaggcttaccaggaaaaaaccaaagagcctgttacgaaagaaaacaactcaccccaacctgatattcaccctaaaaccccgcaaatatgagtcaagctatcgtcaaaacacagtttaacctgcccggccagaaaagcctctacaagggcaaagtaagagacgtttacaatatcgccgataaatatttggtgatggtggccagcgaccgcatctcggctttcgatgtggtgttgcccaaaggcattcctttcaagggccaggtgctcaaccagattgccgcgcgctttctggatgccaccagcgacattgtccccaactggaagctggcgtcgcccgatcccatggtgaccatcggccattactgtgaaccttttccggttgaaatgattatccgcggctacctcaccggcagctcctggcgcacctataaaaaagggcagcggcacatctgtggcgtacccgttccggaaggcatgcgtgagcaccaacgtttcgacaaacccatcatcacaccgactaccaaagccgctgaaggtcacgacgaagacatcacccgcgaggaaatcatcgcccagggacttgtttctgaatcagattacaagcagctggaggattacacctaccgcctgtttgaacgcggaacgaaaatcgctgctgagcatggcctgatcctcgtggataccaaatatgaattcggcaaagtgggcgataccatctacctgattgatgaaatccacacgcccgactcatcacgctatttcattgccgatcaatatgatgagcgctttgccaaaggcgaaaaccagaaacagctttcgaaggagtttgtgcgcgagtggctgatggagaacggctttcagggtcaggaaggacagaaagttccggaaatgaccgacgattttgtacacatggtctcagaacgctacatcgaactgttcgagaaagtaacaggtgaaaactttgtgcgcgccgacagcaaagatgtgctggcccgcatcgagaaaaacattcttgatttccttcacaaggaagggttttagccattctattggcaacttactacaaatccgtcaggcaattgcatggcggatttttttgtgtttggcccctgatagcaacacgtaaattgacccaaaaaaaacatagatttgcaattgatcttattgaaccattgattgcatttttcaaaccaaaaaccaaataaaataccatgaatgtagcaaagcaatttattccgatcctgtttctctccttcattttcaccctgaacgggctgtcgcaaagtagtgtaggtgtgatgtcgtttaaaaacaacggtcaatctgattatagctatctttctgatggcatcgccgatatgctgaccaccacactcgcaaacagcaacgaggttcgattggtcgaaaggggtcagttaagccgcgtaacagacgaactgaagctgggattaagcggacttgtggatgaaaaaactgcagccgaagttggtaagcttaccggtgctacctatatggttttaggttcattcatcaacttgggcaagacgctgcgaatggatgccaaagtagttgaaacacaaaccgccatggtcattccaggcgccacggcaagtgttaaagcctcctctatcgaaagcctggatgaggccattgacgaactggcggctaaactcatcaccaatctcaccggcgaacggattcaggctcaaaagagcggcgatcccaatcgggaaagcatattggagtttacttacgacccacgcgtgatgctcgtgaccctggtagatggcaaaatgctggaggcccgcgaaggagaactaatggcacaggtaaaactgaatcatggaaaccatttgatcagcatcgaaaaaatgaaaggactcttcaagtcggaaaagctgctcgacaccacaattttcctgcccggaggaaccattacccgaaccagaatgaaagacaataaactcgaggtgtttgcagtggatcaaattgcaacgccagcttatgccgaaacaacgacacatcaaatgccaacaggtgattttgaaactgagaccaccggcacagcatccgaaatgggacagatgatgacagaatcgatggaaatactcaagaaaaccacggaagctgttgtgccatcaacaacatccaaaccacagccattgaatcagactgtggcaaaacgtaagtcacttttagtaatcatgagcaaaactggcctttgtgagatctatatcgacggggaagagaaggccaatattggcgtaacccctattgacggactgggaaaagcagagattgagcttgacgcaggcaattacctgctgatgattgatggttttggtgtttggttcgaaaacaccattgaggtggggaatggcgaaatcatcaaaatgagggccgaaccagatgaagtgaaaatattgggcagaagcgagcggcagtaagcaattacagacgcatttattcgctaaagctttgcggtaagttttctggtcattttggattaatcactaatgctttgtatgcaattgaccaagaacgctaagcttgttttggtcccgaggtggcaataaaaactcaaagcacgcaaattgacacttgccagaacacataattgcaaaataaactcactacctgaatttggtttctgtatacctccgtttgacaatcggttgaagtagcttgaagcagaaaaacctaattttctggtaaatacatttgataaagcggtattctttcatttaatttgctcaattgatcactttaatgcaacgtgatgaaaaaattattaccctacctcattgtttgtctgttcgttttaagccttgttttttcctgtagcaaatccaatgacaagacactcattatcaacgatacgatttatttaaacgacaccatttatcttcgtgataccattcagaactttgataccctttttattttcgacaccatcattcacacagatacgctggtcatgattgataccatcattgttcatgacacttctgagttttcttatctgtttaagcattacgaacttgaatcatacgatgtgctgttttataccatcgaccaacagaaaagtccccgcaaaatctgtaaaatgaaaagtgatgcgcatcatatcgacattctggacgacggcaataagatgtatccggtttggtcacccgaagaagaccatatattttacgttgattttgacaatttgtcgattgccaaacggaacctgttgggcggagaagtggaacacatttatcaaattgacagacccatcttgtttttacgttattttcctgcacaggatctgtttttagtgagctacgaggcttggtccggaaacaatcaaattggtgccatcgattaccacaacaatcagttttacgaactcagttcaatcgatgccgatgaatataaccctacatgtagcgaagtggacgactggatttatttttcgaggacaaaccacggtacagcagatatcttcagaagaaaaatggacggaaactctgaagaggaagtttatatcgacccggaatttaacctgtcaacttttagcgtaagtgcagatggtaagtttttaataacccctaaatacatcaatggaaaaggctatatagttttttacgatatcaaccgtcatcgtattattcatgagttggatctgcccgtcgaaggtcatccaatgtacgcctctctatcaaaagacaacagagcgattttctttgtaaacggaacgccctacaattataccaaaccaagaaatatttaccggatgggcctcgacaaaacacaattattccaaatgaccagttttactgatcagttggccagtaggcctttggtaaaataacactcagaagaactgatttcgtgtcaattaaaataagattagccgcagaaaacaacaggcacactcaataattttcttcttgttcgatctcatgcaaaatcatcagtatttgcaccgatagtcgtattgtttaagctgggttaatatctgttagcggccaattctactcagcttctctcatatgcttccatgtcgaaaaatacagagcagagcatcagtgttttgcctgcacagaagccagcgattgaatcgagaaagattgaaacacatagctaaattgaacgatggataagcttcatttcaggcagccatcagctactgttacttagtaagtttttaagtccctcgcgtaaaaaatatgtaggtttgccggcacaagctgtcatttatgaaacgaattcatcttttaacgctgtcggtcctgagtggcttactgttgagtgccgcctggccggtacatggcatcactgcactcatctttgtggcttttgtgcccttgttttttgtgcaggaatacctcggaaacaaccgcgatgcattgggtaaaggacatctgttcctttacgcctttgtcacttttctcatctggaacagcctcaccacatactggatatggaactccacacccgggggcggcgtggctgccatcgggctcaacagcatcttcatggcctccgttttctggatgtaccactactcaaagacgcgcctctacgacaacaaaaaggggagcatcatcatcgtgtttttctggctcagctttgagctgctgcaccagcactgggatctcaactggccctggctggcactgggtcatgccttttcgcccaagaaccactggatacagtggtacgaatttacaggcgttccgggcggcacggtctgggtgctgctaatgaatctgctggcctttcaggtggtgaaagccctgctcaacttcaaaacgcaatcgaaacgcttttcactggcgcttgtagcggctgtggtgctctggatggcacccgtactttttggcgagtacctctaccgcaactacatcgaaacaggcgagcaggccgaagtgatcgtggtgcaacccaatttcgatccgtataccgaacaatatgaactatcgcccgctgtggtgatcgagcgtaacctgacgctggctgcaagcctcatgaaccgcaaagttgattttgtggtctgtcccgaatcagccattcaggaaagcatctggctgccccgcaaggaagaatctccttcactcaacgaaataaaagcctttgtacatcaacatcccgaaacggctgtcgtgattggcgccagcacctttggccccgtgcccgaaggcagcgaaaacgaccatgcagcccgcaaatacgccaaaactgaaggctattattatgcctataacacggcatttatgatcgacaccagcaaccaactgcctttttaccacaaatcgaaactgacacccggggttgagatgatgccctcctggttcttcctgcggccgctcagcaggttggccatcgacctgggcggcacagtaggcaccctgaagattgacgatgaacgtcgcgtttttgtgcatcccaacgggaagttccgcgttgggcccatgatttgctatgaatcggtttatggtgagtttgtatcgggctttgtgcgcaacggcgccaacctgctctttatcatcaccaacgacggctggtggggcaacacgcccgggcaccgccagcacatggattttgccatcctgcgtgccatcgaaacaaggcgcagcatagcccgctctgccaacacgggtatctccgcttttgtggatcagcgcggtgatgtttttcagaagacaccctattgggaacaggctgttatccggcaggcgatcaccaccaacgaccgcctcaccttttatgtacgctacggcgactatctgtcgcgtacctcagtgtttattgctgccatctttttactgaccgctttcgccaggagcagaatgcgctttggggtaggaagatagaagtccgatgccgatagttatcggcaggagaccggagacggaagatgcacgaacagtcattatacccgatgcctgctattgacccgacactttgggaaggctcccgaaggcaaagggtaagataataattaaaatgtggcttcgagggcctcagccaccgagtgttgcgatgcctgaggctcccgaaggcagaggaaaaaagatgtctgttgccggaagtctttagccagcatggataatttgtcaaagtctacggaaccccttatatcccgcacacaggaagtctaacactgctatttccatatggtgctttatcaaaggcatatggtgctttgttaaagacaattgatgtagaaactgttttatttgctgcgtccgttttgaaacacgccacctgcccgccgacaattgaccacaaatccaattcatataaggtcaggtttttgccgggtgctgtctctcctgtttcatatacaggcttgcagaagtcatatgaagcctccgcaaacacgtatggagtctccgcaaactcatatgagacgtttccatttccataattgggaattcctatgtcgtattgtgcgtccgccatgtcgtattgtgcgacccccatctcgtattttacgtcccccatctcgtattgtgcgtccgccatgtcgtattgtgcgtcccccaactcgtattgtgcgtcccccatctcgtattgcgcgtaccccatgtcgtatgaagcgatttcaaagccgtatgctgcttccgcaaagtcatatttcccatttccatggataaaatctggaaaattcccaacctgggaaggtttggctaacctgccagaaaggaaggaatgatgaatcgataggtggttctcgtcataatcagaagtacaacacctttcttgaactactatttaaacaccacataaaaagtgttgaaatatttttgcaaaagcaaaaatatttttatttttagggcatggaaaaaccagcgcccgctggtagctatcgcctgttctgggcatggcggggtaaagggaaaaaaaatgaataccgcttgcggtaggaaatagtggtttctgttattggagtgtattaaacatgcgactctgaaacgaatttgaacttttatatgaaaacaactttactcaatttgaaaaaaacacagaagaaatgtgatcgaatcttaattggaacacaggaaagcgcaaaaattaatcagctataaaaaaactcccaccgaagcgggagtataggaataatatccttcggcatatagccttgttgtgataagattaggttgcaaacataaacattgacatcaataaaacaaaataaaatggcaaaaaaagttttaggccttgatttgggcaccaacagcataggttgggcaatcgttgataaagaaaatcaaaagatcttggatgcaggagtccggatattccaggaaggagtaaaaaaagatacgataggaaaaggagacaaggaagaaagtaaaaactccgaacgcagacagcatcgtcaggcacgcagactcaattttagaaaacgaattcgcaaagcacatttacttaaactcctgatcgataatcaaatggttcctctaactatcgaggaattaaacaaatggcggtattggaacaagaatgaaaaaagtagcggcaaaatatttccacattcagaagcttttgtcaattggctaagaatgaatccatatctgctaagaaaaaaaggcttgcatgaggatttaaccctattcgagttcggcagaatactctaccattttatccaaaggagaggctttatgtccaatcgaaagggaaaagcaaaagatactggggtgatatataagggaaaagagaacatggatggtgttgacgaaacacgtgagttgttgcaaaacagaacccttggtgaagctttatttgaaatacatccaaaagaaggagaggcgttttttattcgaaaagatattaaaggtaaagaagtaagagtaagagccaggtatactttgcgagaaatgtatgtggatgaatttgatcggttatgggaaaagcagtctgctcgactaggccttactgataagatggtgagtataagaaggaaggttttcttgaaaggtacaattaatcaaaagagaaaccagaataagctcaatcatttgattgacagatacggaaaaggaaatgtcatagtctatgatgattccattggcgttttggaaaagaaacctttaaaagaggttttggcaggaaaaatagaatcaactgaagaaggtgtgcgattcaaaagcaacgagagtgtgcttttttggcagcgccctctgcgttcgcaaaaatctttactaagtaagtgcagcttcgaaagccaaaagatttttgacaagaaacttgacaagtggattgttattggcaaaagccctgcctatacatcacatccagatttcgagttgtttagagcccatcaattcatcaacaacatcaaaattgggaaagctaaccatttgctcaacgatgaacaaagagcagatgtccttgacctgattaattctaaggataaggcgtttgaattcaaggtgattaaaaaagcactgaaattaccacatgagttttttaattacgaggatgattttaaggttgccggcaataaaacgcatgccagtgttgcatctgtattcagtaaaaaagattgggaagaaattaaggaggagatatggcacgacctggttttttatgaagacagtgatttgctttcagcaaagttgatgagacggtatcatcttgatgagcaatcagcaaataagctatcgaaaatcgagttagaagagggttatgcaagtttatcgttaaaggcaattagaaacatactgccttttcttgagatgggttatcggtactctacagctgttattctgggcggtgtaaaaaattcatttggcgagcggtgggaaaggtttagtattgtacatgacgaaataatacgagatgttgtacgcataacggaaaacgaaaaacacaaagaatttgagctggttgagcaggtgaaattgtatttgtctgatcctgaaaacaaatatggatttaacaaagatgacaaagcatttagcaaactctatcatccctctcaggctattgaaaagaaagcacttaaaacacgcttatctgaaatcgaaaatctgcgaaatccgattgttcaaaaggcattgtatgaaatgcggagactaatcaattccttgctcgaccgctatgaagaacccaatggtgatgggtttagatttgatcgtattcaggtcgaatttggacgcgagttgaaaaacaacaaaaaacgaagacaggaaatgtcgattcgaaaccgagagaatgaaaataaaaatgcattggcaagggaacgactatcagaatatgggttgcgccccagcagaaacaacatcacaaaatacttgctatatcaggaaatagagcaaaaaaatggaattgtgcaatgtccttatactggacgaacaattagtatcagtgacttgctgggcaatgaaaaccgttaccagatcgagcacattgtaccacttagtgtttcattagacgacagctatggaaataaaactctttgcgaatcgaattttaaccgtgaaaaaggggaattgaccccctatgaattctatcaacgcaatagttcgcgtgaactgtgggccgcaagcagctgggaagaagttgaacaacgagcctataaattactgccatatagcaaagccaagcggtttacgatgatgaaaaaaccaggtgcagacgattttatccagcgtcagctgaacgacactcgctatatcagtaaaaaagcagctgaaatgcttagtgaaatatgtgatgatgtgagggtgttgccagggcagctcactgctgagttaagacggctatgggggctaaaccatttgctgcgtgatccattgctaaaatcaaaaaatataacagtatcaactgatggcgaactggagcattttgtggtttttgacgaaaatggtcaggtaaaacaacttttacctgcacaaaaccaaaaaccctccagtggttttcctgtgctttgcatgccaggttatatagataagaatgggttgttttcagaagaaaagcgctataagcagcttcgatttgaacaaaacaaaacgggatttaaagagggtaaatattgggcaaaaacggaacttagcaatccgcttgattttacattgatattcactgcgcggcctcctttaagcaataagtacataagcctaagaggacaagttagtaagggaaggtttacgcacgattccatcaagcagaaaatagctgcaaatgtagaagatggtacttattgggtaagttttccggtgaaaaacttccagctggttcctgcatcacgagatcaaaagcctgcacccggcacaaaggaaattctgctctttggcaaagtgaatggaggcttgtttagtagctatattttcgaaaccaccaccgacttgcctgatggtcgctactggctgatattagaaccggatacaactacaccagaatttttgaaagcccgcaatatacctgaatcaaaagctgataatgaggtgtttgttgaaggcgtagtagatgatttgggcaaatttacctcagaccaggatcctgatttcagctttaaaacttctcatgccccaggcaaatattttgttcggtttagagctatgaagaccgagggctattatccactacaaaatgaccctcctgtatttggtaaaaatgaaaatcttgctctggcatacacatgggtagataaagccactggtgaaatcaaaatagatgtacaaaagaatcgtgaagaccagcgtcaccatgcattggatgccattgtggttgccatgagtgaacttagctatctgaaccagttaagtcgctattcaggtcaaatcaaagactgggaacgtggcaaggatgaaagacctgtttttgatttgccctggtctgaattctctgatgctgtaaatactgccattgaacagattcttgtgtcttatgcacaaaacagaaaggtggtaagcaagattagtaaaatggttaataaagggggtagaagctacaaaagctctggatttgcagccagaggccgtttgcatagagaattctattttggtcagcaccccagacctattctgcatcaaaaaaacccgcaaacaggagatcttttatttgagaaagataagtatggaaacaagcagtactattatcatatccgaaaagcggtaaccactatccagaacaacaaacatgtagataagatcgtggacgaagctatacggctattgataatcagtagacttgaaaaggaataccatattgataccactaagccatacaatataccttccgattttttttacgacaaggataaaaaacccaatttattccttccaaataaaaacggccatcctgtgcctgtaaaaaaagtacggatgcgcgagaatattgggaatgcggaacaactaaaaagtgatgtcaaccaatgggtaaatccctacaacaatcaccatgtggtgatttatgaagactttgagggcaatttacaggaacaggtagtatccttgtgggaggtagtcgaacgacttaatcagggattgaaaactgttcaattgcccgtgaatggcagacgaatagtggaaaccctgcaggagaatgagatgtttttgattggcctgcctcaagatatgcgagataatctggataaaaacttgaattctgtcacagcgctttcgccttacttatatagggtgcaaaaaatatcgagtatgtattatacatttcgtcaacatttggtttcaagtgtttcaacggaacaaggtgaattgagcataagaagtttcaaagcgtgggaggagcttaatcctattagagttataatagatcaaaccggaaaaatcagtttttaggtcatgataaggcgaaccatctttatcagtaatcctgtccgtttgtcactcaaagatcagcaaatgaagattgaggtaaaagagagcggacaacaaacctccatacctattgaagacgttggttttttggtagttgaaaacatgcaagccagtgtgagtgtgccgttattggctgcattgaatgaacagaatgtgggtgtgattttttgcaatgcaagccatatgccttcttcaatgttgcttacgctggacagccacagtgtgcaaactgaaatttttgccttacagctgaatgccagcgaaccgttgaagaaacaactctggcagcaaactatcaaagcaaaaatccgaaatcagaattttcatcttttgtcaagaggtatcgaagcgcctggtttggccaatctggtgaaacaggtgcaaagtggcgacaccaccaaccgtgagggtatggccgcgcgtatctattggcaaagtttgatgggcaaaggttttgtgcgcgacagaaacggtagccctcccaattttgtgtttaattatatctacattgtactgcgtgctgctgtagcacgtgcattggcaggctctgggctgcttccggcgatgggaatccaccatcacaatcgatataatagcttttgtttagcagacgatatcatggaaccttaccgtccctttgcagatcaattggtgatggaactgattgaagaagaacctgaactgacagtcttggaaacagtgcacaaaatgaagcttctaaagttgttgcaggctgatgtaagcacaggaaagcaaaagcggccattactacttgcgttgagtgaaaccacagcatcacttgcccggtgtttcaggggtgaatcgagagaaattacttatcccaaaataaattgattggtgcaatgtacccgactaaatgcgtatcaggttatgtggctctttgtatttttcgatttgccggttacaaccaaaaaagaacgcaaagcggctacgctatttcgaaaaaaattggaaaaagacggattctatatgatgcagttttcagtttatacccgacattgtgccagtcgagaaagtgcagatgtacatactaaacgtgtaaaaagtgagataccagaatatggacaagttagcatattaatgataacagataaacagtatgcagaaatattgaattattttgcacacaagatgattgagctgccatctggagggcaacaattagaactgttttaattgtatatttgttctttgaaatactgtagaaaaaaaaaagtgatttctgaatcttcacttcttgtttgacatatgttttttttgatataaaacagtctgaaagccttgtaaattaaggctaatgagtcggcaggttgtgatttgattaggaattcaagcttaagacatttgaaatgtataggcggcgctgctggttttagttgtgatttgattaggaattcaagcttaagacatttgcaatggcacagggcaggtgcaatacaacgttgtgatttgattaggaattcaagcttaagacattaatcagcacattaataaaaatagccggtgagttgtgatttgattaggaattcaagcttaagacattaatgaacgacctaaaaaaactactcaacaagttgtgatttgattaggaattcaagcttaagacattaaaagtacaccagcacaacaaaaccgaactgttgtgatttgattaggaattcaagcttaagacattctttacggggcgcttgcttccgggtgccgagttgtgatttgattaggaattcaagcttaagacattacaactttgaaattaaccttccattaacccgttgtgatttgattaggaattcaagcttaagacattaaaactttgcaaaatgaaattgcaagcctagttgtgatttgattaggaattcaagcttaagacattaatgcaaaaattatcattcgtctcgaacttgttgtgatttgattaggaattcaagcttaagacattggacaagtaggcattgagtatgacattatggttgtgatttgattaggaattcaagcttaagacatttgatgtcgcgcatgaatgggatacgtctgggttgtgatttgattaggaattcaagcttaagacatttccggctctttttacttgagcatattcacggttgtgatttgattaggaattcaagcttaagacatttttttttctaagctcgaggagtacatgtgttgtgatttgattaggaattcaagcttaagacattccagaaccgaacgcgacgggcagcacgtttgttgtgatttgattaggaattcaagcttaagacattgttggtgctttgcgcgctgattcgataagggttgtgatttgattaggaattcaagcttaagacattatcatttttttcgtgccacagcccgacggcgttgtgatttgattaggaattcaagcttaagacattagagagtatttgcaaaattgtccgttcaggttgtgatttgattaggaattcaagcttaagacatttatgcttacttcatcgagcggtttgattttgttgtgatttgattaggaattcaagcttaagacattggtgcggtcgaaacggttgaggcgctgcagttgtgatttgattaggaattcaagcttaagacattccgccaatccacatcaatgctttttgccacgttgtgatttgattaggaattcaagcttaagacatttctttactgtctgcaaaatattgtttaatagttgtgatttgattaggaattcaagcttaagacattagactgccagcgcgttacaatcgaaacacagttgtgatttgattaggaattcaagcttaagacattcctgagtttcataaggcacttaacgctattgttgtgatttgattaggaattcaagcttaagacattctcgatcgcttcaattgccgcgtggttgaggttgtgatttgattaggaattcaagcttaagacattaatcaaaacaattttgctgtggtttttagttgttgtgatttgattaggaattcaagcttaagacattcttccgattttaccaccttacgtagcagggttgtgatttgattaggaattcaagcttaagacatttacgatttggaaaacgttcgactgctgcctgttgtgatttgattaggaattcaagcttaagacattcatttcgtcgtcggcctgcttaccgttcatgttgtgatttgattaggaattcaagcttaagacattttaagcgtgtagtatcatggaagagttaagttgtgatttgattaggaattcaagcttaagacattgtggaggtgatgaagagctaaccacaccccgttgtgatttgattaggaattcaagcttaagacatttcagaaccatgccacatgcactcatgccgtgttgtgatttgattaggaattcaagcttaagacattctggtagaatgaatttaatgtccataacctgttgtgatttgattaggaattcaagcttaagacattctgttttacttcgtgttgttggctcattagttgtgatttgattaggaattcaagcttaagacattaaacatgatcgcaaccatgaggaaaaccgcgttgtgatttgattaggaattcaagcttaagacattcagccgccgacaacaccaaaaccggaaccagttgtgatttgattaggaattcaagcttaagacatttcctatcgatcacgctcttatgcacaaatggttgtgatttgattaggaattcaagcttaagacattgtattggaaaggcttgtgagttcggttgctgttgtgatttgattaggaattcaagcttaagacatttcggtccatttttcgttgtaagcgatagtgttgtgatttgattaggaattcaagcttaagacattaatagaagcacccaccaaaagctggcagaagttgtgatttgattaggaattcaagcttaagacatttcaagttcgatgctgttcgtgatctcgtgagttgtgatttggttaggaagtcaagtctacttccctaatccactgatcctgctggcattccaggttccggctccggttgtaccggcgccatctggtccatacgtccagctccctacgcctacacctgagctgtagaaagtaccgctataattgaatatattctgcggtgttgtccatgctgcatagccatcatcattcaacacaccaatcccgtaatcgccccagcctaacaggtcatgaccctgtatgcccatttcggacgtcatattgtagggggccgaaaatccctcgtttacaagtgtaccggtcatcgaaaatgtccaggttccatcataaggacctgtctgaacgctgtttgcttcctgggtgattgtaaagcttttatccgcaacctggatggtgcccgatctttcttcggtcagtccgtttgccagtaccgaatagctgacttcaccgtttccgctgcccgatgccccgtttgtgacggtgatccattcagccaccgacacagccgtccatgcacagccattgtctgttgataccgcaaaggagccgcttcctccgtttgcagctatctgcacagaactcgcagataacccaaaggcacaatcagcagctgacaacacattgccaaaggcttcgccaagtgaagtgcagccgtcgatcaggcttttgattgcgccggacgcgtcaggataaatctggtccgtcacaatgccacgcagcatctcttcgatacggcccacgccttgctgaacagcctgagtggcagcctggctattcacattggcaagggcagctcccgtcacaacctctagcccgccagttccaattgtagcatacaagatggctgcagcaggcaaggccagtgcagctgcaaccggtatttctgctgccaggccagtcaaagcaataaaaccaattgccacgctgccggcaccaaagatcaccttacctgccgtattgatggcatcgggcagtgaggaagccacgcactgcatatggttggagacagcgccgttgttgatgccggcgcccaaatcgcccgtaacattgtaagcactttcgctacatggattataaagcatggctttttcagtatgaatcaggccaatttgatcggataaattcgactcgcttagcgtgtaatagagtgcctgtaaaaacctgtcgcactgggcgagttgcgaaacactgatgtttatttcgaagccgttgatcgtgccaaaatgataggttaactgaggatcgtcggatgtatttaccagcttatggagatcggcatgcagtttttcgaggttgttcaggttggcgcccaaagtgaagagcatatcaggattggcatgcccgctgttggcaacctccatctgtagctgtttcaggtagttgatctgttcttcgagaaagacaatagtcgcctcacccggttttgcgttcacgacaggcaaatcttttatgataaaactattgatgatattggagccacgttcgatcagtgcatttttgtcaatgagttgcacgtccactgtaccttcagcaaactgaccacttgtggcatcgacaaagggaggtacagccaccaccagcttcccggcagcattctgcaaaacaggcacatccactgaataacctgcctgatccgaaaaacgtacccaaagctgttccccctcaacaaatcccacgccctgaatgaccagcagcgaagttggtatggcagagtggctgctcatattttgaatcctgaaagaattgtcaggtggtgtatcgccatcatccttgcctgcaggtttacagctgataacggttgttacaacgatgaaaaacagtgaaaccaaaaagcctacatgcgttttcataggtcactttttaagattagaaaccagacgtttagatgatctctgtgggtcaggatgtcaaaaaaaccaatgtaaagttacagcatttgtgagctgttatcatttctctaaaaaatatttttcagaggttcatttgacagaaattgcggtagcgaaaacaattgaaaaaagaagagtcagcagcttatcactccttattatttggcaatgataaaagagtatacctgggcaccaagattgggtgcttcgaagctacaggctcacaaaaaaaccaccgaaaataagaaatgtagtattttcgcacacagttgtcagtcaacagaataacgtttgtatcaggaaaagatcagaagattaaaattagtataaaaacttgacttttaaacacataaatccccaatccccttgcccattcacctcagtcttggccccttccagggcataaccgacaggatctaccgcaacacaatcatggagttgtttggggggattgataaattgtacacacccttttttaccggcatccataaagacaacagccgcagtctgcgcagcgatgagattgatccggattgcaatgatgttgcttcgctcacaccgcagattctgagcaatgacgccaccgaaatgattcgctttgccgatcagtgtggcgggtttggctatcgcgaaatcaacctgaatctgggttgcccctatccgcgcgtggccaaaaagaaaagaggaagcggcttactgccccatcatgagcaagtggatgaaatattggctcaatattttgcccattcgaatatgcgtctgagtatcaaatgccgcctgggctatgaatcgcccgaagatatccatgaactgacaaaagtattcaaccgctacccaatcagcgagctgatcgttcacgcacgccttggcaggcaattatacaaaggtgcggtactggaagaggaattcagacagttgattccacagatcaacaccactctctggtacaatggtgatgtgttttcggcagccgatgccaggcgctttgaatcactttttcagcctgttgatcattttatgctgggacgtggtttgcttgccgatcccttccttgccctcgacatcaaagggatttcttcgccaacaaccgaccgtaaaaaagccgttcatgacttcactgagcagttataccttgcccgccgcgaagcaagcaacagcaatccgcgcgtcattggccggatgaaagagctttggagctacctcatgtggtctttcgaaacacctcagcctatttggcggctgatcaggaaaacaaacagtttcgaagcttacgaaagtgctgttgagcaggtttttgaccagcaccattgggtaggtgccggttttggcagggcaaatggcttttcgcaggaatcgcttgtaaacgaagagatttagtcctaattttgactcaaaatattcctatgtggttttcacgcctgcattttcacctcagctaccgtatgagcctgtgggcactcatcgtggtagccatgttgctggcgggcggctatctcaccatctcctacatctacgaaatacaggacgaatcggccaacctgatgcaggaaaacaaaaccggtatcagtctggcacgtgatctgaaaattgccatctacaaacttcagtcctcctcccttgagtttctttacgacaccgaacagcataccgagacgctttttgaagagcaataccagtttgaaaaacagctcaaaacagcgcaggattatgcggaaacgccggaagagacccagttgctgcaacaaacatcggccctgttcgagaactaccgtcaaaccctaaaagaagctatcgtccttcaaaggcaaggcagtctttcgctctcaggacgcaagcttatcgaaacgaatcagtcgctgcttgaaaccatcggacaaaaaatcagtcagtttttacagatcaaagaggaaaaacaaatcaccctcgaagaggccatccacagcaaagacaccatcatccggagtgcagttttggccctgggcatcggtggcagcctgctcggactgctgctgggctggttcgtggcccgcatgctcatcaatcccatctataaaatggtgctcaaggtacgcgatgccgaaggcagcgaaagcattgaaaaagtgaggatgccttttggtaaagagctggaagaaattgatcagttcatcaaccgcctgatagaacgactcaagtcttcgaaccaaagtctgagtaaaaacagggccttactcgaacgcacaaccaagctggccgcattgggacgtattgcgccggccctggcacacgaaatccgtaacccgcttacttccatcaagttattgatctataccatgctgcaggaagaaggtctgagcgaagaaaaaaaacaggatttccaggtcatcacttcagaaatcagccgtgtagagggttttatacaaaacttcctgaagtttgcccgacccacaaaacccagcatgcagctcatttcgctcgacgaaaccctcaaggaagtcatcagccttttgcaggcccgcttcagtcagggcaatatacgggcaaaatttgaccccactagcgaaatccggctcatggccgataaagatatgctgaagcaggttttcatcaacctgatggtgaacgcctgtgaagctatgccacaggggggagagctgtttgtaaaaatcagcctgcgcacagaacaaggcagaagcatggtcaacatcagcctgacagacagtggaaagggcattccggttgacatcgaagacagtctgttcgatccctttgtgaaaggcaacgaccagggaacaggtttgggtttgtcgatttcgcagcgcattgccgagctgcaccatggatggatcagcgcagccaacaactccgataagggagccacttttaccgtacatttgccaaaaccggacgagcaatgaaccaaaaaaccatcctgatcgtcgacgacgaagccagcgttcgctattcgtttcagaaactgttccgcgaacccggcaccaccatcgccgaagcttcaaacggaaacgaagccattgcatttgtgcagaaaacagaaaccgatctggtgctgctcgacattgaaatgccaggactcaccggcctcgaaaccattcagcgaatcaaggtgttacagcctacccttcccgtgattatcatgacagcctttggtagcagcgaacgcgtgattgccgccatgaaatacggtgctttcgactatctggagaagcctttcgacatcgagcgcctgaaagctgtcgtaaaagatgctttagcactcaaggcctctgcacaaaccgaagccaaaatcgacattcaaccggctcttgcagcagacgccacgttgatcgttggccagagtcaggccatcaaagaggtatataagatgattggccgtgtggcagccagcgatgtgagcgtgcttatcacaggcgaaagcggaacaggaaaggaactgatggccaaggctgtacaccgcttcagcgatcgtgccgacaaaccatttattgccattaattgcgctgccattcctgacaacctgctcgagagtgagttgtttggttacgaaaaaggagccttcaccgacgcctcacaaagcaaagccggtaagtttgaagcagccgacaaaggcacgctttttctggatgaaatagccgacatgagcatcaacctgcaggccaagcttttgcgggtgttacaagagggtagttttgagcgggttggcagcaacaagacccaatatgtggatgtacgtatcatttcggccacgaacaaaaacctcgaaaatgccattgccgaaaaacaatttcgcgaagacctctattaccggcttaaagtagtcaatatcaccatcccaccgctgcgcatgcacaaggaagacattccactgctggtgaatcatttcctggccaaacaatcgcgcgagatgcgcaaatcgcaagtgactgtgctgcccgatgccatgcaaaaaatgatgagccacaactggcccggaaacgtgcgcgagctcgaaaacaccctcaaacgcgccctgctgctgagtaaaaacaacctgatcacgcctgacttactcagcaatgatccaacagaaattacaagaagtattggccatacaaaccggtcaaact

SEQ ID NO: 4013 - DNA, 23084 bp, synthetic construct
  misc_feature 1..23084: note = Synthetic
  source 1..23084: mol_type = other DNA
ttgcaagccccgataaacatctagaacttctttttcatctgcagctgaatacatatgatgatctgggaaaaactgcgtttgcaccacattgtatcccatctcacgtagttgcaggacaaagtcatctggtttcgcgagtgcacagaagacaaataacggtttttgtatttctacagaaagctctatctgcactgaggaactaaaaatctttccacttagatgaggaaaatcagtttccattttattttttaagtctttaactttattggtatcagataaattcgttttcgttaaaataaccgcatgggctctttttaagttagaccaagattcacgaaaataatcccccgcaagccctttgctggcatctaccagtactaaatcaaaatctctagcgagttgacgatgactaaagccatcatccacgatgatcaactgtggagcagagttcaaactagcttgtgcggtttctagttttataggtccagaccaaacttcacaggtttgcagttgagactgaatcaagcaggcttcatccccatagatatgagccgcttggggcaccgataaatccactcgtgcggcttgctttatcgaagctttataacttttgcagacaatcactgtcttcatttcattctgaaagatttcacctaagtagataacacatggagtttttccaactccaccaaaagacagattcccgaccgacagtaccttcgaattcaatttagtttgttgaacgacattggtttcatataacaggttcttaacacctgttacgaaatgataaattttctcgagaggctttaaaaccttcataaataggtttctaaacttttagccacacgagctgtggctcctttttcacctagatactgcggtagttttttcaactcttcaataacagaggctgtatattcagggtcgactatgtaacgatccatcaagcgaaaaagctcatcagggttagcttcttcttgttttctttctggcaccacttctttatctaggattaaatttactagaccaaaaaacttgatcttaataaacagtttcccaaacaatcctgttagccactttaatctgtacataatcaccattggcttctgtagcaagccaaccattaatgtcgcagttccagaggccactaaaacatagtccgtcatactgatcattttattaggatcatcttggaataaaatataaggtgatttgaagttctcgaggcgatcaataatttcctcttttttcactgtcggagccacaaggatcgccaaacgtagatggtcatgtttatttataagtcgacgagccacttcaagctgaatatctaagtgctgattcagctctccacgacgagatcccggcataagccccagcactctttccgtgcttttaatgccgtacttttctttattaaatctatttttttcttcgttcagaagattttcgtcaaactcgtccagcagaggatgcccgatgaactcataaggaactccacgggatttataaaaatcagcttcaaatggaaaaagtaagaaagctttatcacaatactttttgatcgtattcacacgacctttgcgccacgcccacacttgcggagaaatataatatacagacttaatccccatcgcgtgcagcttcttcgctaacatcaaattgaactcaggatagtccatcaggacaacgacattaggacgacgtacacgcgcttgctcgaccagattattaaaaatcgcttttaactctgagtaatgagcaaatatttcggcagcaccgaccacggccatctcttctgattttcctaggcgctcgaaaccaaaagcctccatcgcatcagagcccacaccaaaataggtgtagtctttgccgttatctttccaatactgcattaacttcaaagcgtaatgagcactggaagcttcggcagcaatgatcatgatctgtggctttgcctgctccattaagagagttccttatccatgtgggcaataaactgttccacttgtcttaaagctttagtggcttctaccgctgtaataagtggttcttgcttccctaaaacacattgcacaaaacgatcagcctctaaggctaaagcatctactttatctaattgaattttttctaccttatgaaaagggtcctgtgactcagctgttaaaacttcagactctagcgttgccgtattcgtaaaaatcactttattttcaaaaacagcgcgatagttacgtataatctgaggtgtcacacgagaattattaatcgtcacctgtgctccactagcaaactttagacgtaacgagacatcatcataggtcggcttaataattttctttcctgccacttgataatccacgatttcgctatttagaatccaatttactaaatcaatatcatgaatagttaaatcatgcagtacactgacatcgctgcctcgagttctaaatggtgctaagcgattaatttcaaggtattgaattttatcagtggactctttcagtaaacggaaagcagggtttaatctttcgatatggcccacactcagtagtgttttgtttttttctgatagctctgttagtttttcggccaagtctgctgtcgccgcaatcggcttttccaccagaacaggaattttattttctagaaataatgctgctaggtcgtagtgggactgagtcgaagctgcaatgtggacgtagtccacgtgcttaagtaaatcctgaggtttttcataggcctgcgtctgtagatcggcagccacttttttagcctgctcataagagaaatcacagacacctacaagatctaccgctgggtgagccttcagcttctgagcatgaaaagtccccagataacctacacccaccactgctgcttttaacttctggctcactcttcagctgctcctgcaccacgtgcgatagcaatacctcgtttagagtttttaataaaatccacaaggtaagtgatattttccgatggagcgcactcagcatcgatgcgagtataagcttcttctaaagtgctagagcccataataacaatgcgaatagctttgtgaatattggccacttcttctttagcgaaaccttttcttaatagccccatcttattagttgctctcaccaaggcccaatttccttgagctcttgaaaatggcaaaatatctttattaacaatacttgatccggcaacaaaggcattctttccaatacggcagaactgattaaaagcacaaactccaccgacaacgacattatcttcaactacacaatgtccagcaaagtgagagttattggcaatcaccacattgttaccgatcttacaatcatgcccaacgtgcgaatacgccataaaataaccattgttacccacgacagttgcaccatcacctttgctagtcgcaatattcagcgtagcaaattcacgaatgacgttattgtctccgataatcaattttgtcggctcagctttataactgatgtcctgtggcggaccaccaatgacagcgcccggtgatatgtgattgtttttaccaatctcaactatgccatgacgtgaaccaatagttacatgaccttcaatataagttccttcacctataaacacacgcccttggatattacagtaagggccaatttctacgccgtcagccagaactacatctgacgatagaacgctggttggatgaactttcataattacttttctttatctaccgctttaatcacatcttctgttaagtcagaatcagctgtagaaaataatacgatttgagcgttcggattactttgaagaaccatagagaatcctttatctttagcgattttttcaatcactgtgcgcatttttttaacgattggttctagcaaatcagattctttcttttgtaattcaccttgtgctttagcagctaactggttgaatttttgcatttcttcttgcaactcttgcgcacgttttgtgaatgcttcttctgttaagaccgcacgcttcttttcgatatcttcacgcattttatcgatatctgtttttcttttttcaagatccttgttacgcttatccgcttctttcttcatctcatctttagcttttttgccgatgctagattgctcaatcgctctttgtacatcaacatagccaattttagcatcagcagaagccaagcttgcgcccaatgtgatcaataaaactgataataatgttttcatagttgttactccttttattattaaatttagaatggtgggccgatcgaaaactcaaagtttaccgcgtcacggtccatatcatctgattgtaatggccatccccactcaaagcgtagaagccctaacggagactgccatctaaagccgataccaaagtcacttacaaatttatcagagacaatagcatcatctgcctgccccatatcatagaagaatacaccatttaatcccgcctctttgatcaacgggaattgaagctctgtttggaaaatcaattgttgcgtaccaccgaagatcaagttggaacgtttttcacgatcactttgactgatccctggtgtgtagaaaggatttccatcatttgtaactaactgattatatctgagctgagaaaaaatacggcgaccaacagtgttcgagccaaaacctctaagagaataagcaccacctaattgatagcgcttagtaaatggcaactcttcatcgttcaatgactgcaacaagctgaaagcgatgttatttctccaaacaacatccataaagacatttttgaaaaacttaaacgaggcatagctctcttgatatttaaggtctccacctacacctgcatactcgtatgacaatgtcgcaagaataccattagatggactgaagcggtcatcacgcgtgtcgtactctaacgttcccgtcaacgaactcgccacaccacgggctgtctctaacgggaaaagaagtggatctgtataatcattttcgaatagagctgtcttttcaattttataaccaacataagcgcgtagattatcattccagatcggatgaccaaatcgtaacgaagcacctgtctgacgattgtcgtagttgattctttctttgttttcgacatagaagattgtgaatcccgaagaccattttgtgtcgtacagatacggctcggttaaactgaccgagtaatcttgacgattctttgtcgcttcaatacgtgcaccaagcgtctgtcccaatccgcggaagttattctgttgaaccgatccacctaggcttaaaccttgaacgttaccataacccgccgtcaattgaagctgtcctgtattacgctctttcagcataatatcaatgttcatttgatctggtttatctggaggagtgcttgttttaaagttaacttcctcaaagaatcctaaacgcttgatgttttctaaagactggcgacgtcttgtttcattgtaaagctcgccctcgaaaattttcaattcacgacgaacaactttgtcgcgagttttcgagttattcaccacattgaatgtaccaaaataaactttattgcctttttcaaattcgaaaactaaatccacgatgcggtcacgatcgttgaaatcgtaaacgggaataacgttggtgaaagcatatccttcatcaccgtatttagcttgtaagtcagcgatatctttctgcatgacctctaaagagaaaacaccattgtccttaatttttacagactgggataattcttccttactgaataataaatccccggtgaaatccacctgtccgatagagtactgttcaccctcttcaatgtggtatgtcacatagattgattttttatcgggagtcactgttactaaaggacgatccacttttactttgatgtacccttcgttccagtacatatatttcaaagccatcaaatcacgttcaaaggcctcttgtctgtaggaaccagaaccactgagtccagtaaagaagcccgcttcttgaatagcaaggcgggatttcaaataagaatcttttagtttttcgttaccgatgaaagtaattttttgaactttaactttatcattttcttgaatattgaacttaagacgaacactttcgccagccactaattcttcaacagaagaactgatcttgaccagataaaagcctttttcttcatagtacttttcaagcttgatgatagagtccgcaattttactgtgattcaatatctcgtagggcttgattgatatctgcgattcaagatcttcagatttcacatctgaatttccctcgaatacgatttcagtaacagaggccttttcaataattttgtattccagatgcaagccatccgattgagcctctttcaaaacttcgatttgcacgaagaagcccattttaaaaacttctttgatatcctcagcaatattttgttctgaatacacatcacccgtttttgtaatcaaacgagccaaaaccgcttcggcttcaatttttttatttcctgtgatctcgatacttttaactacacccgaaactggcttagctgttttattttttgcttcactttgcgcgtacgaaaatgaggacgtaaaagcccatatcaaaaaatggaaaaggatcaaaaagcttaatttttttaataacttattatgcacaacagcccaaggctagcgagggtactggaccttgtcaaagtacgttcattttcgattacgcaagtcgtccatctttgactttaaagacacgtggaaatttttcggcaaatgccatgtcatgagtcaccacaattagagttaaacccaattgatctcggagctgaaaaaaaagatcctgaattttacgcgagttttcagaatctaagttccccgtgggctcatcagcaaacaaaacttcaggttttttgattaaagcacgtgcaatagccactctctgtaactcaccaccgcttaactggtgtggaaaatgctcggctcgatcacccaatcccataaactcaagccactttaaagcttcggcacggctcgaactcgtgtcatcacctgctataagtgagggcaacatgatgttctctagtgctgtcatctcttggatcaagtgatggaactgaaaaacgaagcccattttttggttacgaaataaggataatttttcatcatttaaagcaaagacatcatcaccacgatacaaaacctgccctgaggttggtcgatctaaagttcccatgatttgcagcaacgtcgatttaccagctccggaagctcctaaaagacaaacagcttcacccgcattaatgccaaagctcacatctttcaaaacttccaactctgaagaacctgtcacatagttcttcactacatttttaacttcaatcatacaggcacttgaatcattaaccatttttcaacccctcaactacttgtaactgacttcctttgtatgcagggaaataagttgcaatcaaacatataacctgtgtggccaagaaaataactgcaagatcaataaaccgcacttccgtatatattttatcaatacgatagacagatccagaaatcagcgagtaatgatcttgtaaatacatgaaagcaaaacagagatcatagccaatcacaattccaataatcgtccccatcaagccgacaatcactccctgactcatgaaaatcaacctgacttgacgctgactgaggccaagagttttcaaaatagcaatgtcagaatatctttgacgaataaatacataaagcgtgctcgagatattaaacgccgccacaatgacgatcagtaacaccacaaagaaaataacagcccgctcaatcaccacagcctcaaagacatttcggttcacatcgtaccacgtcatcaccgaaaaattgggacctaagctctctagcagacgcgatcccgcttgcggagcatcgtctctattttccagcttaacaaagactccggtataacgatcgccgatttcagttagcgcctgtaacgccgacagattgctcaaaaccagtcgctcgttccaatcattttttccaaaatccactaccgccgaaactgtaaattcttttgattgtcttctaaaagccgttgtctcgaatggtgttgctaaaggtacgactaaataaattttatcgtcaattttcaaatcgtatttcttagctaagcccgcaccgacagcaatatgatccgcctctaattttagttgtccctgcttgacccgcttctctagatttagaactccgcccatggccgccgcatcgataccctgtagtaagactccagaaacctgtccttttctggccagcacagcttcggcgtaagcaaatctcatcatcgaaacaacgcgtggttcactttctttaatcttttgtgaaaaactgttccagtcatctactagacgtccacgacgcacaacctgcaaatcgccggtcacatcggtcatcgccattttgagtgtttctacatagccactcatcaccgccatagacgcaactaaggccgctacacctaaaactaatcccaaaaatgaaagtggtgctgaacccccaaaaaggacttttcttgaaaaaagtagttttgaagctatccagaagttcaacttcattctaaatcacccgcatcagtgttttgtcccagtgttcccgctaactgagctttcaaataagacatgatgtactcgtctaactctccgtccataaccgcattcacttgattcgtctggaatgcagttctatggtcttttaccatctgatagggatgcatcacataagatcgaatttgcgacccccactcgttggcttttttctgagagttcatttcatctttttctttattttttctttcgatctctttttcatacaaagccgctttcaacatcttcatggctttatcacgattttgtatttgtgatctttgtgtctgtgatgacaccacgataccagatggtttatggcgcatacgcacagccgaatctgttttattaacgtgctgtccaccggccccgctagatctgtaagtttcgacttcgatatcatccggcctaatatcaatctgaatatcatcatcgacttctgcccacacaaatacagaggcaaacgatgtatggcgacgagcattcgagtcaaacggagagatacgcaccaagcggtgaactcctgactctgcttttaaataaccataggcatattcacccgaaatcaaaagtgtacaggatttaatccccgcctcttccccttcggtcatatctaaaatttcacatttataaccatgcttatctgcatagcgagtgtacatacgtagtaacatcgaagcccagtcacaactttcagttccaccggcacccgagttaatagaaagatacgcgctgtttgcatcgagctcaccactcaatacacgttgcaactcaagggcctctccggtcttttgaatttgttccaattcatgtttgacctcttgaaacgttccctcgtcctgcgcttccacggccatttcaagaagaaccgttacatcttcgatgcgagaattaaaagcactccattcgccgatggctctttccagaatcgcacgctctttatttattttttgcatttcctgaggtttaccccagatggcgggattttccgccgacatattgagttcttctaggcgtttctttttgcgatcgaggtcaaagatacccccgaaggtccgccgaaacttgttccagctctacgatctcttttttaacttctgataattcagcaatgagtgacatggggtaagtgtggcggtttctattcggtgggtcaatttttttgttccgttattgtttcctaaaaaatcattgaaataaaaaaagaaggggccgtagccccctcttcaattttgtgcgcatactgagcctttgacagctcagtagcacttgttactgattggctcacagattcccaactacaaacaaaacagtaacaaatgtagttgaaattattttgggaaagtagtcaactataaactcaaaaaaatttaggggaccttttatgaaatacactcttggtttagatgtaggcactaattctattggttgggccgttctcgaattgaatacaaatggagagcctcaaagaattgaaaagctcggtagccgaattttcacagatggacgccatccgaaagatggaacaacattagcttcgaaaagacgtcaaaaacgtcatgaacgcagacgacgtgatagattacatcaaagaaaaaaattagttctcaatcaattagttagcatgggtctctttcctcaaagtgaacaagaacaacaggacttaaagtctttagatgttctgactctacgggccaacggagtatcaaagcaactttccgcgtacgaactcggacgcgtattttattatttaaatttaaaaagagggtttaaatctaatcgcaaaggcggctccgaagaagacaaagccaataaaatatcagaacgtatcaaaaagctacaagaacagttaaaagagaatgactttaaaactgtcggccaatatttacatgaccgatatataaaaggtttatctactaaagccactatcgaaaatgactttcatttattgcgtcagttgatagaggatgaatttgactttatcgttgaaacccaaagtaaattttttcccgagatctccgacgaacaatggaatactctaagaaatagaatgttccatcaaagacctctgaagccagtagaaaccggaacgtgctctttattcgaggacaaaaaaagaacctataagtatatgccttcttttgaagagtatcgtttcttaacagagctttttaatctgagctatcaagatgagaactttcattctcattctttaagttccgaacaaatttttaaagttttccatgagctgaaaaacaccagagaagcgacttacacaaaaatcaaaaaacttctaaaactcccatctgatttaagcttttctatagaaagatctaaatcaaaagataaaattaaaatttcgactacaaaccacttcttcagcaaatctttactgtttgccgaggagtgggcttctctagatttaaaactcaaagatgaagttgctgaaatctacttctctgacatgtctgtggaagaaattaagaaaggacttctgcaacttaaaatagactctgaaataatcgaaaacttattagaagaaaaagttcctaatgttcaagaggccacctgttcatattctaaagaagccttgcagaaaatcgtttctcttatcttagaagaggaacgccacccaactttaattgttgacgatttatttaaaaatgaaaaagaagagacttccttaatagacagacttgattattacggcgccagcatccccgactctatgcagccaattccccaacatattaaagacaacaacctaactctaaatgaagacgagaaacgctatggtaaaatagctaatcctacagtacatgcagcacttaaccaaatcaggcaggttgtaaatgacttgattgagcaatatggaaaacccaccaatattcatattgagttcgcccgtgatttaaaaaagtctaaagaggaacgtgattttgacaaccgtaagaaaaaaaagaatgaggaactgaacgaacaggttcgggactttattgaaaaacataatcaaaagcctagcgcttttaattttgaacgagtcaagctgtggtttgaactagatgctatgaacaatcaagtttgtgcttattcaggcaaaacgatttcagctcggatggttctttctgatgaagtacaggtggatcatattttacctttttcacgaactcttgatgatagccttgccaataaagtcttggtattagcttcagaaaacgtgaaaaaacgtaatcgcaccccttatgaggctttcgggcaagatactgaaaaatgggcgtcaattcaagaactcgcaaaaagactaccctaccataaacaatggagatttgctgaggacgctattaaaaaatttgaagaaaaggatcagtttttacaacgtcacctaaatgacactcgttacatatctaaaattgcgaaaaaatacctaggctccataactgatccttacaagattgttgccagccgtgggcaaatgacaagtatcattcggggaaaacttggactcaatcagttcattcaaaagccggatggtactaaaaatcgtgaagaccatcgccatcacgctatcgacgccctaactgtagccctaacttcccgcagttaccttaaacgtatttccgatgcttccgcacgcaatcaagacccgaatagaatacctattccagagccttggaaaggtttcatcaaagatgctgatgtaaagtttaatgagatcattgtttctcacaaggtagatcatgggaaaaatgggccgtttatggaggagacttgttttggattgattaaaaatccaaataaatatgaggaagagaacgatttcaaacttatcacaaccaaatctcttgattcagttaaagatccatccacaatacgaagtcaatctttacagaatctcgcagaaaaaagtggcgtaatctctcttgcaaaaagcggggttaaaaaactaagagtctatgatgttacaaaagaaaatcctgccgatattggtctaattgaaagtggtcttgccaagatcactcatggtaaggacaagcagcacgttaaacactatcaaaaaggcgatatcaactatttagctatttggtgtcttccacagaatataacattaaaatcagataatcataaaaagagaaaaacagattacatttttacagcgattaaaacgttcgatcttaactctaagaacccgaatgacttaagaccacacccagcagcgaaattggtaacaaaagtttacaaaggtgacactgttgctcttgaagtaaataatcaattaaattattatattgttaagtcgataagggccgccaataaaaagctatacttccttaaaataaatcaatcatctgaactagcaaatgaaacgcaatttataccagcctatactaaattagttgactataaatttcgaaaagtatcagtttctccaactggagtcattaccgataatggaccccttctaaaatgaaaaaccacgttttagagtttctttctccaggtttaaaaattaccaaatcgagaggccatttagttgtattgtcatccaaaggtgagtccgaaatacctttggatgacatattcacagctttgatcctttcggaagatgtactgattagcaccaatgttgtgacctcgatgatagaacgaaatattcctattatcttctgtgacagcaaatacactccccttgccagtatgctcggatatcaaggtcattcgcttacacaaaaacgtcaagccgcccagatatcactttcagatattcaaaagggacgactttggcaaaaagccgtcaaacaaaagatttggcaacaacatcagcttcttaagcacttaaaaaaagaacagatacttatggataaattcttccatgaggttgaaatacatgatgaaacaaacctagaagcacaagcggcacgcctttactggaaaacactctttggagacaacttcagacgcgaccccgtattatctggaaccaattcatttttaaattacggctatgcaattcttagaagtgctgtcgcccgctctgtcgcgtctagcggcctaaaccccacgattggtattcaccacagcaactttgaaaatcccttctgcctagttgatgatttgatggaaccattccgcccccttgttgatagctactgttatacacttcaagatgaatctgatctaagcccacaaaataaaagaaagctttcgattattctagaacacgaagttatttatagaaatgagaagaaacctctaagctctgccattcacgagtactgtcactctttcaccaatgcgattctaaatgcagattataagttatttgatacatccataaatttaaacttttatgcaatatagtgggtatagacttttgtggttacaggtgctttttgacttaccggtagtaaataaagaacaaagaaaaagggccagcgactttcgcaataatttgcttgatctgggtttttccatggcgcaattctctgtttatatgcgtcattgcaaagggcgtgaagaagctgaaaccttcatcaaaaagatcgaaaaatacatgcccgatcaaggaactgttcatatgttagtcatcacagataagcaatatgagagcataaaaaccttttattgtggcaccaaaagccgtttaaaaagccccgatcaactcttacttttctaattttttaggtatttttcaaccccacaaaaacccataaacccttttattatcaagggtttatggggcgtgaagaataacagatgggaatctgtgagccaatcagaacgctccataccaacgatgcgcagccccctctagaataacagatgggaatctgtgagccaatcagaactatgaccgcctgcaaccaatgcggacaaatagaataacagatgggaatctgtgagccaatcagaacatttactgtctgtgcaataaatacataaaaagaataacagatgggaatctgtgagccaatcagaacattatcgtcagccaaaaacattactttatcagaataacagatgggaatctgtgagccaatcagaacgatccttgcttgcgagggttgcgactagggagaataacagatgggaatctgtgagccaatcagaactgttagccttcgcacgattcgcgtaataaaagaataacagatgggaatctgtgagccaatcagaacgtaatcagatttgtttaaacgtcctacttagaataacagatgggaatctgtgagccaatcagaacatgaaaaattttatccaaccaggcaagacaagaataacagatgggaatctgtgagccaatcagaacatgcaatctcctttgtaaaatttaaataagagaataacagatgggaatctgtgagccaatcagaactgtcgcaccattttcaactgtgttgatcgaagaataacagatgggaatctgtgagccaatcagaaccttcagttagcgatactggctcgatcgctgagaataacagatgggaatctgtgagccaatcagaactattactctggcatatattatgcctgagccagaataacagatgggaatctgtgagccaatcagaactcttggcggcatcggtgttttcatcaaggcagaataacagatgggaatctgtgagccaatcagaactgctcatcgttttatgtatttattgtcaatagaataacagatgggaatctgtgagccaatcagaactgctggcatagatcgaagaccgacactcgaagaataacagatgggaatctgtgagccaatcagaacgaaaactctttgatcgcgtcgtccatcttcagaataacagatgggaatctgtgagccaatcagaactaaaaggagaattctatgattaaaacgaaagaataacagatgggaatctgtgagccaatcagaactgaggtggttcaaactgctgaaggcgaaaaagaataacagatgggaatctgtgagccaatcagaactctggcttgagttcattttgatgaagcgctagaataacagatgggaatctgtgagccaatcagaacgtagaaagtactttcctgatgggatagatgagaataacagatgggaatctgtgagccaatcagaactgttaaactcttctgttttttcaaaatactagaataacagatgggaatctgtgagccaatcagaacacagaaaacttcttgctaagctgaatgtttagaataacagatgggaatctgtgagccaatcagaacgggctagcttgccgccgtaatactcgcaatagaataacagatgggaatctgtgagccaatcagaactgtcacggattgcatataaattttttttcaagaataacagatgggaatctgtgagccaatcagaactgtcttcgccctctggcgtgtaaacgtctgagaataacagatgggaatctgtgagccaatcagaaccaattatctatcattaatcacataattaacagaataacagatgggaatctgtgagccaatcagaactgtactaatttttttaaactgtagcgagctagaataacagatgggaatctgtgagccaatcagaacgcatataacctttcactcaagtcgatttttagaataacagatgggaatctgtgagccaatcagaactgaattacgacgagacttctttgaaaatggagaataacagatgggaatctgtgagccaatcagaacaagggattgcaggcgataccgctaaaggccagaataacagatgggaatctgtgagccaatcagaacgtatgcaacaaccacaaccagctaaaagtcagaataacagatgggaatctgtgagccaatcagaactggcttgtcttatttaggacaacgagaaacagaataacagatgggaatctgtgagccaatcagaaccggtcatcagagggtaagaagttctggtggagaataacagatgggaatctgtgagccaatcagaacatgttacttttaagcaagcggcttgcacaaagaataacagatgggaatctgtgagccaatcagaacctcacttaggtgaacaacctgtgtataattagaataacagatgggaatctgtgagccaatcagaaccgacacggctgctcttggtaactcgcgcaaagaataacagatgggaatctgtgagccaatcagaacatccattcaagaaccacgtctcaccttttaagaataacagatgggaatctgtgagccaatcagaactaaatggccggggccatcgattctgtgcaagaataacagatgggaatctgtgagccaatcagaactggcttataaacgccaaggctaaaggtccaaagaataacagatgggaatctgtgagccaatcagaacttgtggaggtgagatatgaagccaatctaaagaataacagatgggaatctgtgagccaatcagaacaagggcgggtttattacaattttaagctggagaataacagatgggaatctgtgagccaatcagaacctttgatgtatgttttcacggagactccttagaataacagatgggaatctgtgagccaatcagaacaaaaatactttttttgtgtttgggaatcaagaataacagatgggaatctgtgagccaatcagaacgacaaaatgtttggaccattggaccggcgcagaataacagatgggaatctgtgagccaatcagaacagcaacatattcatcaccctcgagacggccagaataacagatgggaatctgtgagccaatcagaaccggcggtgtaatgagctttgtaagcccattagaataacagatgggaatctgtgagccaatcagaacctcattatgtcctgtatttctttttcctctagaataacagatgggaatctgtgagccaatcagaactcagccacatcagagaggcgatctctgttgagaataacagatgggaatctgtgagccaatcagaacagtagatcgagcatctcgtgaccctctaagagaataacagatgggaatctgtgagccaatcagaaccgccgcatgatgcacattctttttccatatagaataacagatgggaatctgtgagccaatcagaactacccctagattagacctctctggtctctcagaataacagatgggaatctgtgagccaatcagaacggaaactaagtaggcttacaaaaaaagtcaagaataacagatgggaatctgtgagccaatcagaacatctgatgatctaatagtttagcgagctcgagaataacagatgggaatctgtgagccaatcagaacgcaagcggctcgctgattcgcttgagaagcagaataacagatgggaatctgtgagccaatcagaacagagaacgccaaagccatctgtgcctatttagaataacagatgggaatctgtgagccaatcagaaccagatccaaatcaggatgatccgtgatctcagaataacagatgggaatctgtgagccaatcagaactaactttcgtcccctcaaaaacggaaccgtagaataacagatgggaatctgtgagccaatcagaactggcggtattttttgccatgttcaatataagaataacagatgggaatctgtgagccaatcagaactatttaaaagaaacgggccagaagatcacgagaataacagatgggaatctgtgagccaatcagaacacatctctaaaccctttaatactgcgatcaagaataacagatgggaatctgtgagccaatcagaacgttttcattttgactgattttgcaacagctagaataacagatgggaatctgtgagccaatcagaacttggaactggcatatagttgaattgtgtaaagaataacagatgggaatctgtgagccaatcagaactgagtgaaactttcaacatggtcgcagcagagaataacagatgggaatctgtgagccaatcagaactttcgctcaatgattctttttaaatgcttagaataacagatgggaatctgtgagccaatcagaactttcgctcaatgattctttttaaatgcttagaataacagatgggaatctgtgagccaatcagaacctacggctgtgacaactgtcttcattgacgagaataacagatgggaatctgtgagccaatcagaacacaaccttgtcgatgttcgctgaaatttgtagaataacagatgggaatctgtgagccaatcagaactgatgtattgcaaatgttttactgagtttgagaataacagatgggaatctgtgagccaatcagaacgtttaacccccgatcccccgacccttgcaaagaataacagatgggaatctgtgagccaatcagaactgaaaccatgaacaccgtcgctaccgacgaagaataacagatgggaatctgtgagccaatcagaactccaaagtattcatacagttcatcaatgaaagaataacagatgggaatctgtgagccaatcagaactgtggaccaaggaaaaaaacaaatacaacaagaataacagatgggaatctgtgagccaatcagaacagaggcggagaagattactttagattaacagatttaatttcttattccacttcactgcggaatagactctattaggtctattaacacatagacagagtcagctttcaactctcacctcagtaatatttacaacaaaacatatatatatttaccgccatcggccttttagaataaaaagattgaggaggatctatgtctataaaaagaagtatctcttttatcactacgatgtttataagtcttttttcatttgctcataattataaggctaaagagccctcttcatctttagttcaaaagcttcaatccgaaaacttaatccaaactctaaatattacggaatctagtgaaccagcgaactgtataggaactttgactgattgatactgataaagccctcatactgcttagttgtatttgtaactttgatcactcttataactgcttcaactacaaggactcttcatatgtcgtactctctccgtgtcgcagtcaatctagataatcttaagcttcctgttgatcccattcaaaatacaactttaacaaacgcattttttacaaatcatctttaccgtggcctcataaatgaaggtttagatggacagcttcatccagacctttgcactttctatgaatggagcgaggatgaattcatttgtcattttgaagataatactacagtgacagccaatgatgctctgataagccttcaccgctctatacttcatcaacagaacgatcatgcaaatattaaatatcttctttgttcctctgaagaaaactccaacagttgtcttcagaaaatatttgttcgcaaaaaccaactaataatcaagatatccgaggagcagaagaaacctctgctcctgtctcttttatcctcaataaacttcaaaatcatcccagccaaagctcttgaccaagcagtgccgctttctgagtctaaaataatagactattcaataacgtctggatattaccatatcaaaaataatgatttcagtcgtctgcatgccaacgcgaaattatatcaacaccaccctcaagcaccagatactattgaaatcatcaattcaaactctcatacggtggaatcgttacttgcagaaaataaaattgatatcatcagctcgacagttccattaactgcagatattgacatgtctcttcgtaataaaaactggagtaaacttgaaacatatcctattagcgtaggactggtcgttttttccgataaagcggcacaagagtcacagattagcgaacgtttttttgtagcaaaaaaaatctctgatgaagttaataaacttcagatatatggagcccaaaaaactgacgaatttattcagttttttgggcagggctaccttacaaaagaacaacaagagaacgtacgaataaaccgtttacaatcgacctctgtacctcagtacgtatttactttaggcgtatctaatcctcaaaagtgggaacatttaaaacaagatataccaaatctaaagattgaaaaacataatccaaatagtatattaaatggcgttaaaagatcccctgacattatgctcctgacaaatgatgttagttttgacaatagtttctctttttttgcttttgcagttaaacatggacttttagttgcaaagaataaaaaaactgaacaattgctattagaattcactcttcagcgtaattcagctgaacaagctcaatatatcaaccaactccactatgaatcgctcttggcagcaaaagtagttcctatttttgctgccccctacacaaccgccatgtctcacaacattaaaggagacatctcaaaatataattcacgcactttggtatggaacttcaaaaaaaattaaacacatccatttataacttaaccaagcggaatgtgttaaaagtctcaaaaattatttggccgcaagactttcacaatcttatttatgattaccatgtagatctctcgatagattctttcaaaacaactggaagaggaactgcaacaaatgctgataaggcccttcaaatcgccttcgctgaagcatatgagcgcttaatcattttagaaaataacataccttctagcaatggatgtgctgtcttcacagatattttaactgctcaagaaaaagccttgtgtgagcttcaagaacgagacttctttcttcttaattatcatggcggatttttaaaaagctttcgttgctttgacttggaagagccatttgacagatttcatagaaaagaaaatattagctgccgaatatttcaaaacgatctcgctaacaaagtcttcagtctctgtttcttacaactagagagtatgtgctttataggcatggggctacatatctcaaaataccaagcggcattaacctcacatatagaagcttttagacaattattatattttaagaataggcgtatttctacgccaacaacaatagatcaattttctcaaataaaaaaatattcttacaacgagcatgggaacttattattcgatccgaaattttctgatttttttaaaaattttatatttcaattttcaggaaaatgggtctatgaagatacaagtagcacaacatcttttgtcgaatacaaatctcacgtcttaaaagacatacctcttgtctttgtacgggccagtaatcccaatatgctcgatctttatcgtggttttcctgacattgataaaatctataaacgtcttaagatctcatcctctttgttaaattctattaacacattcccccatcctattagatgaaaaaatatatttttcttttaatatcacttactgttttttctacgctgatacaggtagctctctttttcaatcttacaaatcaaactaacataattagcaactctatccttccattattgcaacgacaagattatgcaaatcttaagatcatcatgacacctttactgagtatttcagtaaagaaaatgtcaattttctcaaacgctcatctgatttttgaagtaagttctaaaaagaaatcctatgatctactaacctttaacagaattatagagagtaataatcaatcttataaaatagttgttgtgtacaagaattctcttttagctcaatatctactaataggtcttctaatgggagctcttatattttttatttaccgttctctcatgagaaacattgaatttaaaattgagttggcaaatctgatgcaagcggttgctcatgatattcgttcgccactctctacgttaaaacttataactagcaaaataaaccagcaagagattcagaaaattcaaatcgatacgattaatcgaattgaagatatagcaaatcagctactactttatactcgacccagtaaaaaagaaacctctgcaaatgcccctctctctttaccactcactactcctccaacgacagacaatattctgaatatctttgaacgtttacaaaaagaatatgtaattcgaaatatatctttaaaaaacaaagctcaattcagcaccgaatcagatcttcaaaatttttccatcacaaatacggcggcattattcctatacagatctattaataactgtgttcagaactctcaagaggcatcgcaaaatgacgatctcgttcaaattcatttttctgtaataaacaaccatctgcaggtgaccatcacagatcatggccgcggaatcccacctcatatactgaaagttctaggggaaaagcctctatcttttggaaaaactaactcagaaaatacatattcaggtcatggtatagctctctacacaatgcaccaagaagctcaccgaataggcgcttcaatacgcataatctcaaatttaggtgaaggaactcaagtcttaattattatacctataagttaagtactattagattgaatattacttctaaataatctacttatttcctcaaaacatctatct

SEQ ID NO: 4014 - DNA, 15179 bp, synthetic construct
  source 1..15179: mol_type = other DNA
  misc_feature 1..15179: note = Synthetic
attgctgatttgggaccagagggtggtgaaggtggtggaatcattgttggacaaggaactccagaggaattggtgaaaatcaaagccagtcataccggcagattcctcaaagcggagttgctggccaagaaatcttgaacgggagattaactttaattgacatacaaaaaaacgagcagaagcaattctgctttttttttgcgtcatgaaaagatttttatccctttcgctcgcgttgtctttgaccgctggagcctttgcgcaaaactttccatatttgattcaagcctttcaagagccctatcagcctttggaaagtccaatcgatatcaccaatggtgaattgtgggacgatcccgaatggatggtatatccgccatttccaatttactacatggaagacacattgactgaatttatggtgtctgcaccaggtaatcaagtctctcaaaatttcaataccgattccatcgtggatctattgatcccgtatatggcggatttgatgaacgcttcgccagatgcgatggtcagtccagtaggatacgaaattgcgggaactgcccccaatcgcatttttaaaatggaatggaccaatgccggtttttatgatgaatacgatttaacgggcgcttttggaaatttaatcaccttccaattgtggttttatgagaccaccggaagtttccgcgtgcattttgggccaaataccatcaaatcagcagatgcataccaaatatttggtaaacctaccctgctgtttgccaagaacctcaattttatgtcagcggattttgccaatgatggattttggtctttggctggagatccaaccaatccgaccattaatgcgattcctcaatttactggttttttaggaacgaatgagctattgaattcagatcccgttgatggtcaagtctattacttctacacccaagataacgtgggaatcatggagcaagccgccactgaaatgatggcttatcccaaccctgcgcaggattacgtctatatccagactcatcaagatgatttgatttccatttatgacttgagcggcaaattggtattaacagccgccattaaaaaaggaacccaacctgtttccatttcggatttggctgaaggaatatatattttgaaatcgcagtccaatcccatggtggctaagcgaattgtgaagcgataaacgcggtttaattgttgcaatccctcaatgtcagccaagctgccgttgagggatttttgttgttatattcgcaactatgacaaaacctacacgcctgtttgacttcgcttttcagcaattggaaactcatccattgcaagcgatgatcaaaaccaaaatgggagatggatggaaatccatttccacacaggagttcgtccaccaatccgaagctttggcaaaaggtctgttgaatttgcaagtgaatccaggtgataaaattgccatgatcacttcctacaaccgacaggagtggaatgtaaccgatagtgctattttacaaattggtgcggtcaacgtgccaatctatccgaccatgacggaaacggattacgagtacatcttaaatcactctgaagccagaatgatttttgtttctgacattgcactttatcagaaggtaaagagtatctactccaatttgcaatttcagccacagatcttctcatttgaagaagtggaaggtgtgccgctttggaccacgttgatgaccgatagcgatgatcaattgcctgaattgaaacatcgcaggtccaatgttaaaaccgacgatttggccaccatcatttatacctcaggtacaaccggattgcccaagggggtaatgttaagtcatcaaaatatcgtttctacagtattggttagtgaacctcgtttgcctctattggagactggggtttctgtaggattaagttttctaccggtatgtcatatttacgagcgcatgttgcattacttgtattttcacaagtgcatcactgtgtgtatgaccaacatggaggccattaaagacgacttgaatgctgtccatccgcatatctttagtgcagttcctcgcttattggaaaaagtttttgatggtgttgttcaaaagggattggccaatacaggaataaaaaaagttttgttccagtgggcccttgatttaacccaagaatgggagtatactgggaagtcagcatggtatcatattaaattaagtgttgctcgaaaattggtatttagtaaagtgaaggccgcattgggattgacagagattagagcgatagctagcggaagtgctgcattgcaaccccgtttggctcgctttttcaatgccgcgggaattgtggtcttggaaggttatggattaacagaaacctcacctgtggtttcagtcaatacagtaagaggtgaagacatgctccgcatcggtagcgtcggaaaattggtggagggtgtcaaggtgaagatgttggaagatggagagattttggtgcaaggacccaatgtgatgttgggttattacaagcaacctgaactcaccgcggaggtgatcaaggacggttggttttacacgggggatattggaattttccaagatggatttttaatcattaccgatcgtaaaaaggaaatgtttaagaccagtggtggtaagtatgttgcgccccaagttttggaaaatgccttgaaagaatccctgtttattgagcagtgtatggtcattggagaaaaccaaaaattcccaggtgctttggtggttcccgatcgtttggctctggcagaaattgcaagacaaaaaggaattgcccaagaccaaggtggcgagtggttgcaccacgaaaccatcaaggaattgatttggcaggacatcctaaagatcaatgttcgctttggtaaatgggagcaagtaaaatcgtttcagattgtgcaagaaccgttttctattcacaaaggggagattacgccaaccttgaaattgaagcgcaagcgcatcatggaaaattacaaattgttgatagagaaaatgttcagtcattgattgagcattttcttttttgaattatagactcaccattttgggcttcgatcaatccattataattgccattcacaaattgcatgcacccgccatggattcattgatgtggtgggtgagtcagcgcgattcgagtatcattctttatttgcttttgctttttttattgatgcgccgttttcagctgtcgatgtggaaagtgcttttgatgttggctatattgattgctttcaatgaccaaatggcttcatcggtatttaaaccgatggttgggagattgcgcccaagtcacgatgcggaggttctgccatatttgcatttgctaaaagatgcggcaggcaatatttaccgagggggtagctttggtttttattccagtcatgccgccaacaccatgaccgttgcggttttccttattttaatcatgcgaccccttcatcgtttttggtcgattatattatttacgtgggtgattttggttggcttttccagattgtacttgggtgtgcattatttgacagatgtccttatgggctgggccataggagccctatcggcttttgcactttggcgtctaatgaaacgcgattattttagaaaatggcatcgtttggatttgaattaatccaatcccaattcagttgacggatcccaaaagtgttgatcaaagttttgaatttgatcgttgattaccacgatgccttctgcacgcaatcgctcggccatctcatctggaccagagaaatgcatctttcctgtcagtaatccgtttctattgactacccggtgtgcaggcagattcttgtcacaaaggttcatggcgtatccaacgattcgagcgcctttgggttttcctaaagcgatggcgattgcaccataggacgtcactcgcccttcaggaatgtgcttcaccaattcgtaaatatcattgtaaaagtcgttcataagactgctcaaatgtagtgttttccttcgtaatttgccgactgaaatggagaacgtaaaaacacatttggtcaccggtggatgcggttttgtaggtcgcaacatggtgaagcgattattgaatactacccaagatcaagtggtatttattgacaatttgatggtgggtacccatcccgatacttggatgacttttgagagtgcagtaaggggcgaagattttgtgatttacgattctcgggctttgtttattcatgatgatgcattgaaggtgatgcgcaggttgatggacaacccagaccatttttctgaggattatccttttgatgtagatcgaattgcggatgtatttcattttgcagcgattgtgggaggtcgtgccaagattgatggtgatcccatgatggtggctttggatttggccattgatgcggagatgttttattgggccgtgaattacaaaccagagcgtttgttgtatccgagctcttcagcagcttatccagtagatctccaaacagtggatggcgctattgctttaaaagaaagtgatatcgactttaagcgaatgggcgagcctgatatgacctatggatggagcaaattaacgggagagtttttggcgaaaattgcggcctcacattacggtttgaaagtgacttgtattcgtccttttagtggttatggggaagatcaagatttaacctatcccgtacctgcgattgctgcacgcgccgccaagaaggaagatccttttgaagtgtggggcagcggtcaccagggtcgcgattttgtgcatatcgatgacgtcattgattgtattcttttggcgatggatcacattcacgatggaacagccatcaatatcgggatgggcaaactgacttcgtttcgtgagattatcgaagtgttttgcaaatttgccggttacgaacccaccattaggccattgttggacaaacccgtgggtgttcactctcgctattgtgatatgacgtttgttcatgaaaaattaggctggaaagccaagattagtatcgaggaaggcatgcgtcgcgtgtacgatgcggcggttaaacaattgaattcatgaagaaagaggtcgtggtgtgttttggtcccgggcctttgttcaaaggagggattcagaattacaacacctcattggctttggcgctggatcgaagagaagattgtgaagtgcacatcgtctcttggacgcaacaatatccagccatcattccgagagagtttgtcgataaatcaagcaagtcggatttgttatcgggaagcaatgtgcaagtgcattatgtcaccaattacaacaatcccctcacttggcgtgagacggtgcagaaaataaaatcattgagtgccagcaaagtcattatccaatggagcatcgctttgcaaggattgccattgtatttcattgccaagggattaaagaaagccaaaattgaagtgatttttgacgtgcattttgtacagcaaaaagagcattcttccattgataaattactgacgaaatgggctttgggaaaggcaaataccattttagtacatgctttgaaaacgtatgaagaattgaggagtgtttttcccaatcgttcttttcatctgactgaaaccggtgagcgtggagaaaataccgtggtaaaattgtttcaccccatctacgatttattcaagccgcaagcgaatttggatattgaaaaattgaaagaagaatgggggctcaaaaaacatgtctttttgttttttggatttataagacgatacaagggcttggatcaggccattcaggctttcgcaaaagtgaaagcacagcgtgacgatgtcagcttgattattgcgggagaatccttttggaatacattggatcaaagtaaatggagcacgcgtatcaaacaaaccttgtttggatgggccaagcgcatccttttaaataagaaagatgatgaacgtgaagaccaacctttggaatggatttcgaaattgggtttggagaaggattgttatgttgtaaatcgattcattggtaacgaagaggttcctccattcttccaagtgagtgacgcggtattgttgttttacagaacggcaactcccagtggaattgaatccttgagttataatttttcgttgcccttgttggcaaccaaagtgggacattttccagagaccatacaagatggtttcaatggttatttggcccatgatggtgatattgacgacatggcgcgggtcatgctgcagtttttagatcaacccatcaatagggaccacgtaagagagaagaccaagatgatgagttgggaccgttatgcagcggccattatgcattcttcttcgaaatgacagtaggctataccggaaataactatcctgaaaagcgcaacatcatcggtcgcgttgaccaaacccattatgtgaatttgagtagcaaaaattatttcgcttacatcaatcgaatcaatttttggtggaagaattttttcggacggtcattgatggcctccgattattatcagtttcgatccattgcgccgcttggagtggagggcattcatttcttcaacagcgttagctattcaaccaccccttggatcaccacatttgaaacattactgccttattttgaccgcataaagagcgactttaaaaggaatccgcaatgggaacaatggaagcaagatccgcatattgtttgtgccatgcaagccctgtcttctgattcttgcaaaaagattttggcgttgtcgcaacatacaaaaaagattcaagaggaggtccttcgtcatttccctgaatttgaaaaaagcattctgcaaaagttggatgttttgcatccgccacaatcagcggtggagtatcagccaaggactttcaatggcgcatttcaattggtatttgtaggtagggcattttaccgaaagggaggacaagagttggtgcatgccttggatcgcctgcgaaaagaaatccccataaacctcaccatcgtttccagtttggatgccgagaatggatggccgggaatcaacccaaaacagatcgaagaggacaaggcgtggttgaagtcacaacattggattacctatcatgaaaagttggaaaacgatcaggtattgcgtttgtttgaaaaaagtcatttgggttttcttcctacttggcaggacacctatggatacagcgtattggagatgcaatcccgaggatgccctgtaatttccaccggtgtgcgttcacttccagaaattaataaagaggaagtaggatggatcttggcacatgaaatcaatgcatggggcgaatggaaagaaattccaacatcccgagagagcaaagtcagtaatcaattggcatcggagatttatcggcttacaagagagatattacaaaatccacaagccatggaagccaagggaagagcagcggtagagcgaataagaatagagcacaatccggtgacccatgcccaaacattaagtgattactatcagcacttgttcaagaaaaaataacgaacttccccccatggaagatttgtacaaaacacgcaaagagtatgacaagcacttgcttttggaagagcaagctttgaatcatcccattgatcagttgaatttgtggttagaagaagccaaggcccaagtgatttcggattacaatgccatggtggtgagtacggttggagaaggcggttttccgcattcgcgtattgttttgcttcgcgaagctacccatgccggtttggtcttttataccaattatgaaagtgacaaaggcaaggagctgtcgcaaaatgataaagtgggagtcaactttttttggaatgtcttagagcgacaggttcgtgtcaccggtgtagccaagaaaatgagtgcggaagaaagcgatgcctattttgccagtcgaccacgagagagtcaaataggcgcttgggcctcaccccaaagtcagatgttgcatgatcgcagcgagttggaaaacagagtagcagagatgacccaacgatttgcgaatcaagaggtgccgcgcccaccgcattggggcggatacagaatcatcccccattactttgagttttggcaaggacgacccagccgattgcatgatcgattggtgtacaaagtagatgcggattttgaatggtgtaagattcgtttggcaccttgattggagaagaatacttaagcagatagaaacaataatttaaaaagtaagaaatgaaaaagattttaatggcagccatcatgatgatggcgggaattgcgcaagcgcaagagtacaaagtagtcaccattgtagagtccattttgcctggtggaatgggaagatcaagaatggtagaagccactaccagtatagatcacaacaactacaccacagagcgcacagatggcaaggacagcaagcaaggagatattgatcgttctgatttaaagattaacgcatttaaagaaaccaagatgttgaatttcttcagcatggtgggcatcaattttcagaacatcgcgtccaatgatgccatgatcatgtccaagttgaacgagatggatgcgcaaggatatgaattggcttttgtcaccagcggggtagagagcgatgcaggaaaggacgatggtcaggggatttttattacgcggttgtattttaagaagaaggggtagtttttccggagacagatcgtattgtttgtaatagagggcgaatggttattcgcccttttttgattgttgttggggcgaataattattcgcccgttgattgatttttattggggcgagagattattcgcccgttttttttggggagattgggcgagagattattggtccgttggtttgatttttattgggtcgaatggttattcgccagtagtgagttttttcaaggtctagagatacgagaatattcctataatttatgggttttttatgcagatggtgagaatcatttttgcgagatgattcaaaagggaaaattaaaatatcggaaatctcggcgaatgaaagggtatgactattcttggagaggtttgtattttgtgaccatttgtgcaaagagaaggcaaaggcattggggtaaagtggtggatgggagaatgcaattgagcgaattcggtcggtctgcgcatcaatgttggaaggagatgagcatacatttcccgcacgcgagagttttagaatttgttgtcatgccagatcatgttcatggattgatcgaaatttaccgcggtgcctttcccaacagagagaggacaagttggcctcatttcgtaaagtttgagtcaccatcaagaaccattggttctattgttcggggatacaaaataggcgtagtcaagggaatgcgggcttcaggttttgttggtgacgtttggttgcgcgattatgattgtcgaattatattcaatcaatctgatcgtcacagagtgatggcctatattcgaaataatcctaggaaattttggcagcgtagcggcggaaatattatccgtagaggagacgctgagggcgaataattattcgcccgtagggatagcgtagatagttcgtgagattttcagcgtagcggtagagagattattcgcccgcagaggagacgcagagggcgaataattattcgcccgtagggagagcgtggattgtccgtgagattttcagagcagcgttagagagattattcgcccgcagaggagacgcagagggcgaatgattattcgcccgtagggatagcgtagattattcgtgagattttcagcgcagcgatagagagatttctcgcccacagggagagcgataaatttctattgtcaatgaaatttatttgttgttaaaaacaatttggatgaatgattgattctattgtatatatttgatatagttctttaaagcaaaaaaaagcgaggattgctccccgcttcaaatgttttcacaacggtcatagaccttattgtgaattgctgttaattgaggacacgaatatataataaatattttagaatcaaaaaatagatgaaaaaagttttgggattggatttgggagttgcctccatcggttgggctttcatccaggaagatgaaaagaaatcagagattttgggaatgggagttcgcattattcctttgaattccgaagagcgagatgagtttacagcaggtaatgccatttcaaaaaatgcgaagcgtcgaattaagcgtggaatgcgacgaaatatttatcggcgtacgttgcgaaagacattgcttaagcgggctttgtcggaagttgggattgaacctggaaaggaattgtttgaaggattttcaaaaatgaatctttgggaactcagatccaaggccgcgcacgagcaaatctcattggaggagttaggtagagttctatatcatctcaatcaaaagaggggttttaagtccaatcgaaaaactgatggagcagaagaggatcctaaaaaggaatcggagtacaaagcagaaattcgcaagaatgctcaagatttgttggatgctcatatgacaattggtcaatatgtttttaaacagcttcaagaggatcaatatttcaaactaaaaggaagaattttcccaaggcaagcctacgcagacgaatttatggccatttggaattgtcaatcaaaattttatccaagtgtgcttacagaacaattgcgcaagagagttcaggatgaaataatttttcatcagcggccattgaaatcacagaaagcgcttgtaagtcgatgtgaatttgaaaagagatatgcatgggtaaatgacaagaaaatggatgtgtctccgagggtcactcctagaacttcgcctttggctcaatggtcgaaaatttatgaggcagttctcaatttgcgtttcaaagatgaaatgggagttgtagtttcagtcgatctccagaaggcattagcattggccgaggaattgaaatggaaagaaaaaatgactgccaatgatattattaagtttttgggtattcctaaaggggtcacacataacattggggaaaaaggaattcaaggtgatacaacgtttagcaccattgaaaaggctgtgaaaggtatcaagaaagcggatgatttgttggggcgaataaagaaaattgagtttgatatagaattaaaggacaacaaagatttgacgcttgtagatgaggaaacgggagagttatttcattatcaatcaaagactatttcatcacattttgaaaagtccgactattatcgattgtggcatttgttatattctgtcgaaaatgaagaaagccttataaaaaatctgattgaggattttgaatgcacggctgagattgcccagaagttggtgaaattggattttaccaaggctggatatagcaacagaagtgctgctgcgataaaaaagactttgccctatctcatggatggattagattattctaaggcaatggcttgcgctggatacagacattctgattatttggataaaatggaaaatgaggctcgggtgcttttggataaagtgccattgcttcagaagaatagcttacgtcagcctgtggtggagaaggttttgaatcaattgatcaatgtggttaatgcgatcattgaacatccacaatatggaagacctgacgaaattagagttgaattggcgcgtgaattaaagcaaagcaaggaagagcggaaccgtacgtcatccaatatcaccaaacaagaaaagcgtaacaaggatatagaagatagattgcgcagggaatatggatttgtgaaagtgacaaagtcactgattaacaaggttaaaatttatgaggaggttggaggtatttctccttacactggaaaacgaattgctttggcggattttctcaatggtgccggagttgatgtagaacacattattccaaagtcacgtttgttcgatgatagtttgtccaataagacaatggctgaggcatgggtaaataaggccaaaggcaatatgaccgcttttgattttatgaaggctcagccaatagcgggtttgcaatcttttgaagattacatagccatggtcaatttgtggtttaaatctggggtaaatggcgcgaagatttcaaaaaccaagtatgaccgtctactatgtcccgaagaaaatattccaaaagattttattgagagacagttgcgtcagacccagtacatatcaaaaaaggcttctcaagtgttgggattggcttgccgcaatgtgcatgcaaccagcggaggtgttactgactttttgagagaaaaatggggatggaatgatgtccttaaaaaagtgaattgggagcgttatgaaaaactgggacttacttctatagaaacgcgtgaggatggtaagagaatatacaatatcgcaggctggtccaaacgtgatgatcatcgtcatcatgccattgatgcgctcgttgttgcctgtaccaaacagagttacattcaatccttgaatagattgaatcaatttgtcaataaaaccaatacggcagatggtttaaaagaagcgggtcattttaaattgaaagaaatagctggaaaagccccttttgaagtagacgaaatcgtggagcgcgcatctaaaattatcgtatcctttaaacccggaaaacgggtttcctcgaagagtaaaaataaggcgacaggatacacgagtatcattccacgtggcgcgttatccaaagagaccgtttacggaaagataaaagtgcagaccaaacgggaagtagcattgaataaaaatttcaatccggagtggttggtggtggatcgctttttacgtgtgatgataaaagagcgaatcaaagcatttgatggagatttaaccaaagcatttaaagcgcccatctatttggccgatggcgtaacgcctgtgaagaaagtggagatttacgaatggaatgaagaggcggtggtgaaatatccgttgtcgtccatcaagcaaaaggatctggaatatgttcttgatcctgtggtaaagcagaagcttcaggcattctttgatcaatatcccaatgagaaggaagccatcaagaatcttggtgcagcgccgatttggttcaatgaagagaaacgaattcctatcagaacggtgcgcttaatgacagggttagggaaagtggtgccgcaaaagcaagtcagccccgacgatgccaaaggatttgttgattcaggaaacaatcatcatttggcggtgtatgaaagagaggatggttctttgtttgacgtgatggtttctttccaagaagcatttgagcgaaaggccaatggattgccgctttactttacagaatgggaaggtgcaaaactcaaatggaaatttgaacagaatgatttgtttgagattgacaatgaggaaaaacaatattatcgatgtcaaaaaatcactaaagattcaaatgataatatcacgatttttttgagattaatatcagaaacaaagcttgatgattcgaaagagaacaaggagatgaaagtttattttagtttgcgcaatcataaaaatatagttgatacaaacccacgagcaattcgtttaagtattttgggagagttgttgtgataaaaagaaccttggtcatcgagaatccttctcaactgagccttcgccaagagcagatgttggtaaggcgtatacatgaaggtgaatcgagtgagcggacagtgccgattgaggacattggggtgctgatgctggagtctgaacattgcaccattacgaccgcattgctcacccgtttgatggaacgcaatgtggcggtgattggatgtgatggcaagcacatgccggtgggtttgtggctgccattggaaggaaataccctgcaaagtgcacggtttcaaatgcagattgccacgtctcttcctttgaagaaaaatgtttgggctcaattgatcaaatgcaaattggagaatcaaggtgaggtgcttttgagacaacaattggaacatgctccgctgataagatgggcttctgaagttcgctcgggcgatatggacaattttgaagcgagaggggcagcctattattggaatcttttgtttgaaggtcaagattttcggagagaacgttttggcccacctcccaatcatttatttaactatggttacgccatcctacgcgccataattgccagggccttggtgggttcgggattgtttcccacttttggtgttcatcacaaaaatcaatacaatgcctattgtttggcggatgatgtcatggaaccctatcgccccattgtggatgcgtatattctggatcatctgcatgaaatggaagtgggtgaggagttgacccgcgaatggaaattgcatttattaaaaatccccaccttggatgtgatgctcgaaaaagaacgcaggcccttattgattgccgcaagcatgaccacctcctctttggtgaaagtattagaagggaaagaaaagaaggtgttgctgccccaatttcccaaacatgagtttcgaacgaatcaacgcctataagattatgtggattttggtcttttttgatttacccgtggaaaccaagaaagagcgaaaaattgccagtgaatttagaagagatttgatacgtgatggattcaccatgtttcagttcagcatttatctgcgtcattgcgcgagtagggaaaatgcagaagtgcatattaaaagagtaaagaccagcttgcctaagaaagggcatgtcggcatattgcatgtcaccgacaagcagtttgcacaaatggaaatattttttggaaagaaggaaattgaagtgccattggggccccagcaattggaattgttttaaaataaaaaaggaaaaccgaagggttttccttttttggatattcgaaatttgtgtttttttaatcgcgaaaaatcgatgtaacatccttaaaacgtgcgttttagatcacatttggttgtttcgaatatttcaaagatctcaattaaacagcaattcacaactcatagtcccaatcgccatctaacaaccttgttgtttcgaatatttcaaagatctcaattaaacagcaattcacaacacataacctttagtgcaaatgcctattgatgttgtttcgaatatttcaaagatctcaattaaacagcaattcacaacagatacaggtggtgaacatccgcatacatagttgtttcgaatatttcaaagatctcaattaaacagcaattcacaacag

SEQ ID NO: 4015 - DNA, 23309 bp, synthetic construct
  misc_feature 1..23309: note = Synthetic
  source 1..23309: mol_type = other DNA
ttcacagcctgccatcctgcatccggcgatgtttcggttctccattcaaagctgatgtcaaggcttttgaaaaaattagcctcaagaccaggcgcgcgggtcaaaatcatcctgcttggcgagacaaaatccccttcaatataaaaaaatcccagacctgctcccaagcctagacaaaatggctctgaaaagtttagcccataaaaaactgacaggtcgctgagcactgtggacgcgcaatgcactcctggtcggtgcttaaagccccgaatgattttttgcattggcggaacttgagtattactttgccagagacttactcagattgatctgccgttccagaccgctgatcttcttttccagttcacattgctctgcaagcaattttttggattgctccagcttaattttttctgcgtttattttttccttaagcccatccagatcgtccttgaaaattttcacgcgactgatattggcttctttcagctcaggcggatttgcctggatggagcaactgtatgctttatcccatccctgctgatcaaaggctaagaactcaagattcaattcaatctgaccgctggtaatcgcaggattaccccgccttcggtaagccacgccaagattatccactccgatcaggaatcggctgatctgttcattggagcccttgacagacagagtcagcggatagaccttgagaaagccgtccgcgccttcagtctgcgcgtccatcctctcaagtgaaacgccggcgctccctgctaattgctgtattttctcctgaacctgcttgaaatccagctccgagccaatcctgggctttatctggtcaagctgtttctgaagcgaatcagccttggaactcatttgctccaggtccttttgagaaggcggtttccatgttgaataaaactcattgatccggcttaggtccgcctccatatccgctttcagccgtttggagtttaaaaaatcattgagcgcaaagatgcttccagctattagaaggatagcgaacacaatgataccaataacgcttctccaattgatctcatcccattctatcatgtctcttccccctttgtttactggtataactttatcactttttatttttccgtcaagcgctggttgaaatcatggctgaagtttctccagcaattgcttcaagcctttccctccctgtttgccgaattcatcaattaggtttttcccgagcttcttggtatatttgtccgaatccagaccaggcgtcaggctagggtaggttccctttacattaaacggcaaccagaggttcttcccgttctgaaaaaggtatctggtaagctcctggcttaaacctaactctttagcgatctgtttgctagcctcatcatccatccatagctcccctgaaaaatccacgcgatagccaaaatcccattttcccttggcgctgagccttccgccaggaatcgccattgccaggtcttttacctgcacaaacccgtcttttatctccagattgaactccgcactttcaaatctggtttctttcaaattctgccactggctttttcccagattgcttttgagcagatttttcacctccctggaatttgcccagtctccaagaagccccccaaccagattgaaggttttaagtgagccgttcttgagaatagccctgccttgacctgtgagctttggctttatctcctgccaggatgagcctctaccggaaaattccagattgcagtcaaaattaccagaaatagtatcagccattttgctgaaaccctttagcgccacaggaatttcaattccgctcaaagagatattcccctgataatgaggcttcttgcgagaaaggtcaatcttgagcggaccagatgccctgccattgaaaacattgaaactcgcattagcaaaactcaatacggcctctttcatcataaccgggctctgaaagttttgcaccagataattttgatacgagacctgagccagattcaggttcccctccagatcaattttttctataaaacccggctcctttttgccatcctttgccctgtcctgcttttcagacttcgcactcggcgcagtttcagaagcggattttctcttattacttttcatcagtcctgccaggtcaagcttcttgccttgaacatcaactcttatcctgggcgcggttaaatcactcacactgccctttagcccaaggtcaatgtccggtccagataaatgcaattgctcaataataacattcagcaattgtgcctggctgagccttccgctcagttttccagcaaagtccattttgcccttcagactgtaaccggacagaggctctaccatacgcgaaaattcatccattgaaattcccttgccatagagagaaatgtccagatcataattctttgtaagagagcccttgccagtaaactccccagcgctgaattccagaagaagattttctattgaatacccggagggaatttgccttgcatccagataaataaaaaatttatctccagctggcttttgcaaaacgccaggatatctaaactctgcatttttcaaatccatgcttgcctgaagcatagctggagaacctgaactcaatatcccggataaaatcccggtcccggtcagaataattttcttatcctcaataaatttacggagcggataaattattctggaaagctcagccagatccagattagcgcttccaaatttgaactgataatgctccccggtcatctctccggaaaaatcaaaaacgcttttaccaacgctaacacgagaaggctttaccagatatttgttttcttcaatatttgccagcatttccatgttgtccacctgcgcggaaaagctttgtttgccagaaggagctctgtagtcagcaaaattaaaagttccatccctaacctgaatagcgccaatgctaattcgcctgtcagcaaccttaaaggattccattttcttttcaactttttcaggcgcttctttttcccgcgattttttatacaggtcactgacgctcaattctccgcttttattgcgtgatacagaaatccttggctgaatcacaacaattctttttacatcaatctgattcctgagcaacttaagcagggaaatttttacctcaatactaccaacttccaaaaaaggttcttctccaaaaccagggcgctcagagattctcagccctgaaagctccactccaaagctcggaagaaattgcaaccgtatgccttgaaaactgagttgacgccttaaaaattttcccgcctgcctctcaatttctggcttaagagaatccagattgataaaatgcggaataattaaaagcgctataactatcagtgctagagcaattacaagaccaagccccagctttttaccagcactcatttctcatcctttagcttcttaagcgcatccactaaaagctggttgaccatctgcggattcgccttgccctgactcttcttcatcacctgtccaatgaaaaatcccagcatcttctctttcccgccaagatagtccgcaacctgtttagggttctcagcaatgacctcttctatcatcctcttgagcgctgagtcatcgctcacctgctcaagaccctgctcccgaacgatttgctccgcatcttgcccggttttatacatctcaactagaacgcttttagctatttttccgctgatcttgcctttttccataagctgataaagacctgccatttgctcaggcttgaccggacaatcttttgcagacctctcctctgcattcagctcccgcaaaagctcagccagaataaaattgctcgcccattttgcaggcgccccagatttgaccactgcttcaaaataatccgcaagttccctgtcttgcgtcagaataccagcatcctggtctggtatgccatattgctgaacaaaccgctctcttttttgcgaaggcaattcgggaagctctgaccgaacttttgcaatccacccttcatcaatttccactggaattaaatccgggtctggaaaataccgatagtcgtgtgcctcttccttgcctcgcattcctctggtcttaccagtctgctcatcccaaagcctggtttcttgaacaatctcccctcctgatgccagaaccttaatctgcctttcaatctcatattccagcgcgcgctggatattccgaaatgagttcatatttttcaactcagtccttgttccaaatccctcagcgccttttttccgaacagaaacattcgcatcgcatctcagcgaaccctcctgcatattcccatcacaaactccaagatataccagaatgttcctgagctggcgcatatactcagccgactcctctgcgctccttaaatccggctcgcttactatctccattaacggcaccccagtacgatttaaatcaacatagctttcctctgcccttgcaaagtcccctgcgtgaaccagcttgccagcatcctcctcaagatgaatccggattattccaaccctttttttaacaccgcccacagaaatctctatccagccattctctgctaatggcttctcatacatagaaatttgatagcccttcggaaggtctggataaaaataattcttgcgcgcaaacacgctcctgtgagctatcttacaatttagagcaagcgctgtgcgtatcgcataatcaaccgctttccggttcagaaccggaagcacaccaggcatacccagacagaccggacaggtctgcgtattcggctccgcgccaaatttagttgagcacccgcaaaaaatttttgactccgtcaaaagttgagcgtgaacctcaagaccaattatagcttcatattccatctttgaatccctttttatttcagacaaggcttttgtttatgccaatccgtgttttgctcataagcataagccacctggaaaattttttcttcttcaaaatgtctcgccagaatttgcattccgagcggaagaccctctttggaaaatccgcagggaatgctcattccaggcagtccagcgagattgcaggacacggtgaaaatgtccgagagatacatagaaagcgggtcattgatcttggtgccgagtttatatggcggggttggcagaaccggcgcaattatcacatcgcatttcttaaacgcctcttcaaagtctttccggatcaatgtccgaaccttgagcgcctttaaataatatgcgtcataatatcctgctgagagcgcataggtcccaagaataattctgcgcctgacctctgcgccaaaaccctgactccgagtcgccttatacatatttatgatgggtcctggctctgaaactcgtaagccatatttaacaccatcatagcgcgctagattagaactcgcctctgccatagcaataatgtaatagcaggcaatgcaataatcagtatgtggcaaactcacttcaatcacttctgcgcccagagattccaaaaccttcaccgctcttttaaccgcatcctcaacctcagggtcaagccccttgatgaaatactctgttggaagaccgagttttatgcctttgacctcgcctgtcagggcttcagtgtattttggcgtttctctttttaccgaagtggaatctcgcgggtcaaatccagcaatagcctccagcataatagcagagtctctgacatttttggtcaaaggtccaacctggtcaagggagcttgcataagcaatgatcccgaatctgcttacccttccataagtgggctttattccaaccactccgcaacaagccgctggctggcggatagaaccgccagtgtcagttcccagactggcaatacattcatcagccgcaaccgccgcggcagagcctcctgaactccctcctggaatataatccaagttccacggattgcggctaaccccataagcggagttctcgcaggttgaacccatagcaaactcatccatattcaacttgcctacaattactgcgccacgctctttcagcttctctacagcagtgccatcataaggcggaataaaattctccagaattttagacgcacaggttgttggaacgcctcgcgtgatgaaaatatcttttaacccgatcggtatccctagtaatggattgagtttttctccagattgtctcagccggtccgcttcttttgcctgcgccagagcataatcatcattaacccacagatatgaatgaacctttccatcaacctcttttattcgctctaaaaccgagcgagtgatttcctccgaagctacctctctacgggaaagcatctcagagagctcggaaatcgtcaactcacaaagtctcatttaattacctcattcaataatctttggcactttgaaaaaattgccctctttagcaggagcatttgcaagggaatcctcaacgggaagagactgcttaacctcatcctcacgaaacgcattcaccataggaatacaatgcgcagtcggctctatatcctttgtgtctaactcattcagcttctcaaaatatgtcagaatctggtcaagttgagaagtaaaattctctgcctcttcctcactcaactttagccgagccagatgcgccacatactcaacctcttttctcgtaatcttcactttccttatctcctttttgacctgatagcgcctttatttgttctcaataactcaaaaaatatgttcttctccaaagaattttagaataatcatagcctgtctgcaaaccagaactcatctcctgaccagtttgcgcatccagcccttataaaagggttggacatccagaatttaaaacctgaatttgcttggcgcaacttttgcctctcctgaataaaagcgctagaattaaatcatcaacctcaaaaaggaggctctatgacgaatacaactttcgtggtcggaattctggcactcatcttgctaaatagcgcagagagcattgctcaaagaaaaaccctttcccgcacagaagacccggtggtgattttaggagacaaactcccgcaactagtcggaaaagaattcaactcgctctctctcttctcttatcaaaacggaaagtttgctccaattccattccagattgatgaaaagaccgcgtctggagaatatgtctttactgaaggagaaaaaaagagcgcggattcagaccctaaatttgatgcgaatgatgagctcgtttttatggtgtttgactcaggggacagagcgaacaagtttgatattgctggctccagagagatatatgagatttccatctctgacccgtgcggtgcaggacaagcctgggtttatctcgcaacctttgaaaaaaacgctccgcgctccaataccgattatgtcaggatggattttaacagctcaacaaatcacttcactgttaccgcacccaactatctcaccaaaagcaaagcagactccataatttatgactatcttgcttttccaaaacccgaaggcggctttggccctgaccttgttgaccagctaaaaattcgcggagtcatctctgcttttcgcggaacactgaaatttcaattcaattttgacgagctggttaagagcaaggtcactgcctggaaagatggtcaggtgcgaattttgcgaaggggagaaggatatctggaccttgccgcaatcaagatcaaaggctctggatacgcagtgctgtttttttatcccaattttttcatctacccgatgaccctggaccttccgattgatcttagaaaaatactggatgatattgatattcacggcgtgacagattttactaaatcagcatacggctggttttactatgatgcgcagaacaaacttaatcccgaggttgtcctggacggaaaaatgagcgaggcggaaaataatttgaaactacattttgatcacgactggctatgccacactggaaagattggaacttattgccaccgaattatattcccgaaagaatggagcgcaatcacaagggaggtcttttatgtggataacgcagagctgaatgaccctccagaatctgagccgggcttgtcagcaatcggataccatttcaaaaatttcatctcgctcaaaaaaggcccacaaacctactggatgcactattatttccccaaaaacttctctccaggcgacgagcaaagactgatggacatcttagactatccgctcacgattgagataaaacaaattgaatgacccgctcggggttatctctaatatcagaggtataatagaagcgagttctggacaggtttagcaaaaggcttattcagtttgacaatttacccatgagatttataataaacccagacttctgtggggctgtagctcagctgggagagcacgtgactggcagtcacggggtcgggggttcaattcccctcagctccaccataaaaccgcttgctcctattaaatttttgcaaaccgcaattttgggttgtgtccaggttatgtattccgaagctgaatttttctgggaaacagcgtcacaatttgctcaataaaattgctaaacctgccatctctggtcttggtatatctggacattgtcaaatccggacaggaatcccgagcaatggtcatctgctccttagcccttgcaaaagagccgtgcagaagcgtagtaaatctggctctaagtgaatgaaaaaatgctaagccttcaggtgtcaacttaaaacaccaccgacaaaaagtattttgaaagccggaatatctccaagccagattcaatcctcttttcaagggcctgcgacccttgacaaggggcgtgccccttgacccaatggttttcacccttgacccgctttttaaaaaataaggacactagtgtcccccttgacccactttaagaaatcgggtgcagggttacgacctgcatcgtagtctaaatcgcccctatctgttcctgcgacccttgggtgcagggttacgcccctgcttgttccttgagccagaacagctagcctgtctttttttaaaaaatcgggtcaagggactctgtcccttgggtgcagggttacgacctgtcaaagaccaattctatcattgccgggggctggtaattagcaggtttgcatttctaaaatgcttctgctgttccgctgactccactgttgaagcccaagaccggaagcgttgtcctccatcaagcttgcgcccgaaccgcaagatgttttgctgtgaaccgctcctgaatctaatggtccttgaggcttgaaaaccggttcagaaagaaggaaggttgagccgaaacgcggtgcagacgattagcctgcctggcgttaagtctcctccttccaagcattcagaaccggtcaagggctgtgcccttaccttggctctagcgtgcatcgttgtatctgtgagcttctcgcgccgaggtcccaataacgcaaacccaatgagtcgctcctgacttaagtcaaaagcgaacaatgatgtcaaaagaaccactggataatatacgattgaaaaagcatttttcaagggttttgttcgctctgaccgaacgaaatttttatatttaatatcaaatagttgccctattagacatgtttgtttttaaaaatcgggtcaagggacagagtcccttgtcaagggtctctgacccttgggttaaggggcacgccccttgtaaaaatcgggtcaagggtgaaaacccttgggttaaggggctctgccccttaggttaagggcttcgcttttatgaccgcttctgacattgaaatctgtataatacctggtatgggattagttgagaaaaaaacgacgcccaccgaagtgggcgtctgcatgctccttagagcagcgcttgcgggacgaaacccttactgtgaaaagacgggaatcgccgctttgatacacttaacaataatatacatattttttacaaattgtcaagtccctgaattagaattttggtttttataaaaaaggtgtaaaatctaaacaaaggaggataaaaatatggaacaaaaagagagttatattttaggcttggacttgggtgctaattcaatcggatgggcgcttctggaagcgcatcctgatccggaggaaaagggaagactaaaggctcacggtataaaacaaatcggtgtccgaatttttgaagcgggggtggaaggcgagattgagcagggaaaggaccaatcaagagcagtggacaggcgtgatgcaaggcttgccagacgaaggctggatagaatttcaagaagactaagccatttgttttatctattaatgagcgctgggcttttgccagagcatcctgcttacaaaactgagttgggcaaaaagaaaagcgcaaaagagcgaaagcaggagcgggatttaaaggcaaaagccaggcatgaggtaatcaatcagcttgatcaggacttagttaaaaaatggcgggaaaaagagcccttagcaaaagaaactcttccctatatactccgtgcaaaagccctggacgaaaaacttgaactttacgaattaggccgagccttgtttcatcttgcccaaagacggggattcctaagcaatcgcaaggcaaaagccaaagatgatgaagaattaggcaaggtaaaccaaggaatcctggaattggaaggaaaaatagaaggagcaggggcgcgcactctaggagaatatttttctaagttgaatcccaaagaggaacgaatccgctctcgctggacttcaagggagatgtatctgaaagagtttgaacaaatctggaacgcacaggaaaaacactatccgaaaattttgaccccggaatttaaaaagaaaatctggagatgtatcttttatcagcgtcctttaaaaatccagcatcatcttattggagaatgccaatatgaaaaaggaaaaaaacgcgcaccaagcgcctgcttggcttttcaaagattccggatgcttcaacagctcaacaattcctatctcatttctccggatggagagatactgaatgatggcagactaactaatgagcaaagagaaaggctaattgaggttctggaaaagaaagctgaactgaaattttctaaagccaaaaaaattctaggtttaactaaagaatatcgctttaattttgaaaaagaagatggcaaaggagaatttttgggaaatgaaaccgcggaaaaattgattaaggttttcggtgaggaaaggtggagcagattttcagagcaagaaaaaaatgagattgttcaggatttaatcagcattcagcataaatcaggactggtcaaacgcggaaaaaataaatgggggctggatgacgaaaacgctgaggaattcagcaagataaaccttgaagagggatattgtggactttctcgcctggctttatcaaaacttataccactgatggaaacaggacttacatatatggaagctgtaaaacaagtttatccagatagattacagaatgaagcatttgaccaactgccaatggtgataaaccagatgcctgaactcaaaaatccagtggtcaaaagggtattaacggaattgagaaaaattgtgaatgcaattattcgcaaatatggcaaacctgaacaaatcaggattgaactcgcacgcgaaatgaaaaagaccaggcaacagcgtgaagaaatctggaaaaagaacaagcaaaatgaggaaaaaagaaaacaagccgctcaagctattattaaagaagctggtgagaatccaaaaccaggagatattgaaaaatatcttctctgggacgaatgtaatggaatttgtccatatacaggaaaatccatcagtctaaaacaattattcagcggagaagtagatgtggagcatataatcccttatagcatctgcctggataattcttattttaacaaaaccttgtgctttcatgatgaaaacgctaaagtcaaaaataacaaaaccccctggcaggcgtatggttcagatgaaaaaaagtggaatgaaatcctggagagggtaaaacgattcaagggcgatgccgctaaagaaaaactcaaaaaattccagattaaagacctggaagaacttgatgattttatatcctctcaacttaatgacactaaatacgcttcaaaattagctaaaaaattcctcggactactttatccaggtcaagaagcgctcagcagagttcaggctacaaaaggagggattacagctaatctcagagatgtatttaacctcaacagcatcttaaaggatggtgattcagtggagcgagacggttatgagcctaaaaaaaccagagcagaccatcgccatcacgcaattgacgcaatctgcattgctctcactgaaccatccacagttaaaatgctcagcgaagcctcatcccgagccctaaaagaaagaaaacgccggttcggtaaagtccagcctccatgggaaaatttttgggaagatgtaaaaaaagccattgataatactattgtgtctcatcgggtatctaaaaaggtcaatggtcccttgcatcaggaaaccttttatagtccgcctaaagaagtgcagggtaaaatcatctgccatgtaaggaagccattggagaatttgtccgcaggagacattgaggatattgttgatccggtcgtcaagaaaaaagtccaggaaaaaattaaagagcttggaggcggagatcccaaaaaactttttgccggaagttcaacccttcctcctgaaaaactgccctgtatgaccgcgaaagacggacgagtaatcccaatccgaaaggtcagaatcaaatgcgtaatgacaccattccaggtgggagataaaggcagagaacgattcgtaactagcgacaccaaccatcatctggaaattttcgagaccaaagacaagaaaggaaatgtcagatgggacggcgccattgttagccaatatgaagcaatgcgaagattgagggcaggagaacctatcgtcaagagggagcatgggaaaggtaaagaattcaaattctctctagctttaaatgaatgtgttaaattgcttgatgagaaggggcaagaaatagtctgtgttgtgaaaggtatctctcaattatctgccgggccgatcgttattactttaagacatatttgtgatgccagacctacctccgaatatcaaaagcaaatcaagatgcgtaaagaattgaagaaaaattacgacaagaaattagcggaagagattgagaagatgctcccggtttttatttttaaaggcccagatagtctgcgagaggcaaaagggcaaaaaattttgataactccacttggagagatcagaaccgccaatgactgacagaattctggatttttctgaagagcccgcgagcttgagcgcccggattgggttgcttgtcattgaacgaaaagacaagccagaggtcactataccatttgcagatattgctataatcatcacctcacatccccaggttcattatactaacgcagttcttgctggattagctgaagctggaggagcttttattgtttgtaattccaaatatctccctgtggggatgcttcttcctattgtgggacattcaactcaggctgagagatttaccaaacaggctaatgcatcccttcccacctgcaagcaaatctggaaacagattgtaagcgcaaagatcaaaaatcaggggaaattgctcaaagagctttatggacaagaccaggggcttatcgcaatgtcaaaaaatgtaaaatcaggcgactcggaaaatctggaagccctggcatcaagaacatactggaaacatctattcggagatattaaattctccagagaccgacaggcgcaagaccagaacagatttcttaactatggctacactgtgctaagggcaataaccgcaagggcagtctgctccgctgggcttcatccatctatcggaatccatcatcataaccgctatgacgcatattgcctggctgacgatttaatggagccattcagaccaatagttgatagagctgttgtgcaactggtcaaagaaaagggcactgatgcaccactggataaagatgccaaagcaataatcatcggcgcattgacaggcaggtttgaattacaaggagagtccaggactctatttgacatcatctccagaaccgcatcttctcttgccttaatttttgaagaaaaatcaaatgagcttgttctgccagaaatatagaagaggcacagacccttcacctagtttatttctctgcgaaatttgcgcctctgcggtgaataggttttaactatgccagaaacaacaatccctttatcggagtacagagctatgtggctatttgtcttatttgacctgcctgtggactctaaagacgctagaaagcaatatgctcaattcagaaaagccctcctaaaacagggcttcactatgctacagtattctgtctatgcacgctactttgcctctgaagaagcctctgacatccagagaaaaaaagtggtcctcgcacttccaccagaaggacaagtcagacttctatccgtaacagaccgccagttcggaaaaatggaagtctattttggaaaaaaacgcaccccaactgaagacccgcctatgcaactatcctttttctagcagaaaaaattgagcattgcgccactcctgactgctgaaaatagccattttttttgtgcaaaaaacaaaagaaaaccctcggaattactgcttttccgagggttccagtgtatcaaagcgccgattcccgtcaagccacagcaacttacttatttcattttcaattctggatagtgtatcaaagcgccgattcccgtcaagccacagccattctttacattacttgtcatttttttcaagtgtatcaaagcgccgattcccgtcaagccacagcctccccttctttaatatataatggttcagtagtgtatcaaagcgccgattcccgtcaagccacagctaatttataaaatatcaataaacttgaaaagtgtatcaaagcgccgattcccgtcaagccacagcgagcgtcctttgatatcttctcaatttgctagtgtatcaaagcgccgattcccgtcaagccacagctcctttaatttgtcggtaatagaaactactagtgtatcaaagcgccgattcccgtcaagccacagctttatcgtttgacgcaaaacaagaaaaaatagtgtatcaaagcgccgattcccgtcaagccacagcaaatatcccttttcccctttatctggtattagtgtatcaaagcgccgattcccgtcaagccacagcacaatttcaggattaaaatcaaattcacttagtgtatcaaagcgccgattcccgtcaagccacagcagcagagcagttccacctatatccacaagaagtgtatcaaagcgccgattcccgtcaagccacagcaataacatttcacttgcggtggataactgaagtgtatcaaagcgccgattcccgtcaagccacagcaaaagaaaactaaagcgtgttgcgagctagggtaatcccgtaagcgagcaacacgcttaaatggcaatcctttgcgtgctttgcgtctttgcggtgaagattacatttgcaattcaggtgtgaaatctggtagaatgtagatataagcgcaggagggcagatatgaagctgaacggggaccctgatgggattgcagagttaaaagagatgatgaagaccaggattgagtatctcaagtatctggtcactgaggcaaagactaattttgacaatgcggctcggtttaagagcaaggatgggagcataaaatataagctggtgtttaagccacagaccggcgagtttgaggttgagaaggaggtttagctaaaagagaggaggggggtaaaatgaggcgggtatttttactggcaattttatttttggttttagctgtcaggtctttgggggaagagccggcaaagccttctgatgaaaagccggtagctgagcagtctcatccatcaagccagcctacgccatcttgtccagaaccagcagattccagcacagcgatgaaggcgaaggttgatgctgaaatccagaagcgggttaaggagctgatagagctaatcaatcaggagccgaatgtattgatggttaatccaaaagctgttgtggtcaaggatgagaactggcggccatacactcctgatgggaaatacaatcaggattttaaggtaattccagacgattcctcgccagaggtttcgcaggctcttaagatagagcagaaccggcagaaatggacaaatgagcttgttatgatcggtcttcctgctgtgcctgagcttataaaggcatctctggacacagggagaaagtatcggtatttttatataactgcacttggtctgatcaaggatgtaaaggcaacgccagcgattttgaagtattatcaggaggggattgaccaggaaaagctggcaaagtcaatggagaagatggccgcggtagaggatgctgaggcgttgcggaaggaggcaattttcagaaagggtgttgccatagaggctttgaaaaacataagcggaaaggactttggagacgattacgcaaaatgggagcaatggtggaaggatatggagaagaagatcgggccggttgaacttcccaagctgtatgagatcaaaggcacaaatgaaaaaccttctacccagtttgttccagcaactgtaagtcctgcgggcggctcaaccgcgaagtaaatctcaaaactcggatttcggaatttggaattcggataaaaccttgaaaccccaaaaccctgaaaccttgaaaccttgaaacttctcttggtctcaggtctaaaattattctgatttttccgtcatacgcgcggattttattccgtatttttttaagagccgatgaaaggtctgccttgggatgcgtgcataagatgcggcacggctgacattgccattagcacgctccaggtaatgctttaaaagtccagcttcaaaattgtcaagatacttccgccttaattccttgaatcctagctcttgctcttttgcttctggcttaaccatcattcccagaggcaggtcttcgctggtaatcactcttccacgcgcaagcgccattgcccttgcgatggtgttctccagctcacgaacattcccgggccagttgtagctcataagcaattccattgcctgggagctgatcccctgaatctctcttccctctatctgattgtatttcctgataaaatgctctgtcaattccgggatgtcctccttgcgctcccgcaatggaggaacaactatggtcacgacatttaagcggtaataaaggtcttcccggaattttccttctgagatgagtttctcaaggtcgcgattagttgcggcaatcattctaacatcaatttttttcagtctagtgtccccaactcgcttgatttctccgctctgcaaaaacctgagcaaatccatctgcacagcaggagtaatatccccgatctcatcaaggaaaatagtcccattctctgcttcttcaatcaagcccttctttgatgaaaccgcgcctgtgaacgcgcccttgatgtatccgaacaactcgcttgtgagaagcgtctcagttagcgcagagcaatccaccacaacaaaaggcttttctgagcgcgggcttgattgatgaagagttctcgcaaccatttccttgccggttccgctttcgccacgaataagaacagttgcattggttgcagagacctttccgatgagcttatacacctcctgcatcttctcgctcttgccaacaagattaaccgcggtctcaggcgctcccctggcgcttacacggtaaagctcggcgctctcaagctgaacctgtttcaatgcccggcgcataactgatagaacctggtcgttgttaaaaggcttggtgatgtaatcaaaagctccgagcttcatactctctatcgcggcttgaacagttgagtaagcagtgatgacaatcacaggcagattgggatgtgaggctttgatcgccttgagaacctgaattccgtccagcttgggcatccgtaaatccgtgagcgcgagatcaaatttctgctcggacagcaaaccgagagcctcttccgggtctgtcatcggcacaggctcccatcctccctggcggaccagcatactgagaaaatcgcaccagcgtttctcatcctctataatcagaatccgctctaccatctttctccggaccggatttcactcttggtctgggagagtggaagcgtgatgatgaattccgctcctctgcccggctcgctcttaacgcgtatctctccctgatgcagttctataatgttatatgcgattgtcaatccaagaccagttccttccccaggagccttggtcgtaaagaatgggtcaaacagctttgaaagatgctctggcttgatccctgagccagtgtcgcgaaacctgacctcaactgcatctggtttttcctgaacagatacataaagggttccgcccctctgcatcgcttgccaggcgttaagcacgatgttggtgaaaacctgctgaagaccataagggtcgcactccagaaaaatcggctggggcaaatagttcagcttcaaagctatgccgctggtctcaagcctgggagagaccagcctaagcgttgcggaaagcacctcataaagattcacgcgttcaaacttgagcgggcggtcgcgcgatagcgagagaagactctggataaatccagccgcattttcaatctcctctcggatcaactccacgatctccttgatgtccgctggcaatcttttatcagtggcaatggtctgggcataaccactggcaagtccgagcgggttgttgatttcgtggactagcgcggacgcgatctgtccgatgctcgccagtcgctccgagcggaggattctctcatcaattttgctcatttttctaaccagcgcagggatgcagaagtcagggtcagcattgcctaagactaatgagcgggcaaattctatgcaggatgggtatccgcaggcttgacagttcaggagcggtatttccgagcctagcccgattgaggacagggcatttgtgattttgtcagggctcggctccggggcttgaaagcgttgtgggtaaaattctcttttgaactctatttgtaaatttggtatcagccttagcttgattcgctctgacttgtcgcgcgctttcagataattgcgcgctctctctttgctttgcgcctggctaagccggttcgcaatcatcgggcttcccacgcatcctccgggacagaaattcaactccaaaagcctgctcttgatctctcccattcgcacagcgtccaggagccggcggacttctccgattccgcttatgcttatgaaatccgtgtccggttcagaggcggatgccaccattgcatccgcgaggtctccttgcgcgataaatgcgcttcccgcgttaaggttcaggctttgaaatttttccccagaaaattttgccgggtcaatttttcgctgagccaggagttgacgcagttccggaaaagtcaggcaggcagttgttttggaattattttccatctccgttgctctgcccggacaggcggtgattagaactatttccgcggcacggaaattttcctttagccagcgcaggcataaaatttcagggctgatcacaggcgccagatgcggcacaatgtccggataaagtttctcaatatattcaaccaccactggacaatggctggtgataagagggaaatttgaagcttttgccaaaatttcgcgtgtgcgctctgccacaagcttgagaccggattccgccagatacacttcgtcaaatccgagtctggaaatggcttcagctatttgctctggagaatactcaatcattgcggaggcaaccagggggctgaccagagcgatttttttggaagctgatttcaggatggcttgagccggttcaaggctttctgtccggtaatgttgctcagggcagatggagatgcagagtccgcaatggatacagcgctctgtcaatacctgctttttcgccagggctattgcctgggtggggcaggaccgaagacatctcaggcataaactacactgctctgagcttcttaacactttatccactttatactataataactccttttaggagtccgctcaagtttttaactagaaattttgagattgtggagatggtatttagaaaaagtcagggctttactttgtatagtgaagagcctttaagcgctctttggtttctggagagagctctttcttggctgttcttctaccggataaaatgacatctgggtccggaagtagtgtgaagagttgcttgatcaattcctgattctcatccgcgatattgtttttctcattcgggtctgagctcaggtcgtataattccatttttttatcagcgggtctccagagcagaaaatgatacgggtagagaaccataccgatctggaattttttccgcgtatgcatcatcaaggagaatccgagccgcttttcagtctcggttccattaagaacaggcatcaaagatttcccgctcataccttgaatagagcctgcttgcgcatattccagaagaaatggcgcaaagtctatactccttacaagcgaactaatcctctttccagcaggaatgccgggtccggaaagaatgagcgggatatgagcggtctgccagtggttatcctctgtatggtccatttttctgtgctcaaagaacgcctcgccgtgatcagcagtgacaaggatcaaagtgttgtccagcagacctgattcatccaaatacgccaatagctttcctatctgcgtgtccgcgtatcttatctcgccatcatattgagaaatgagccagtccagctctgtttgttttggcgcccgtgggatttgataccattgccgattatctccaaacggctgaatgtctcccagacccgcggcgcctttgggcttcaaaatgccctggctgaaaagcttcttatattcatcaggcggatgataaggagaatgagttgatacataatgtagataaagaaagaacggagcctctgcatcgctcttaagccagggaatgaccttttgggtcaggcattcagcgtcgttcataaaaaattttgcgtcacatccctcatcaaatagctcaaatcctctgtccagttgaaaatccgaaagacggaaataagtcgcgctaaagccagcagtctggtatccggctgatcttaaaagctgtgccagtataggaaattcttcacccaaaaccaggttttcgcagaagagcgcgcgatgctcccagggatataagcccgtgaacataccgctaaggctggtcacggtgaacgaggaagtggtcatcacattcataaatatcgttccttttctggagagcgcatcaatgttggggctggtgtctctaaagtagccataacagcccagatggtctgctcggagcgcgtcaatcaaaatgaaaataattgatggcttttgaacatccgcgtgacgcaaaattctgggcggagtgagcgctaaaccatagtccttgacatcactccggagaatcagattctctgaatttggtggcagaataagctctgccattttccactcagggttcgcttgcgcggaaatcgtgtctgaccagagaatctgctcatttccgctggaaagcgcaagaatttgcatatgaaccgggtctggatgctttacaaagtaaaaaggaataactccaaaataaaatttgattttttctccgccaggatatgccagcttcaaatcattgcctggaatataagcaagcgctctccgaacctgagcgcctattcttactctgagaaaattcaattctggattcaaactggcaagctctgtgtctatttccgcaagagggaaattatgcataaggcttttcaaatcaggttgcggcttttcgcacccgaaaaaaatgaaaagaaagatcacccacccatattttttccacattataattagtctataataaattccggcttaagcaaatcagtcaggacggagaaaaatagaccaaagcagtgagcatagtcgcgtaagctagaggtgcggttatattatcatcaattttggaaataggaaggctttcaactatgcttgcgcaaatggaagagagagatatataaaggaataatagagcaggagagatttcccgaaatttgctcaagctctggcacaaaaaccagttcaggcttgagccttcaagattgaccttagtccagataaaagccagtaagccaaaaatagtggctgagataaaaaaagcgaaaaaacctatccagcttttatttttattccagggcaaaggctttccagcaaagatgagccctgctagagttgccaagccatcagatacacttaagaccgcccaggcagatgcaatcacaggcaagggaaatccgagccccaggacaaaaatcgtgactggataaacaagcattcctctggaaaatccctgttttttttcctcgtagcggagtgtctcagcgaataatctcggcatcaccagcagattccagaaaaacgccgcaactgaaaatatcaatgcgtattcaaatccgagccagcggagcggaagtataaacagggcaaccgcgctgtggagcgtttgtcttaagacctccttgaacagggtctcaattctgggctgggttttattcatctgatttgttttcaaagaattttatcattttgcgcttaaaaaccaatccggttctgcggagattgcaatttagcgagaaaaagtgctaaaataaaaaataaaagaggtctgaaaatggcgcgaaaaaagctcggagcgatgcttgaggaaaaaggactgatcaacgagtttcagttggtggcggctttgagccatcagcgtaagtggaagattcgtttgggcaaggctctgctggagcgaggatttatagacgagcggaagctgtttgaggttttggctgagcaatgggagatggagctggttgatctggacaaggtagagataacggatgcggtaaagaaacggctggcgcgggacaagggaatggctttaatggcaatgcctgttcggacggaaggtgatacgctggtggtggcggtttctgagccggatagacctgatatcaagtcggagctggaaaagattactggctcgccagtgaagctggtgatggcaatggatagccagattgaagagatgactcggactctacctgagaaaattccagtgggatcggtcaaaccagtgaaaaaagctttccgcaaaa

SEQ ID NO: 4016 - DNA, 14015 bp, synthetic construct
  source 1..14015: mol_type = other DNA
  misc_feature 1..14015: note = Synthetic
ttaaacctttcctcctttgaacctccgcgttttgcccggcaaaacgcggtgtccccctctatataggacaatcgttacatcgctttttcaggccaaaatcggctctaagtccttgaattcataatcagacttcagaccttagacttcagacttcagaaacagaaatgtcaggcgcagccaaacaaaaaatgaaaaaatattttttccccttatttttcaatgccttataaaactgttgcaaaagcgcacttttgtttggctgggccaaacagcgaggggacaggcacttgtccggtagattattctgaagcctgtcaaaagcacgatagtaaggagatgcgcttggtctctaggcccatgggtgcctgtcccttgccgaaacccgaactccgaatcccgaaaaaaagtggtgccggtctctgaccttgcttggttcttcgtagtcccgcgtattccgcgggacgaagtagaatgaccgcttctgtcatcaactggggttataatagcgagcaatggccgcaagagaaaaaaacgaggcccagtaaactgggcctctgcatgctccgtggagcagcgcttgcggaacgaaactccttactgtgaaaagaagggaatcgccgctttgatacacttgattaaaattatacatactttgaattgcttgtcaagggaaaaatgaaaaaaagcgaaaaatgtttgacattataaataaaagtggtctagtataaaaagtggttaaatgggcgaataaaaggagggtggtaaaatggcggaaaaggatcattttattctggggctggatttagggtcgaattccattggctgggccttgcttaaagcggttccttcggaaaaggaaggccgactcaaaccattcgcaattgaaaaaaccggggtccgcatttttgaggcgggggtggacggagacattgcctcgggcaaggatcaatcaagaggggtggttaggcgggatgcgcgacttactcggcgtcggctggaccgaacttcaagaagattaagccatttattttatctgctaatgagcgcagggcttttgcccgaacatccagcctatcaaaccaaactgggcaaaaagaaaagctctcggcaaaggaaagaagagcggcatttaaaggcccaggcccgccacgaaataatcaaccggcttgaccaggagttgatcaagaaatggcagggcaaagagccaatggcctccgaggtccttccttatctcctccgcgccaaagccctcgaccaaaaactggaacccgatgaatttggccgagccttgttccatcttgcgcagcgccggggcttcttaagcaaccgcaaggccaattccaagaaagatgaagacttcggaatagtaaaagcggatattgagaagttagcgggagaaattgaaggagcaaatgttcgaacccttggtgaatatctttcaaagctcaatcctgagcaaattcgcattcggggtagatggacgggtcgcgatatgtattcggcggagtttgaggagatttggggaaaacaaatagagtactttccgcaaatgttaaatccggaatttagggaaagaattaagaaggctatatttcatcaaaggccattaaagccgccaataatcggagtctgcgaatatgagaaggggagaaaaagagcgccaaaggcgtgccttacgtttcagcgttttcggactttgcagcaactacaaaacaccaaagtcgtaaccaccgatggtgagataaaggaatttaccgaggagcaaatggctttgttgttaaaagagttggacatcaaagaggaactgacattttctcaagttaaggctttgctgaagcccctgaaggttcttaaattcaattttgaaggtcgtggagaaaaagggttccgtggcaatcggactgcggcccaaatcattgatgttattggatttgagaaatggatgggtttacctgttcaagaccgggaagaaattgttcgggatttgatcagcattcaacatgaaaagggattggttaagcgaggcaaggaaaaatggggtctggacgataaaactgccgaaaaattcagcgcaatcgagcttgaagatggctattgcgggctttctcggatggccttatccaagcttctccctttgatggaaaatggaatgaaatatatggaatcggttaagaatgcctatcccgaccgcttcaaaggcgatgcgcgggattgcttgcccatggtgcacgaggaattgcccgagctttccaatccggtggtcaagcgggttcttaccgaactgcgcaaggtggttaatgcgattgttagagaatatggcaagccggcggaaatcaggcttgagcttgttcgggacacaaaaaggaccaggcaaagcagggaaatccactccaagatgaatgaacaaaaccgggctgaaagggataaggccagaaatatactgaaggagattgggatacagaatcccagtcgcgatgatctcgataaatatttattggccgaagaatgcgattggaaatgtccttataccggaaagggcataagtatggccaatctctttggcaagaaccctcaatttcaaattgaacacattatacccttcaagatttgtctcgataattcatttatcaataaaacattatgcgccaatgaagaaaatgctatcaaaggcaaaaaatctccatggcaagcctatggcagcgaccaagaaaggtggagtgatattctaaggcgagtaaaagatttcaaacctctattgaccgtctcagttaagagaaagaatggcaaaggcttcaaaaaggtgaaatcctcgtctgctcaagctaagctggagcggttccaaattgatagtttggagaaattaagcgattttgttgattcacaactcattgataccgcttatgcggcaagcaagggcagggattatttagggctgctttatggcgagaaagctctcggtcgagtccagacgacaaaaggcggtattacatcatacttgcgtgggaaagaaatctgggatctaaaccgaattctttcggagggcggcgacaaagcaagaaccgaccatcgccaccatgccattgacgccatctgcattgccttgaccgatcgagccattgtgaaccaacttagtaaggcttctgaaaatgcgcagaaagaaaagcgtcatcgtttcgggaaaatggatgaaccctggggaaatttttatgaaaaagtaaaagaagccattgaccagacaattgtgtctcaccgggtttccaaaaaggtgaatggacctttgcatgctgaccatatttatagcccacaaaaagtggatgagagaggaaatacctatagtcacattcgcaaacccattgccgctctgaccaacaaggaattggagaatatcgttgatcctgtaatcaagaagctggttatcgaaaaacttaaatcccttgggggtgacatcaagaaatttgagaatatagaaaatcatccttttatggaaaccaaggatggtcgaaaaatccccatcaataaagtgcggataaaaaagccgaatacaaccatcccgattggaaaaccagtcaccctgccggatggaacgcaaaaatttactcgcaatttggaaacaagctcaaatcaccacatagaaatatttgaagcaaaagacaaaaaggggaatccatattgggatgcggatgttgtaacaacctttgaagcgatgcgcaggctgagaaccaagggtaaagaaccaatcgtaaaacggaaccacggagaaggaacaaaatttattttttctcttgccaggaacgaaagcgttctgatgaaggatgataaaggcattcagcaattatggatagttcaaaaaattgggcaaaatcagcaaatgttttttgtcaaaaacactgatgctaggcctgtgtcggaaattcccaaagaaggtaggtctcggtatcccgaaagtcttagagtttcagaggcaaaaaaggtattgattgatccaatgggaaatattcgctgggccaatgactgatccttcttcgcgaaaagcatcagcgcaacttttgggctcattgagtatccttcaggaactggtaattatggaaaaaagataggggctacgaaggatggaccggattctggacttttcggaggaggcggcatttttgagcagccggattgggttgttggtgatcgagcgcaaggataagccggagatcaccatgcccttcagcgatattgccgtaatcatctcttcacacccccaggttcattataccaacgcggccctggccggattgatggaagcgtgtggcgcgttcattgtgtgcaacaacaaatacctcccggtcgggatgcttcttcctattgtgggtcattccacccaaggcgaacggttcctcaagcagacgcaagcctcccagcccacctgcaagcaaatctggaagcagatcgtgagcgaaaagatcaagaaccagggcaaactgctgcaagagctttatggcaaggatgaaggtttgctggccatgtctaaagatgttaaatccggcgacacggagaacctggaagggtgggccagccggaagtattggcccaagatttttggggatgcggaatttttgcgggaccgcgaagccgaggaccagaataaatttcttaactatggttacaccgtcttgagagcgattactgcgagagcagtttgcggggccgggctgcatccctctctcggggttcaccatcacaaccgctacgattcctattgcctggccgacgacctgatggaaccgttccggccgattgttgatcgggcggtcgtgaatctggtaaagggaaaaggggcggctgcgccgctggagaaagaagccaaagccgtcattattggggccttgaccggcaggttcattctggaaggggaggaaaggacccttttcgacatcatcagccggaccgcgtcttccctcgcccaaatttttgaagggcaaaccaatgaattggttttgccggaaatatgatggaaccgcagatggacgcagatgaacgcagataagaaagggggggtaaaaaatgttgactgattcggaaaaagccgatttgaacagcatcaccgataaaattatcggttgcgcctataccgtcagcaataagctgggaaacggctttttggagaaggtttatgaaaatgccttggcctacgaaatcggcagggcagggctgcaggttgaacatcaatacggcatccaggtcaagtatgatggagttctcgtgggcgattacattgccgacttgctggttgagcaaaaggtgattgtggaaatcaaggccgtcaaagccctggacgatatccatctggcccaatgcctcaattatttgaaagcaaccggcttgcccatctgcctgctcataaatttcggcaaaccgaaagtggagataaagaggattgtcaataatttttgagggaaccgcagataaacgcagatggacgcagatattttcaagagaaaaaaaagaaaagtattaaattatattatccgcgttcatctgcgtttatctgcggttaaaatctcttgcggttaaattcccatgccagaaaccaacctcaacctatcggagtatcgtgccatgtggttattcgtattattcgacctaccggtggacaccaaagaagcccgcaaggaatatgcccagttccgcaaatccatcctcaaacagggcttcaccatgctccagttttcggtctatgcccgctacttcgcttccgaggaaaagtcggacatccagcggcataaggtctcggggatcatcccgcccgagggacgggtcagactgctctcggttaccgaccgccagttcggaaagatggatgtcttcttcggaaaaaaccgcgtgccgaccgaagatccgcccatgcaaatgtcatttttctaggcgcaaaaaccaaaaaaaagccccgaaattcaatgatttcggggcgcaagagtgtatcaaagcgccgattcccgtcaagccacagcgaagactgcgtgcaccctcgcatatttcgtaagaaaaggagcgtgttgcgagtcaaggctgtaatcgggcttgcgagcaacacgctaaaaattgagcagacaaaatggtcagtccgggttccgggtgcggaagaactccgccaccagatcaaatgccggttttttattgccgattttgaggaagggctttccgccggaaagcccgtaccctttggcttgcctctatttttctgaggatgaatcagggttccagctctggaagaattcggagacgagatcgaaggcgggctttttttggcggtcataggtaagcaggcctttggtgttcatgagggggactgcgcttttggggcgcttgtcgtcgcggtggtccgcaagcacccaggggatgacgcctttgatgaaggctttgcctttgacaatttttaattgttcctgatagaacctggtttggccttcgagtgtaaaatcgcgggattggccatagccgatgggatagagcttgcccggtttggcgccgggaacgccctcggcgcccaattcggaaatgatgatgggcttgtccggccattttttatggagcgaatcgaggaacggcccgagttggctgaattcgccgtaataccatccgaagtattcgttcacgctgatcaggtccccgatgcccgcggtcatttccagccagggcgtcaccttgcgcgggacggtgacgatggccatggtcacgggccggtcgttgtcaaagcgcttggccaggtcatagagtcggcggtgcaggacgcggatggaggggaaaaaggtgaaactctcgtcgccgagcgaatagatcgccagcgcggggtgattgcggtcgcgctcgatggtttccatcaactcgcgggaggcgttgagaaacagcggctcatgctcggccgcgcggatgcccttatattcccatccgacctggtgcagcgagatctcctccatgaccaggatgccttcgcggtcgcaggcgtcgaggaaacgcggatcattcgggtaatgagaagtgcggaccaggttggcatgcaactcgcgcagcagtttgaggtcttcggcgatccgcgcatcggtctggacccgaccggtttgcgggtcgtcctcatgacggttcacgcccttgatataaaaaggccggccgttcaaataaagcgccgagcctttgacctcgaatttgcggaacccgatttcaaccgattgatcttcccggtcatccggatagatcacccggacttgcagacgatagcggttcccgggcgcatccggcgaccaaggctggatgttctcgatttcgcggtccagcttgaacgcccagacttcttgggcatagatcaggggctcctcgtagagcaaattggcaactggatttcccgcaaggtcataaagggaaaccgtgacaatcggtctcaggtctcgatcgaagtggttatagaccccgccctgcaaagtaagcgctccccgatggtcggtgaacgccgccaacttgcagaccgttatcatcggcccgctctcgatcatggccaggcgatgaatgccgccatacggccaccagcccagcggcccgcgctcatgcacaatgggcgggagcgtgtcccagcttctccggttgtccaccttgatcgccagcaggttttccccgccgtaattcagcaacccggaaacctccaggttccagcgcgtgaagccgcccgagtgcgagcccgcgaattttccgttcagataaacatcgccctggaaggaaacgccgtccaggatgagccggttgaagcggccggaaaaatcccgcggggcggtgaaccttttccgataccagcccgcgcccacataattgagccattccggtttttgaacattccagctacccggaaccggatgatcaaaccattcccggtcgtcaaaagtcggatcgaaccatttttccgccacgccctgatccttggggtcgggctggaacttccaggttccggccaggtccagttgcttatggtccgtgatcggaaaccgcgtgaaatagggaatgccatattcccaaaggatgggcacgccgtccacttccttgaccccgagctttgggtcgctcggcttgaaacagccggccaggatcaaggccgacatcgcgcaaaaatatattgccgcccggggtttcattgcattgtccgtggaatacttttaatatctttccggcgaaatgtaaagcgcgtttgcaacatctcagcgattggttaaagtggggccggattgcggacgcgcgcttaagcaaaataaacgaggtgagcatggcaaggtttgatttgaacggaaaaacggtggtgatcaccggtgccagcgggggcatcggagcggaaaccgcgctggcctttgctcggcgcggggccaagctggcgctgagcggccggaaccgggaattattgcggcagacccgggagcgggtccaggcggccggcgccgaggcttgggtagttccggccgatgtgaccaaacccgaagaggtcaaagacctggtggccaaggccaccgagctgaccggccgtttggatgtcatggttttgggcgcgggcattggcgcggtgggcgaggcgagccggatgccggcggaggatttccggaaactgatggaggtcaacttttggggcgtgctgcacgggttctacgcggccctgccgcattttatcaagcagggctttggacagttcatcatcatcaactcgctctcgggcaagatcgccatgcccatgtcctccaactattgcgccagcaagttcgccctgcgtggttttgccgaggccgcgcagatcgaactgaagggcaaaaacatagacctgatcagcgtctatcccagctttgtggacacgcccttccagaaccgggtgatgacgcaggactacacagtccccaagggcctgagcaaaagctggttcggcgaccggccggaaaaaatcgccgggctcatcgtgaacgccagcgcgcatcgcaagcccgaggtcatctgcaccctctacggaaatttcggggcgcggtttttgcccatgtccgacattctatcctggctctttgagcaacaggcctataccttcgctcgtcggatcctgcggcccaagcgggccacggaaaggagcggcacatgagccggtttgatttgaacggcaaaacggtggttatcaccggggcctccagcgggatcggccgggcggtggcgatggaattcgcgaaacgcggggccaaggtgatcctgagcgcgcgcagcgtcaagccgatggaagaggtcgcggcgaaggtgaaagggcagggcggcgaggcttgggttgttcctgcggatgtgaccaaggaagcggacatgaagatgctggtcgaaaaggcggcggaactgacaggtcagttggatgtgatgttctgcgggtccgggtatggattggtcggccgggtcgagaatatctgcctggacctctggcgccagcagttcgaggtaaacttctggggcgtgctcaactgcttctacgcggccttgcccgtttttcaaaaacagaaatcaggccaatacctgataatgaattccggttcgggcaggttcgggattgcgttctggtccgcctatgccgcgagcaagttcgggctctggggttttgcggacagcgcccgggccgagttgaagcgggacaacattgatgtcatctcgttttatcccggctttgtcaaaaccaatttccacgcgagtctggtcagcccggactgcaaatttcccggcgacatggccgcgacccacggcgggcaggaaccggaatatgtcgcccgctgcattgtcaacgccagcgagaaacggaagggccaggtgatcttccaggccggcaccaatttcgccgcgcgcttcatgcccatctccttcgccttcgcccagatggcccgcaaacaggccatgaaaatgtttatctccatgatgcagcccaagagttgatgaactgaaatagaattttgaattctcaggtcaactgctcatcttcggagaccgctagtgattcctctccattagcgctccttgctgtgacaattttaaccgaagcacacttaatgtctgatctgtttgcgacctggataagagcacttttgtggcagttataacagcgtaaagcttcgctatgattgtagatttcttcttgatttttcttatagattccgccgtacggatttccaaaatatacggctgttatttttccgatttcgcagtcttcatggccggatgtccctaaaaaccgatattcatgctcgtgttcccaagcgcgcagcttgcgggctaataattccttagcttttgcatcatccgatccttgtgcaagatcggcaacatcacttattttgtccagatattttatttccttcacggcattttcgtcaacattgatttcaatggcgatgcctttgaagccattggcgtaatatccccacattgtcggattcttaaagccctcttgaccgctgaacgagcaaatgatatttggttttcgacctaaaaatagataagatattattctcgagtctttccttgtccgaagaatcggggatttcaaataccccctccatcgggtcattaagtttgaaaaaaacttcacaatgaaatttgccttgttctaatatgttcttggcgcgatcaaaagcggtttcatcgccaagagatctaaatttataaagtttgattttgcagctcatgactccctcctgaattttcggtgtgaaaacgactccttcaactcgtctgatgcggcgagcttggtttggtggatggattcccggcaccggattccatccttcacttccatcatcccttttccgttgtgacagggtttcgttgatacaagagcacaccaacgcggcggatgtggtcgaggagaccggggtgcttgagttcggcgaagagggataggtcaatggtgtaggggaggagcaggtcatcgagttcggaagcgatgtcggcgcggaggtccgggttgagttctttgccgcaaagcgtgaggtcaatatcagagccggtcttgaagctgcccttggcgcgggagccatagaggatggctttttccacctgcgggaagcgggcgagcgccgcgcgtattttggcgacggcgctatcgggcagtccgtattccatcagtcggggtttccctggttatagaaggcggagaatttatccttcatgctcttgcaggccggatagaattttctcaggatgtcattggccacggcgtccgccactccggagtcgtaggtatgcgaggtttgattgcgcgtctcgatcattttcatccaggcttcgccgtcctcgatcaggccgttcttgaaggcctcgcgggtggcgtcttttgatccgaccaggccggaaatgcccttgttttcgagataatccttgagcacattccaggccagctcatgggtgaattcgaagctctggatcaagccctgttgttcgagtttggtcaatggccgctggccggccaaactcgcggcctcctcaagggtctgaaaggccttgaggaagttttgaaaccgctgcttccatcgaatatcctgcatcgttttcaattttactcccacgccaagcaaagtcaatttcaattttgcaggccttattctggggcaggggcgggtttgcgtttggcgggcgtggcgctgatcctccttcgctccggatacggagctatggcggatgaggcaggagatattcacgcgcgctaatctgcgggtgcttcggcagttttgcgttttgccggggtggcggaaagaaacagcgcggggaggaggccgccggagatgacgatgagggcggcgatggcgaagacatcgtcataggcgcggaccgcggcggccttgttcacggccagcaataccgcggcctgggtggtttccgggctggaggccattccggtggccgagctgaacagcgagccggcataggcgagtccgggagcggcgccgaggagttcggcgtgcatgatggtccggcgggcgagcaggggtggagaggagtgcgatgccgaacgacccgccggcctgctggccgacattgagcagtccggaagcgatcccggcctggcgcgggtggaccgcgttcagggccgcggttgcgaccggggtgagcatgaaggcgatgccggccccgcggaagatttgcgggtagatgatggcccagcgggacgagtccacatccagggtgctgtaaaaatacaaggacgccgaggcgcaaatcacgccgatggccgcgggccagcgcgcgccgtaggaatcggtgagcctgccggcgatgggcatgaagaaggcgaccgagatggcgcccgggatcatgatgatgccgttctggatggtggaaagccccatcagcctttgcaggaacaccgggagcaggaacaccgctccgaacaaggcggtggagcgggccaccgccaggaccaggccggccgtaaagtcggggatcttgaacatactgagcgggattaccgggtgcggcgtgctggtctcgatcacgatgaagagaacaaaggcgaccgcggccatcacgaaataggtcaggatgagggttgaagtccagccgtggtcctgcccgcggtccagcccgagcaggaggcaaacgaggaacaccccgagcgcgctgaagcccatccagtcgaatgcgggcggcttgaatttgtgctcttgtttggaaaagaccccggcgccgatgatgatcaggatgagtccgaccgggatgttgatggtaaagatcgagcgccactcgaaatattcggtgagataggcgccggcggtggggccgatggtgggagcgaccatggcgccgatcccccagatgccgatggcccgtccgcgctcatgcggctcgaacacctgggtgatcatggccatgcccgcgggctgcatcatgccgccgcccagggcctgaagcacacggaaggtgatcagcgaatctatgttccaggccagcccgcaaaggagtgacccgaaggtgaaaagcccgagcgcggccaggtatagtttcccgtacccgaaccggttcccgagccagccggtgagcggcatcaccaccgcggccgcgagcatgaacgcggtcaggacccattggacttgggagaggttgacctccagcgaggtcatgatgtgaggaagcgcgatattgacgatgctcgaatcgaggatggccatgaaggtcccggtcattaccaccgccagaacttcccagcggttccaggaaggcttgggatgggcggaggactgggacaggggattcgccatcgaaagtctatttggtttgcgcgagcttcggtttcgccacgctcttcccgccgctcacccgcacccggacctcgacattcaggccggggtaaagcggaggcaaatcctggtcggagaaaagcacccgcaccggcacgcgctgggtgaccttgatgaaattgccgctgctggccccggaggggagcaaagagaaacgggagatggacgcgccctcgatattgtcaacatatccgttgaaggagcggcccttgtaagcgtcaaccttgatgaaggccttgccgcccggcttgatcccggagatatcgccttcctcgaaattcgcctccacccacggcagcgagagcacgctgatgctgaacaagcgctggcccggcgtgaccacctggcccgggtcaacatggcgccgcgaaatctggccgtcgaatttagccgccacggtaatctcgtcaaaattatcttgggccaggtccagccgggcctgggccagggcgaggttggctttggccgtctcgacctggttctgcagcatggcgatgtcgagcaaccggggcggcaggttcacggtggaaccgagttgggggttgggggaagtcagaagattcaggcgctgttgcgaagcctgcaagccgctcgcggccacttcatagttggtgcgcgcctggtcaagctgatccttggtcgccactcccggcaaattctccagatgatttttttccttgagcagcaaagccgcct

SEQ ID NO: 4017 - DNA, 23132 bp, synthetic construct
  source 1..23132: mol_type = other DNA
  misc_feature 1..23132: note = Synthetic
ccacaagcgattccttgaccacaccgctcagttcgctgttgagcatttcaatggtgtaatcgacaagccgttcaaacaccttccggggcggggcctttttccagtgttcgccctgaaagccttcctcgatcaggtgcagcatacggtctacggccgttgtctgtacggcgcggaaaaagctctccttgtcctcaaagcggctatagaaggtgccaacggaatatccgcaagcggcggtcagctcgatgatcgagatgtcggcgatatttttctcgcaaagcaggcgcattcctgcgtcgatcaggtcgtttcgcctttgccgactgcgttcctggagggcgggtttaaccccgtcgcttttatgtgtcacggatagcttcataggctctttcatacccgatccggtattttgttggcaatggaaattccattaacaaaaaatacttgaacaaaatctaatcatgactatggttatgctttaagcaatcttagcgtgtcaatagaattaatatcaaacacctgtattaaatatgattttatttggattgcttgcattcgttctgtttttttaacaataataaatataacttttggttgtgattttggcggtggcggatcagtgatcttcatggcttgaccctgccgctctccatcattgaccgaaggggagggaaaatcatgaattggaaagcagtgctttgcggcgccgcagttgccgttgcgttggggtcagggacatcggcggcggttgccgaaaccaagttgaaatatgccacctcagcgcctgtcaagacaccgtgggtggcccatgcgaaccaggtcgccgccgccgtgcaggaagcgacgggcggatcggtcaaaatcgatgtctttccgggaagccagcttggcaacgaacaggatgtcattcggcaggtggcccgtggccgtgtccagatgggggccttttcaaacacggcggccagtttgatcgttccggaaatctcgttgctggcggcaccctatatctgggacaacgtggcgcaggcggactgcgcactggacaatcatatggacgcggtgtttcaggatcggttcaaggaaatggatctggtcttccttggttggacggaagtggggcagatggggtacgcctcggcaaaaccgatcgagagcctgaccgaactgtccggcaagaaagtccgggtggcgcccagcaagacatcctcgctgaccgcagaaagcgtgggggcaaactctgtcatgttgccgatcaccgaagttgcctcggcccttcagaccgggctggtggatagtgcggacctgccgggattggcgtttacctcccttgggattggaaagattgcgccgcactggattgccaccaatcattcccatcaggtgggcgttgtgttgatgagccgcaaggtctggagcaagctgacaccggaagagcaaacgcagatgcaggccgcccgggtcgacccgaccatccttcgcaagcaggtgcgcggggcggaaaaaatgatgttcggcaagtttgaggaagcgggcgggcgcattgtccatccggagggagaagagcttgaccgttggaagcaggcaggagagcaggcgcgacttgccctcgtaaaggaacttggggacaagggcgccgcggtctatgagcaaatccagcaagccaagcgcgcttgttcctcttgagggttcgtgtgatttttcatggggttagccagggcacttaaagcaagaaacagactggaggccggggtgacggtgattgcctatgcggtgaccgccctcagcctgcttgcggacattctcgggcgggagttgttcagtcagggcattgacggggcaccccgtttcgcggtctacgcggccatcattgcggggtttctcgggatgtcgctggcggcggaggatgacagccatatccggccccaggtgtttgattatctggttccccccctgtttgaaaagatgttcagtcgtctggccgatgcggtgtcggcgctgatatatggggggctgggatatctggcggtggggtttgtccgggtgacctatgaaaacggggatattgccccggttctggactggccgatctggccggtgcaactggttctgccctatacgtttttttccatttcgctgcgatatctggtgattacggtggccccgtccctgaagcggcctgacacgtctttgggaagggaaatccggtgacaattcttgggctgatcctgcttcccgttctgcttctgatcctgcgtcagaaccttgtcctgatcctgttttccgtcgcggcctatatccatctgttttttggcgatggtgtccttgaatatatcatcgaggatatgtggatcgggctggacaaggaaatcctgttgtcgatcccgttgttcatcctgtgcggcaatgtgatgacgcggggccggattgcggaacggctgatccgggtggtggccattgtctcgtcgcccttgccgggggggctggcggtggccaccattttgtcctgtgcggtgttctcggccatttcagggtcctcggcggtgacgctgctgtcggtcggggcggtgatgtatccggccctggtcaaggctggttatgacaagaaatttgcccttggggcgttggcatcgggcggtacgctcggggtggtcatcccaccctctatcccgttgatcctgtttgggattgtcacggaaacctcgatcacggacctgttcaaggcgggggtggttccggggctgatcctgaccgggatcatggcggtgtatgcgctgtatcggaaccgctccattccccgccagaggatcgactttcgcgaattggccgcgtgtctgcgggatgggatctggtcgcttctgatgccggttctgttgctgggcgggatttattccggctatttctccccgaccgaggcggcggctgttgcccttgggtatgccctgatcgtcgagattttcattcaccgggacatgcaggcgcaggatttctatggcattgccatttcaacggccaagctgctgggggcgctgtatccgcttctggctgtcgccatgagcctcaacctgttgttgacggcggagcaggtgccgcaagacttgaccaactgggttgcctcgcaggtggaaagcccgctgaccttcctgctggccatcaatcttttgctgctgattgtgggctgttttctggatatcaatgcgggcattctcattctggcgccgatcctgctgccgctggccctcaatttcgggattgatccggttcatcttggcatcatcatggtggtcaatctggaggtggggttcctgaccccgccgatcgggatcaacctgatgatttccatgacggcctttaatgagcggttcaagctgatttgtcagtccgtgataccgtttattgccatcattctggtggtggtggcgcttgtgacctatttcccaaggttgagcctgttcctgaccacgtgatgggtgcgggagcgcggggtggcctaaccgtctgctgtatcgcccggaaggtaaatcacgcgttcctgctgatgcccaagaaggatatccagcaccacccggctgatttcctgcggggcgagcaatcgggcctgaccgttggcggtggccacatgggcgatcacatcggcaaccggcatggattgcgcggcggcaatgtcgtccagggccttttctgtttctgccgtcaggataataccggggcagagggtgaaaaaacggatattgtcgtccgccaattccttgtccagtgacttgccaagggacaagaggccagccttggccgctgcataggcagcctgacccggtgccccgtcaaggacggaggccggggcgaaattgatgacgcatccgtggcccttctcacgaaaatggggcagggcggcctcgatcaggttacgcgcaccagtgaggttggtatcaagaatggtgttccagtcgtcgatccccgtggcgtcaaacggggcggtacagggcagccccgtggcattgatcagggctgtgggcggtccatacaggttgcaggcccattcaagggcggtctcaatctcggcggggttcctgacatcaagcaggccgtcatggacctgcccgccaaatcgggccagaagttgttcccgcttttcatgcagggtaccaaggtcccgtgccatcagggacagggcggcgccttgtgcggcaagggtttcggcaatatgaaacccgaggccccggttgccgccggcaatcaggatatgctgcccggaaagggggccgtttgcttctggcggtttttcctgccttgcctgttcgaccatgcggccgatgctggtccaaggatcactttcaaggtctgaacgtgtcaccattggctccctgtctgtgtcatttgcctgaaggtcaggaaaatgccttgaaggtgatcatggtgaaggtgtccttgatgtggggcagggtctgaatctgctcgttcacgaaatgccctgtatcctgatcgtcatccagatagcatttcatcatcaggtcgtattttccggaaatcgagtagacttccgagacattttccacggacacaacagcttcgttggcaaccacataggccttgccgagttcacatttgaccatgatgaagattgttttcacaagcgcaccctcccgctaacagaatattttcccgttcatagcatgttttccgcaagggtgggaaaaaaccggatagggggcggattggccataaaaaagggcctcaatcgagacccttgttttttattcgcttacggatttccgcatgggaatattgaagaatgccgggacgtgatcgccgagacccagaaccggtgtgtcatcgtcatcgtcatgataccgggaccgacgggaacgggattgtttcttgggtttccagtcatcccgatccgctgaggagcggttttccgggcggctgcgttcagaggaagacgcagacgaggaagaagatgaggatgaggacgacgaagaggatgaggaagaagaggacgaggagcggccccgtgatccctcggagcgggatttccgcggcttccggccgcgagactcgatttccttgccttcatcggcaatctcgtccattccctcaagggtgatggtcgggatttctttgccgatgaccttgtagatggcatccagatatttttcgtcccccttggcggccagggtataggcgtggccttcctgtccggcccggccggtccgaccgatacggtggacataatcttcggcgtgggtgggaacgtcaaagttgaagacgtggctgacgctggaaatatcgataccgcgggcggccacatcggaacaaaccagatgggcgatttcaccagacttgaacttttccagtgtttccatgcggtggctttgtgtcatgtcgccgtgtagggcgccagcattgaagccgtgttttgtcagtgaccccagcaggatatccacatccttcttgcgattgcagaagatgaaggaggtcttgaccgattcatcctgaagaagtttgcgaagggcagggcgtttttcccgtttcaggacggtcagcaggccctgtgtcacggtggtcgccgcagaggagcgagccgccacttccacttccttggggttcatcaggaatttgtcggccagtttgcgcatgtccttggacatggtggcagagaagaacagggtctggcgcagcggcggcatcagggagacgattttttccacatcgggaataaagcccatatccatcatgcggtcggcttcgtcgatcaccagtgtcttgacgccattgagcaggaccttgccccgctcgaaatgatccagcaggcggccgggggtggcaatcagaacgtcaacacccttgtccagcttggcttcctgatcagagaaggaaaccccgccaatcagcagcgccatggacagctttgtgtaacggccataattttcgaagttgtctgcaacctgggcagcaagttcccgtgtcggctccagaatgagggagcgcggcatacgggatttcgtctgtcctgaggacagaatgtcaatcatgggaagagtaaaactcgcggttttacccgttcctgtctgcgccgtgcccaagacgtcccgtcccatcaagacataaggaatggctttttcctgaatgggagtaggggtcgtatatccagagtcttcgacggcgcgaagaacctctgtgctgaggccgagatctgcaaaggtcatacgttagacaactaccacaatattatcaaaatactataaatcactgcgcaatttagtgaataaacccgtgctgtcaaacacttcctgtgatttgacacacgaaacaccgggtgcgacccaaaaatcacacattaatgcttctgttttatgtctgatctatgcttttatgacccgagtagctttgaggtgtccgaaaaacccggatgcacccgttcatgtaaagacaggaaaaatgtctgaaaagaatccccttatccttgtgcccggtcttctgtgtaccgaagatttgtggcgggaccagatacaggccctttccgatctggccgatataaccgttgccgatcattcccttgacgataccatttcggccattgcggaccgggtgctggaaaccgcgccgccggtgtttgatctggcgggcctgtccatgggcggttatgtggcccttgaaatcctgtttcgtgccccggaacgggtgtcccgtctggcgctgatggatacacgggccgatgcggattccccggctgacaagaaaaaacggcaggatttcatcaatctggtacagcggggcaaggccttcaagggggtgacggaaagcctgctgccgatcctgatccatccgtcccggttcgaggataaagccctcgtcaatcgcatttatgatatggcgcaggacattggtcgcgacgccttcatccggcaggaaatggccatcatgacccggaccgattactgggaccggctgccggaaatccagtgcccgacccttgttgtatccggcgcggaagatgcgctgatcccggcggcccaccagaagaaaatggccgatgccatcccggatgcggaattccattccattgcggattgcggtcatcttccgaccatggaaaaaccgtttgaaaccaaccgcctgatgcgagagtggctagactggtagaaaagcaaacgggggcgccagatggcacccccgttttttattgtcgtcgcctgtcccgaagggcaggtcggtatggatattcagcaggctagatatccagattatccgcaaagcgggcattttcctgaatgaaggtaaaccggtgctccggcttcttacccatcaggtgatcgacccgatcggccgtttcgccatattcctccaggggaacctgaacccgcagcaaggtgcgttttgccgggttcatggtggtttccttcagctgggcaggcggcatttcaccaagacccttaaagcggctgatctcaattttgccgcggcccttgaattccttttccatcagttcgtccttgtgcgcatcatccatggcatagatggtcttgccgccttgcgagatgcggtaaagcggcggctgcgccagatacaggtggccgtccgtgatcagttgccgcatttcctgatagaagaaggtcatcagcagcgaggcgatatgcgcgccgtccacgtccgcatcggtcatgatgatgaccttgtcataccgcagatcctcgcgccggtacttgtcgcgggtgccgcagccaagggcctgcatgaggtcggtcagttcctgattggccttgattttggcagaacctgcggacgccacgttcaggatttttccgcgaagcggcaggatggcctgtgttttccggtcgcgtccctgtttggcggacccgcccgcactgtccccttccacgatgaagatttccgtatcgtgggtgccgtgctggctgcaatcggccagcttgccaggaaggcgcaaccggttggttgcggtcttgcggctggtgtccttttcggcccggcggcgcaggcgttcttctgacttggcgatgatccagttcagcaggttattggcctgatccggcgccgaggccagccagttgtcaaaatggtccttaatggcaaggtcaacgatgcgggctgcttcggccgtcgccagcttttccttggtttgaccctgaaactgcggttccgggatgaagacagacagaaccgcgcaggccccgcccagaatgtcatcggcagtgatctgggctgccttcttgttgctgatcagctcgccatatcccttgagaccccggaggagggcggttcggaaaccgctttcatgggtgccgccttcaggggtcgggacggtgttacaataggagttcaaaaaggacaggctgtcggttggccacgcaatggcccattcaacgcggcccttgtcgccctccacctcgatccggccggaaaaggcttcctgtgtgacggtttgccgtccttccacggtggcgtccagaaagtcggacaggccgcccggaaaatgcagggtgtcttctgccggggtatcgtccttgatcagttccggtgccgccttccagcgaatttccacaccccggtacagataggccttggagcggaccatgcggtaaagccgccctggacggagggctgtgcccggctcgaaaatctcgtcatcgggatggaaatggatcatggtgccgcgccggttcggggccgcacccaccttttcaagcggggtcagcggggcgccgcgggaatattcctggcgccacagaaccttgtcgcgggcaacctcgaccaccatttttgacgacagggcgttcaccacggacacacccacaccatgcaggccgcctgcggtgtgatagaccttgttcgagaacttgccgccggaatgcagcgtggtcaggatcacttcaagcgctgacttgtccttgaatttagggtgggggtcgatggggatgccgcgtccgttatcgcggatggacagggaaccatcggcgtgaagctcaacatcgatgcgggaggcaaatccggcaacggcctcgtccatggagttgtccagaacctcggcgcccagatgatggcgcgcccgttcatcggtaccgccgatatacatgccgggccgttttctgaccggttccagcccttcaaggacttcaatatccttggcggaatagtcggacgtctcggttttcggttgttcaaaaaggtcggacataatgtgttttcaaactgaaatggttacctgttgtagacgggatagaatactgttctctcagccgattgaaagtgtataatttacgcaattttatgtttggtcctcagggtattataaaaaatgacttcagaaacacgtgatccgattatcagaaccgccccgcaaccgcgggattgcaacaataatggcgatatttttggcggttgggttttgtcccagatggatattgccgggggcgttctggccgcccgccgggcgcggggccgtgttgtcaccgtcgccgttgaggccatgaccttccaccagccgatcaaggtcggcgatgtggtcagtatttacggcgacatcgtcaaggtggggcgcacctccatgcatatcaagctgaccaccatcgtggcgcgcaaactggacccggaagaaatcaccgtgaccgagggaacctacatcttcgtcgccatcgacgacaacggccgcccccgcgaaatcccgactgcctgatcctgttgccgctgttcgtttgggatagcggcgccttcttgaagctcaagatttctgatccaccggaacagccttgcaagggcaccgctggatcaatgctggcatgatccagcgaataggttttccagatttttccagaaaaattcattcaggcacaaaaaaaagacgcaccggagtgcgccttttcattttgtgaacattgaatcttgttaacgacaagacgccaatttctagaatgctgttgagataaatacccgaaaagttattgtaaggtcaagaataaatatacaatagcgagcagggagctacgacatgaactataagctggcgcttgatttgggatccacatcgattggctgggtggcactggagctggacagaagggagcctgtatcccttcttgatatgggggtgcgtatctttgatgacgggcgggacgacaaatcaaaggaacctttggctgttggcaggcgtctggcgcgagggatgcgccgtaatcgggaccgcaaaaaagaccgggtgttgaaattgcgggatgccctgacccggcatggtttgttcccggaagatagtcttacgcaaaaagcgttggcggggctggatccctatgccttgcgggtcaaggggctggattccgaactggctccggttgagctgggacgcgctttgctgcatatcgcccagcgacgagggttcaagagtaaccgaaaatccgatcggggggataatgaagccgggccggtcaagctggccgcagcctatctggaacaggagatgatgacggcgggtgcccggacactgggcgagtatcttgataaacaggacgtgaagcgggtccgcaagaccgggaaggaatacaacctttatccccttcgaaagatgctggaacaggaggtggagttgctgttggcggaacagcaaaaatatcatggcgccctgctaaccgatgaggtggcagaggagttgaagcatatcatctttttccaaagagagcttcacaaacccaaggtgggcctgtgcgcatttgagtatgaggctggagaggaaagggcgccccatgcctttccgtccgtgcaacggtttcgcatctggcaggaagtcaacaatctggattttgagcggtataatccagatgatccccatatgacacaggaccagaaaaacaggattgcggaaaatcttctgtctggaaaaaaccagaccttcaaacaaatccgcaaagcgttggatttggaggacagtcaacggttcaatctggaaagcgatgccagaagtgaactgaagggggatcagacggccaaaatcctgtccaacaaaaaatgctttggtccggggtggttgaaactatccggggacgaacaggatgaaattgtcgccttcctgctggaagaagaggatgaaggggcggttcttgaatttttgatggatcggtatggcctgtctgctgaaggggcggataatgtttcccatgcacggttgccggatgggatcgggcgtttgtccttgaaggcgattggtaaaattctacctcatttgcggcaagggctaacctatgacaaggcctgcgcggaagcagggtatcaccattccgaccggcgcacgggggaggtgccggaccggctgccctactacggggaaatgctgccccaccgtgtcattcccggagaccgcaccacggcgaatgagggtaagccggaattgttttacggcaaggtcaacaacccgacggttcatattgtcctcaatcaggtgcaaaaactggttaatgcctgtatcgagcgatgggggcatcccgaacagatagccgtggaactggcgcgggatttgaaaatgccagccgaagagcatcgcaagattaatgcccggaaccggaaagagaacgagcggattgccaaggaactggccaaactggatgtacggaacacctatgtcaaccggatgagattcaagatctgggaggacttgtcatcggatccgattgaacgatgctgcccgtttacaggcgtggtgatttccgagacggatattttctcatcgcgtttcgagatcgagcatctgatcccgttctcccaatgttacgatgacgggcgggccaataaggtgctggccctgcaatctgcgaaccgggacaagggaaacagaacgccttttcaggcctttggtagcagtccgaccatcaatggtcattcctatgactggaaccgtattcaggcgcgggccgatcggtttcacaaatcccgtcggtggcggttccgcccggatgcccttgagcaacttgaggaaaagggcgggattattgcccggcaactaaacgatacccgatatctcagccgtctggcgtcagagtatcttcagttcgcttgcctgtccgcccgtgtggataccataccggggcagcttacggccctcatgcggcggaaatgggggctggaatccgaaatctgggatggcgagatcaagaacagggaggatcatcgtcaccatgccatcgatgccttcgtcgtggggtgtaccacgcggggcatgttgcagcggattgccggcgccgcccggaaccttgaaaacaatgccgccctgcaggagaaacgtcacaagctggtagatgacatgccggatccgttccccgggtttctggatcaggtcaaggatcgtttcgagagcatggtgatttcccataagccggaccacggaaacgcacagaaggccatacaatccaaaaatccctatacgatcgcgcggctgcatgaggatacggcctatgggtatgtggggccgtccgaggcaaagggaaaaagctactatgtggtgcgcaagggcgttgaaggactgacaaagcgcaaggatattgaaggtattcgggatgatgttatccggggccggttccttgatgcgatcgaaggcttcaaggacggatccgcagaattttccgaagcccttcaggcggaagcaagagcgcgcgagcctgtgattcacaaggttcgtgtattggtggaaaaaagtgatgccgtcatgatcggtatcaccaacggtcaggaggccgcctttaaattttatcaggggggcagcaacgcctttacggaaatttacagcccgacccatggcaaggatgctggcaagtggttcgccgagaccattcggcagtttgatgcgcaccagcccgatttcagccgtcagtggcgacggaatgaccccacggcccgcctgatcatgcgcctccacaacaatgatatggtggcctatgagcaggatggggtgcggattatcgctcgcgtcaagaaaatgacggggggacgtgtctatttgaggtcccatcagattgcacaggaattgggagataaattgagttgggcagcctcagcaaacgagttggcaaagaggcaagcgcgaaagatttccgttgatattatggggagggttcgtgatcccggaccaaaaacctcatgacggccgggcgtattctggatatcgccgaagatgatattcatctttccgcagagcgggggtttctgatcgtgacgaaaggggggagggaggctgcccgccttccccttgatcaactggatgcggtgattgtccatgctcatggggcctcttacagtaactcgctgcttgtccggcttgcagagcggggctgccccgttgtgttctgcggcaacaatcacgcgccggcgggtgtgatgtggtcggtggaaagccatcatcagcaatcaggccggttcgatttgcaactggcggcgacagtcccgcttcagaaacgactgtggcaggagattgtccgcgcaaaaatccgggggcaggcggaaatgttgcggcgaaacgaaaagccgcatcatgatgccctgttgtccattgccggatatgtgaaatcgggggatcctgaaaatcacgaggcccaggccgcccggcgatactggaaagcatttttcgggccggatttcgtgcgggatcagtccttgcccggcctcaatggcatgttgaactatggttatacggtgctgcgggcccttgtggcacggcaagtgatggccagcggtttgtttcccgggatggggctttatcaccgcaacaagaataacgcccttcgtcttgtggacgacctgatggagccgttccgcccccttgtggatcacgaggtttaccgtctttcgcttgccgggcaccagtcggtggaacgggatgtcaagctggcgctagcctccatcgggaactatccggtgtccctgcctatgggggaaacggatctttccgttgcggtcgaaatgttcgtccgctcccttgtctcctcgttggaggcggggcaggtctctctggtcgtccccgaattcgggttccggctggaggcaacatgatcaagcgactttcgggatacaggttcatgtggatgatggttttgttcgatcttccgaccggcacgaaaaaagagcggaagagagcccatggtttcagaatgtttctcttggatcagggatttgaaatgtcccagttttcagtctatgtgcggtttgtcggggatcggagcaacaccaagcccttcgcccggaagatagaggcagccgcgccagccaatggcaaggtttccatcctcatgttcacagacaagcagttttctgatattatcaatattcgaaacagggagaaaagcaaaccggcatcagagccggaacaaatcctgcttttctgatgggaacaagatgcgaacacagcctcgatttgatgtgaagaagaccggattatccacgatatttcaaatggataacccggtttctattatagcattctagaaatcggcgccaagccgcaactacgttaagcatcgggacctgaataatcgtattatagcattctagaaatcggcgccaagccgcaacctgggtggaggccactctggatatgaagtgattatagcattctagaaatcggcgccaagccgcaacatatatgacgaccatttcagggcgtccagaattatagcattctagaaatcggcgccaagccgcaacatttgcgctgcgcatatcaacaatagcaacattatagcattctagaaatcggcgccaagccgcaaccttcggcttctttggcctcccagtgcttcgattatagcattctagaaatcggcgccaagccgcaacttaaagagcaagctaataatgttcgggcaaattatagcattctagaaatcggcgccaagccgcaacgatatattcatgaaattgcaagcacctttgattatagcattctagaaatcggcgccaagccgcaacgcgccgcatcacctgataaaacgctttttattatagcattctagaaatcggcgccaagccgcaactccacattgtaatcagccattattcaccgtattatagcattctagaaatcggcgccaagccgcaacggaaacgactgagtatatgccaagggagacattatagcattctagaaatcggcgccaagccgcaacaacaccacggtcgggaatgtggatagcggcattatagcattctagaaatcggcgccaagccgcaacatgccagcgattgttccacccattcatccgattatagcattctagaaatcggcgccaagccgcaacggggatgctggttcttggcctgccgccgggattatagcattctagaaatcggcgccaagccgcaacgaaggggatttctgtgtttcgtcctccccgattatagcattctagaaatcggcgccaagccgcaactggtcccgcttggcatggcggaacatgacgattatagcattctagaaatcggcgccaagccgcaacgtgattggcaagcaacagaaacccacaccgattatagcattctagaaatcggcgccaagccgcaactggtctcggcccctttttccgcctgatcgcattatagcattctagaaatcggcgccaagccgcaactggccagcgataccgtcaccaataacgaccattatagcattctagaaatcggcgccaagccgcaacaccagaggaatggttcagcaccttctcgatattatagcattctagaaatcggcgccaagccgcaacgtacccggtgtttttttgttttttttgccgattatagcattctagaaatcggcgccaagccgcaacttgccgccgccaccgccctgggggaccacgattatagcattctagaaatcggcgccaagccgcaacccctgagccgaccggcgccaaggctcggcaattatagcattctagaaatcggcgccaagccgcaactcttttatgtcggcgtgggcgaaaacgaggattatagcattctagaaatcggcgccaagccgcaactaatcgccgcccagaaaggtctgggtcgccattatagcattctagaaatcggcgccaagccgcaacatccattgacggagaaaaaaatggctttcgattatagcattctagaaatcggcgccaagccgcaacccacaaagcacacggccccgagattacgaaattatagcattctagaaatcggcgccaagccgcaacaagcggaaatcgacggtttgcctttggcaaattatagcattctagaaatcggcgccaagccgcaacgcattggccccgctggtaaaggtcaacaggattatagcattctagaaatcggcgccaagccgcaacaaacagctatattgccaaaaaaatgtaaaattatagcattctagaaatcggcgccaagccgcaactgtggatcaggagcgcaaaatggaagcttcattatagcattctagaaatcggcgccaagccgcaacccatattttatttttagtgattgacgacacattatagcattctagaaatcggcgccaagccgcaacgcacttcgcgtcccggactgtctgtccgtaattatagcattctagaaatcggcgccaagccgcaacttcaaaacctctttttcactcaaaacagccattatagcattctagaaatcggcgccaagccgcaacgctcgacaccttgcccattatcgccgttaaattatagcattctagaaatcggcgccaagccgcaacgacgactaccgtcattttagaccttctccattatagcattctagaaatcggcgccaagccgcaactgatggaggtcagggatccacgaatagtcgattatagcattctagaaatcggcgccaagccgcaacgccgtcgccgtattcatattacccggcccgattatagcattctagaaatcggcgccaagccgcaacttacgcattcggtgcttactagcgcttggcattatagcattctagaaatcggcgccaagccgcaactatataaggtccaacttgagatagatatcaattatagcattctagaaatcggcgccaagccgcaactccgtctcctgttcaatggtcagctttcgcattatagcattctagaaatcggcgccaagccgcaacagaaatacagggcggccccttccgggtatcattatagcattctagaaatcggcgccaagccgcaaccggcggtgtcaaaacacacaaaaagacccattatagcattctagaaatcggcgccaagccgcaacacggggaatgtacttgtgctgctccagagaattatagcattctagaaatcggcgccaagccgcaacccgacagcgatgaattcagacactgacatattatagcattctagaaatcggcgccaagggtctagtgggggggggcttttatcagtttattttaatggaagggtgtgtcagggtagcggctgtggtgcggagactacggtgaaattcgacccgccgaagcacgaaggcatttagctgacggagcgaatgggttttataggtcggccccgccgtaccacactctggcagttgtggtccttacttgggggaccggaaaaatcacaaaaaaagggccgcttttcagggcggcccttttcagttttggatgcgagccttagaggctgaaatacatatcgaactcgaccgggtgcggggcgtgttcgaagcggtaaacctcttcccacttcatttcaatataggcgtcgatcatgtcttcggtgaagacgccgcccttggtcaggaagtcccgatctgcattgagggattccagagcttcgcggagagagccggcgacggtcgggatgtcgcgcagttcttctgccggcaggtcgtacagatccttgtccatggcatcgcccggatggatcttgttctggatgccgtccagaccggccatcatcatggccgcgaaggccagatacgggttggcggtgcaatccgggaagcggatttcaacgcgcttgcctttcgggctcggggagtacggaatacggcaggacgcagagcggttgcgggcggaataggccagcagaaccggtgcctcaaaccccgggatcagacgcttgtaggagttggtggacgcgttggtaaaggcgttcagggcctttgcgtgcttgatgataccaccgatataatacaaggctgtttctgacagggccgcataaccggaaccggcaaaggtcgggttgccttccttccagatggactggtgcacatgcataccggagccgttgtcaccggaaaccggtttcggcatgaaggtcgcggtcttgccataggcgtgggccacgttgtggatgacatatttctgccgctggatgttgtcggccgcatcaagaagcgtgttgaagcggaagccgagctcatgctgggacggcgccacttcgtggtggtgcttttcgacgagcagacccatttcgcgggcaacattcaccatttcagagcggatatccgcaccctggtcaaccggctgaaccgggaagtagccgcccttgacacccggacggtggccggtgttgccgccatcgatttccttggcggactggtgcggggcttccacatcatcaagctgatagaaggagtggtggctgccggtctggaagcgcacgtcatcgaacatgaagaattctgtttccggcccgaaataggccgtgtcgccaatgccggtgctggccagataggcttcggccttcttggcgatggagcgcggatcgcgttcgtaattctcgccgctggtcgggtcgagaatgtcgcacatgacaatcagggtcgggtgggccgcaaacggatcgatggtcaccgtgctggggtccggcttcagggtcatgtctgattcgttgatggctttccaccccttgatggaggagccgtcaaacatgatgccgtcctcgaacatgtcgtcgtcaacggcgtccacatgcatggccagatgctgccatttgcccttcgggtccgtgaagcgaaggtcaacatactggatgtctttctctttgatgagatccaaaatctgcgagctcatggtaatatcactttctctagatgtttgagtatagggcacccgtccgcacgcggaggggcatgtttttcggagcgcgggcctagaccgcgtcggctcccttttcaccggtccgaatgcggatcacttcttccacattggacacaaatatcttgccgtcaccgatatgaccggtgcgggcggcgttctggatggcctcaatggcgcgctcgacaagttcgtcctcaagaacgatctcgatcttcaccttgggcaggaaatcgaccacatattctgcaccccggtacagttccgtgtggcctttctgacgaccgaatcccttggcttcggtgaccgtaatacctttcagtccaacttcgtggagggcgtctttgacgtcgtccagcttgaagggcttgatgacagcttcaatttttttcatttgtcacttcttcattagacgttacggggccagagcgactgtgcctgacgttcatgtccaacaatattgcacaacccgtgccagttttgtgaagaaggagaaaaatgcaggggcggcgggaaaccgccattggggaagggggcgtttcaccgcctgcacactattcggtcagaaattttgcctaaataatgggcaggtggtgaaaaaatattcaaaaggcgccgttcaggggccggatacagaccggcttccggtctgcggggagggggctggttattttctgggcaagcgcagcttgtacaggcccttgaagtcgttggggtcggcaacctcgcccttgcggacgatttccaaccggcctttgcgggccagatgaatggcttgctgacgaacggcagtcatatatttgcgccaggcgtctttcggggtgtttgccttggcccggtcggcggcaatggcctgtgccacggcgttgggagaaatttccccgccctcggcgacggcgttcaggatataggtcaccaccggatcatcgggaagttccttttcctcggcggcgatgtctgacggagttttgtcggcgtccataatgtttccttaaatgccctgaacgggcctgtataatctggaagatgggcttttagaatttcccgtcaataaaagcaagaaaagccggtctttgaaagcgggaattgatcagcgatcagtaatgaggcggtttctggtccgccgccgggaccggaaggttctcttcaagcgagacaacccgctgttgggtggtggtcagcttggcctgcagccgttcgatttccgaccactgtcgggtgaccatgtcactgaggtccgtcagggcctgttcctgatgcatgaccgtcaattccagtgtggtcagtcgtttttccagatcgtcagtcatgccgggcctttcccataatccgcttgcgcgtcagttcatgtgaagatatgccttttgggcgcatgaactgcaaggaaagattggttcgagaatggtcaaggaagcaaacacgatattgtccggcttcggcacaacaattttcacggtgatgtccgcgctggcaacccggcatggggccatcaatctggggcagggcttcccggatcaggacgggccagaggatattcgcgatgtggcggcccgcgtcctgatggacgggccgaaccagtatccgcccatgatggggatgctcgagttgcggcaggctgttgccgatcataatcaccgtttctatggaatagcggtcaacccggagacggatatccttgtgacatccggggcgaccgaggctttggcggactgtctgctgggcctgatcaatccgggggacgaggtcgtcctgttcgagccgctttatgattgttacctgccgctggttctgcgggccgggggcgtgccgaaatttgtccgtctggacccgcccaactgggaaatccgcgaagatcgcctgcgcgaagccttttcggagcggaccaagctggtgcttctgaacacgcccatgaacccgaccggcaaggtcttcaccgtggaagagttgcagcgcattgcgcattatgtgcaggaaagcaatgcctatgcggtttgtgatgaggtttatgaacatctggtgttcggggaggcgcggcatgtgccgctggcgaccctgcccggaatggggaaccggaccgtgcggatcgggtcggcagggaaaaccttttccctgaccggctggaaggtcggctatatcaccggctgtacggatctgatcgggcaaattgccaaggcgcaccagttcgtgaccttcacgacctcgccagcgttgcagcttggcgtggcttatggcctgaacaagggcgatgagttctacaccgatttgcggcagtcgttggagggcaagcgggatcgcttgaaaacggggcttgaggccatcggcttcaagacagcggattgtgacggcacctattttatcaatgcggatatccgttccatcggttttgagggtacggacgaggaattctgtcgcttgatcacgaccgaggccggggttgccgccgtaccggtcagcgccttttatgtgggcgagggcgaggaaaaacactttgtccgcttctgtttctgcaagcaggatgcggttctggatcaggccgttcagcgcctgtcagaatttttttcaaaaaaaggggaaactccccttgaccgttccgaagatggggtctaaatagagcgcctcatctgtggcgagtgtagctcagttggttagagcgcctgactgtgactcaggaggtcgccggttcgatcccggtcactcgccccaaaaagaaaccccgcttttgcggggtttttttgtgcctgaattcagcaaactctcatcctttattcacggctcagggcttctttgtggaagcctcgctgggtggaaacaaggtcggtgggcacccatcccatataggaattgacgaaatcctcatcctcgcggatttcggtggcggctttggcaaggtctttcatgaagtccttgttccagtcgcccttggcgcatcccacatggatggtgtcatagggggtttccgcagagacagggataaagctgatcaggtcgcctttcccctgttcgcgggcaaaggcaagggtttcgatcaggcggcccagaacagcgtcaacacggccgaattccaactgtttcaggtcttgcgcccggtcaatattgccctgttgttgcaaaagggagtcgcttttctggtccttgaagcgtttgaggacactgtcgatctcggctgtatagcttttgccatcgtgatacttgaaggtgaattggcccgacgcgaccagttccccaaaatctgcggtgccgtcctctttcaggtagggcgcatatttgtcccggtttgcggcgttgatgatcaacccgttgctcaggttgacgaacagaaacggggagaagtcgataaaggcttcgcgtgccgggttcttctgcagggacggaaagcaaatctgttctcccttctgcatcatttccagaagccgcatcaccgacatggggactttcttgtgttcgtattgcggcagcttttcaatgatcaggtccaactgacggtccatgaaaccggtcccggcgtccttgcctgtgacgatggaggagggcgggaaatggacctgcccccacatgacggaaagtttttctgcgtgaacggttttgagggggagaaacgcagtcgtggccatgagcgcagcggcggcggttgcaaggaaacgcggcattgtacaggatactccatatgaactaatcttgatgtaaagtataaagaacgtcattcatcaagcaatagaaagttgaacggtcttattcgatcagtcgtcctgtttgccgtttttctgttttttccgtccccaccagacttctgcccggcggcgcaggcggcgggcaaagggcaggtcgatggacaggaccacaatcccaagcggcagcatccagaacccgaccacgggaagaaaaccgacaaggccccccacaataagcgcccatcccagcagcaaccggtttcggcgattatccggaatttttatttttttgttgagggtctttttgttcatgatcccatcgttgaaaaaggcgcccggaagggaccgggccaaggctggttcttctatcacatagggggggatgtggggcggtctcaa

SEQ ID NO: 4018 - DNA, 7053 bp, synthetic construct
  source 1..7053: mol_type = other DNA
  misc_feature 1..7053: note = Synthetic
gcatcttaaattagctgcttaatttaaacttaatcagaagccaaaacctcctgatcatatttgaccgatatgtctcaaatcatttgacgacggacaaattgcagcatgatttgaaaatttcacatgacaacttccttgacaccttccgggaggcttgtggatggcggtaggtgggtttataactcgcgataatatttcattatcgaaggtaaaatttagcgtgagaatatgtttttaaatttatttatgttgaataaaaaaagacgcaccggagtgcgccttctcatttgatgaattttgcatcttgttaacgacaagacaccaatttctaaaatgctatgagggtgatggtaatgtatcaggcatgtttttgtcaatctatgaatttactcagtcctaaattgccggagattattaaattcacccatgacttgacgaaagacaaggatgactaacgaatttcgttgtagataatgatgaagaaagcgcaatcttagggacttttgtttttacatgcgtctccttttggtttagcgttgcgtaatacaactgtatatcgggggaataatatgaagtatcgtttagcattagacttgggcgcaacatcacttggctggactattctggctctcgataagaataacgagccgcattctttggtcgatatgggtgtgcgtatttatgatgatgggcgagatgctaagagttttgagccgatggcggtggcaagacgtttggcacgtggggcgcgtcgtaaccgtgatagaaatttggcacgtaagcagcgtttgatggcgttacttgttgagctaaaacttttcccgatctctattgatgagcaaaaatcattagaatctcttgatccctatgagcttagagcgcgcgctttggatgaacagcttacgccctttgagattggtcgtgcgttattccatatcaatcaacgccgtggttttaaaagtaaccgtaaatccgacaaaaagagcaatgatgccggccctgtgaaaaaggcaattgcagatctggagcagaagatgatgatagcaggggcgcgtagtttgggggcgtatctaaatgcacaagaggcgaagcgtgtgcgctatgacggtaaggcatacagtctttatacgatgcgccaaatgtatgttgatgaagtaaagcttattttggacaagcaagcgacgtattatcctgaaatcttgacgcaagatgcttgtgcgcagatcaatgatattattttctttcagcgcgatttacacaagccgaagattggcttttgtacgtttgagtatgaggcaagagagaggcgtgcgccgcttgcgctgccttccgttcaaaatttcagaatttggcaagaggttaataatctggatctggagcaatatacgccaacagacccgcgtcttgaatcggaagacagacaaaaaattattgaaacactacaaatatgcaataagaaaacctttaaggctttgcgcaaggttctggatattgatgatggcgcaaaattcaatctggaatatgatgcgcgtacagagatgaagggcaatgaaacggcggccaaattatcaaataaaaaggctttcgggaaagcatggtttaactttgatgaggatgagcagaatgaaattgtgcttaggcttcttgaggaagaaaatgaggcaacgcttatcgtgtggttgcaagatcaatatgccctttccgaggagcaagccgaatatgtatccgaaattcatttacctgatggctatgggcgggtttctctttgcgcgattaataaaattttgccgcatttaagaaaaggcgagaaatatcatgatgcttgccaaagcgcaggctatcaccactctgattttcgcacgggggagatctttgatcatttaccctattatggtgaagcgttgcagcaccgcgttattggcggtagcttaaacaaagatgatgcacatagcccagagaaattttatggcaaagtaggcaatccaaccgttcatattgttatgaatcaactgcaaaaattggtgaatgcctgtattgataaatggggacaccccgagagcatttctgtggagttagcgcgggatttgaagcagcccaaagacgaaataagaaaacaacaagccaagaataagaaagataatgagcgcattgttgtagagcttgaaaaactggatgttaaaaataactatgccaatcgtatgcgctataagctatgggaagatttaagccgtgagcctaatatgcggtgctgcctttttacaggtgtgactattggcgtgagtgatattttctcaccggaatatgaggtggagcatcttatcccgttctcacgcagttttgatgacgggcgagcaaataaggtgctggccaaacgctctgctaatcgcgttaaggggaataaaacaccatttgatgcctttggacacagcccgacaattggcggagtaacgtataattggaacgatattcaggcacgcgccgatcaattacatagatcaaagcgttggcggtttcagcctgatgctttggaacgagttgagaaagaaggcgggccaattgcacgtcaacttaacgacacacgttacctcagtcgtctggcacgggaatatttgcaatatgtttgtggtcctgaaaacatccattcaattcctgggcggcttacggcctttatgcgcgataagtgggggctgaatgatgttctctcggatagtggtaaaaaagaccgcgcagaccataggcatcatgcaatcgatgcgtttgttgtgggatgcacaacacgaagcacattacaaaaagtatcaggtgcagctaaaaaacttgaagaaaatgaagctctacaggataagcgccataaaatagtgtctgatatgccggagccttatgatggctatctcaagcaagtgcaaagcctgtatgatacaatggtggtttctcataaaccggatcatggcaatgccgctaaagccattaacgccgcccgcccgtataccactggcaagctgcatgaggatacggcttacggctatgtcggtaagggtaataaaaaaggcacatcaagctacgttgtgcgcaaagccgttaacgctatgaccaaacgcgcagatgttgaggcaatcagagatgatcgtatccgttgttatttgctgaaggctgttgagggtgttaaagataagagcaaggattttgaaaccgctttacaaactgctgcacaaaattggagtacgcccatatatcgtgtgcgcactttggttcagaaatctgatgccgttatgattggtataaaagataaaaagacgaaacagccctataaatattatcagggcggaggtaatgcctatactgaaatttatgaaattcttcatggtaaatatgcaggaaaatggaaagcagaaaccatcaaccagtacgatgtgcatacgccatcaagggggcgaaaatggaagatggagcacccaaccgctaaacttgttatgacgctccataataacgatatggttgcttatgatgataatggggaaacgatcattgctcgtgttaagaaaatgagtggtggccgcgtatatttgcgagatcatagaatagcgaatgaggacgccgataaattgagttgggctgcttctgcgaatggtttgaaagagagaaaggcgcggaaaatctctgttgatatccttggttatattcgtgatccacaaaagaaacacaccaacaaacggagcgtggcgtgagtatcggacgaattgtggatatcgaacaagatgatattcacctttcgatcaagcgtggttttttgattatcgagaaagaacgcatagaggccgcgcgtattcccatagatcaaattgacgccgttattgcccatgcgcatgggcttagctataccaataatgttctcgtgaaattggctgagcagggtgctgcctttgtattttgcggggcaaaccattcacccgcgggatatcttataactgccgaaggtcatcataaacaagccgcccgtatcgatgcacaaattagggcatcgtctcgcttaaaggggcgtttgtggaaagatattattcgtgcaaaaattacaaatcaaggcacaaatctaaaacatctaaaccgtccgcatgcggaggctttgttcgccatgagccagcgcgtcaagcttgatgatccagataatctggaggcacaggctgcgcgcagatattggggcgcattattcggcgttgatttcaggcgtgatcgtggaagcgcaggcattaacgcgatgcttaattatggctatgctgttctgcgcgctctaattgtccgaaatattatggctgtaggattacttcctgtgattggcctgcatcattgtaatcaaaataaccccatgcgtttggcggatgatttgatagaacctttgcggccgcttgtcgattttgaggtttataagctggttaatcaagggtttgacagtgttacaccagaggtaaaacgtatcctcgggacgattggccatattgaggtaacacactcaaaaggcgcaacgactttgcgatcgggtattgagtatatgtgcctttcactcgtgcatgtttttaaaaatggaaaaggtagcctcgatataccggattttgcctttattctaacggattagaaaatgagaaaatattcaggatataggcttatgtggatgatggttatttttgatttaccaaccggtacaaaaagggagcgcggtgccgccgcaaaattccgaaataaattgttggatatgggttttgaaatggcgcaattctcagtttatatgcgattttgtggtgatcggagcaaacttgatccttatattaaaaaagtgaaggcatgcgcgcctaagaatgggaaagtctcgattctaatgttcacggataagcagttttctgatacaataaacatatataatcgtgatgtatcaaggccagcgaaggagccggagcaaattgttttattttgatagaaatatgaggcgtttagccgctgtgccaagaaaaaaattatgggcttcttgtctatatttcaacaagataacccataatctattatagcagtttagaaattggtgccaagccgtaacaaggtttgatgggtgaaatcgctgcacagtattatagcagtttagaaattggtgccaagccgtaacacatgcacaacctacatggaaagagtaaacattatagcagtttagaaattggtgccaagccgtaacattcttatgtggttcatgttcatgtatttgattatagcagtttagaaattggtgccaagccgtaacctaatcacgtttataatgcgtatgttccctattatagcagtttagaaattggtgccaagccgtaacatgtatgtgctctcattgtcttaatccttcattatagcagtttagaaattggtgccaagccgtaactgtacggtatgcctcttatattctatttctattatagcagtttagaaattggtgccaagccgtaactaaacaagtgcgtaatagtgcgctggcttattatagcagtttagaaattggtgccaagccgtaacagattatgttgaaaatatcataaaaaataaattatagcagtttagaaattggtgccaagccgtaacataccctcacgcaaggtcactgggctatctattatagcagtttagaaattggtgccaagccgtaacgtgctcctattgttcaaatgattgtaaaatattatagcagtttagaaattggtgccaagccgtaacagccccgaggctttccaacgcgtttcgattattatagcagtttagaaattggtgccaagccgtaactataggactaaatagaaagactaaatgctaattatagcagtttagaaattggtgccaagccgtaactcatagtcagtcattaggtagctccttatgattatagcagtttagaaattggtgccaagccgtaacacgcaagacgaataagaacaagctgaaacaattatagcagtttagaaattggtgccaagccgtaacattagagagccgttggcggtcttgccaccaattatagcagtttagaaattggtgccaagccgtaacgcccacattgtcgcagtgctaaacccaacaattatagcagtttagaaattggtgccaagccgtaacatgtcttgccaacattgattgcacactggcattatagcagtttagaaattggtgccaagccgtaactaggtgcgcacgcggataccgtgaagttcaattatagcagtttagaaattggtgccaagccgtaacttactttcatagagaatggccgcaatttcaattatagcagtttagaaattggtgccaagccgtaacttaaccgcaccaagccagcttatattttgaattatagcagtttagaaattggtgccaagccgtaaccaaaagaatgtagaataattatcttattttattatagcagtttagaaattggtgccaagccgtaactcaacttctcgcgcataatttttaggctcaattatagcagtttagaaattggtgccaagccgtaacagaaaggtgctgctggtacagttaaccttcattatagcagtttagaaattggtgccaagccgtaacgtatcatgctcacgggctgcatcgctctacattatagcagtttagaaattggtgccaagccgtaacacaaaccagcaaaagcccttcaaagagataattatagcagtttagaaattggtgccaagccgtaacatgtactggcggcggttggtcgtgaggattattatagcagtttagaaattggtgccaagccgtaacgtgtctgtcattgtctctatcctaaaattaattatagcagtttagaaattggtgccaagccgtaaccaaataggcctttcccttttctccgcttacattatagcagtttagaaattggtgccaagccgtaactttttatttcttgtaatgctatgccagaggtggtcccagaaattcggacagtatgttaagttctcatattcggcctaaggagggtcaacaatatgagtaaagtacgcaggaaccacccagcaa

SEQ ID NO: 4019 - DNA, 23735 bp, synthetic construct
  misc_feature 1..23735: note = Synthetic
  source 1..23735: mol_type = other DNA
ttgtgatttgctttcattctttgaacaactgatatttgaatcaacaaatggtggctgataaacagctacaaaaccgttgtgatttgctttcattctttgaacaactgatatttgaatcaaccattctaaatttgacaactcaacagctaaagttgtgatttgctttcattctttgaacaactgatatttgaatcaactgaggaaaaattaggttatggtgcatcattgttgtgatttgctttcattctttgaacaactgatatttgaatcaactcatcaaccgtacatagccattcactgtaagttgtgatttgctttcattctttgaacaactgatatttgaatcaacacaaattaattcacataaatcaaaaacaatgttgtgatttgctttcattctttgaacaactgatatttgaatcaacttcatacccagggacatctaccataaatgggttgtgatttgctttcattctttgaacaactgatatttgaatcaacctgatggtgtatttagcctggaaaagcttggttgtgatttgctttcattctttgaacaactgatatttgaatcaacactttggctcgggcttctttccaaatatctgttgtgatttgctttcattctttgaacaactgatatttgaatcaacggcagcgactttagggaacgcgaggctttagttgtgatttgctttcattctttgaacaactgatatttgaatcaacacatttctttttggactttaaccattacaggttgtgatttgctttcattctttgaacaactgatatttgaatcaacacggccatctatccaaacaacagtgtaattgttgtgatttgctttcattctttgaacaactgatatttgaatcaacctaaatggggttttaatgtgcctttcgcatgttgtgatttgctttcattctttgaacaactgatatttgaatcaactttgtcattggtagttacctgttcaaccctgttgtgatttgctttcattctttgaacaactgatatttgaatcaactaaccgcaatttcgggactgccgcgcttgcgttgtgatttgctttcattctttgaacaactgatatttgaatcaacgcgcggctaatgttcccatgctttcggcgagttgtgatttgctttcattctttgaacaactgatatttgaatcaaccaatcggttaaacgtgggaatgaatatgcagttgtgatttgctttcattctttgaacaactgatatttgaatcaactaggagcattcaaatcaacagcaaacagcagttgtgatttgctttcattctttgaacaactgatatttgaatcaacacaatcggttaaacgtgggaatgaatatgcgttgtgatttgctttcattctttgaacaactgatatttgaatcaacatacaacagacaattacaatacaatcggttgttgtgatttgctttcattctttgaacaactgatatttgaatcaacaaaggacgttatcatataacgcaccgacacgttgtgatttgctttcattctttgaacaactgatatttgaatcaaccgcaatcggctctatctttcccggtattgggttgtgatttgctttcattctttgaacaactgatatttgaatcaactgaacccgcagcccttaacaggtttcctacgttgtgatttgctttcattctttgaacaactgatatttgaatcaaccatggccgcttcttttgccctacgggctacgttgtgatttgctttcattctttgaacaactgatatttgaatcaacccattttttctataactacctggccggtatgttgtgatttgctttcattctttgaacaactgatatttgaatcaaccctctcaaaatctcaaaacgacgcattagggttgtgatttgctttcattctttgaacaactgatatttgaatcaacaagtagccaaccaccagcaggaacaccaacgttgtgatttgctttcattctttgaacaactgatatttgaatcaacatttaactggtgcccgtttaattaaagaggttgtgatttgctttcattctttgaacaactgatatttgaatcaacttgtggtagtagcgcctatgatagtacctggttgtgatttgctttcattctttgaacaactgatatttgaatcaacagtacctctatcggaagtcgagagccgatagttgtgatttgctttcattctttgaacaactgatatttgaatcaacaaccaatagcggcggaacgaacccaacaagttgtgatttgctttcattctttgaacaactgatatttgaatcaacgtaccaatgctaatggcaatggccaggcgggttgtgatttgctttcattctttgaacaactgatatttgaatcaacaacgaacccaacaataacgttcacaagcccgttgtgatttgctttcattctttgaacaactgatatttgaatcaactacaaaacacaccaggaatagactgtaacggttgtgatttgctttcattctttgaacaactgatatttgaatcaactaaccgactaaatgttggaatgaacatgcagttgtgatttgctttcattctttgaacaactgatatttgaatcaactaacagactaaacgtcggcatgaatatgcagttgtgatttgctttcattctttgaacaactgatatttgaatcaacgtaccaatgctaatggcaatggccaggcgggttgtgatttgctttcattctttgaacaactgatatttgaatcaacataagcggaggaagctacgaagactgggtgttgtgatttgctttcattctttgaacaactgatatttgaatcaaccttgcacatgggtgtgcggtatggaagtttgttgtgatttgctttcattctttgaacaactgatatttgaatcaacttgctaaacgtccggccgaatataggcaacgttgtgatttgctttcattctttgaacaactgatatttgaatcaacgaggctaaaatacaagtaaagacagcaaaagttgtgatttgctttcattctttgaacaactgatatttgaatcaactaaacatccttttttacgcaagctatctacgttgtgatttgctttcattctttgaacaactgatatttgaatcaactgacttagttaacaggccagaacttgcattgttgtgatttgctttcattctttgaacaactgatatttgaatcaacaataatatacaatcctaaatccaggctgtgttgtgatttgctttcattctttgaacaactgatatttgaatcaacctgccatggtataaaattctaaatatcaattgtttatatcaaaaatcaggaataaaaaatccggttgcataagcttccggattttttatcggtttcgcttttattatcctgtcataattttacaagggcggcaagagggtctctaattaacaaattttaatcctcccctcgctttttgccttaagccttccgctttcagctcaaaataattccagttgctggggcgtatccggtaattctttttcttcttttccgtaaaatagttccatcatgccaaattgtttgtcggtaatggtcatgatgcctacatggcctttgggcggcagtatcttttttacacgtttaatgtgtacgtcggcattttcgcggctgctgcaatggcgcaggtaaatagaaaactggaacatgccgaagccatctttcataatatccttacgaaacttgctgtaaatctgcctgtcctttttggtttcggtaggcaaatcaaaaaaaactaatacccacaaaatccggtattcatttaagcgcatttatcaaaaaggtaattcttcttcgtcgtcatcatcgccggctttgtaatacttcccttcttcttcggcagccaggcttataaaatcttcttccaggtctttatacaacacgccccgccttggtgcaaaatccttcatcatagggtaggttatttttctcagcttcccttcgtaacagcgggccagcgatgtggtggtgttttgtacgcccaccattagtggactgcggcttttttcaaactgcacatcaactgtggcaatagccagtaattgcgatttgatagaattacccagctccaaaaaattctcgccgttatcaatgatgcgcaatacaatcaaatcaacatatggccggtagggttccataatgtcatcggccaggcaataggcattatatttattacggtgatggatgcccagcgtagggatcagccccgaacataccaacccccttgccacaatggcccgtaatatggcgtagccgtaattgagtaagttgttgggcgggtcgccctcccggccgcgaaaaaactctacctttttgggaaacacgtttttccagtaataagccgccgcgcggccctcgtaattatcagggtcgccgctgcgtaccgattttgcccagtgcagcatattatcatgatcgataccccggccggccaatatggccgcctggttcagtattttggcctgcgtagtttgttgccacagctgtttttttaaaggcagcgacgcatcaacctggtaccggaagcgctcgctttgggtatggtgcccgtcaataggcagcatcatgccggtagggtggtgggtatggtcgcaggtaataatggcactgttattattcagcagcgcggctatgcagccatgggtaatggtaatttgctgatgctccagcactacaatgcccacatcctcgataggcaccgactttttggattccttttcgcctaacacttttaaatgcggcaaatcaatcataagctgcccctgactgaggcttaggtaagcaggattgctgaagtgaagcgttcttttaatcatattaacgtgattgtaattattgaacaaatttttcctgccccaccagaggtgaattgcagaggttattggtgttcattgctgctttacccaaaaatcttccgcctatgcttcttcatcccaaaatctttgctccaaaggctacagctgttttatcaattcccgcgccttatcagcattataagcgccatcaatcgccttcttgtcaaacaccataaaataactaaagcgattacccgccagttcggcccatttattgcctaatcggcatttagcctggctgtcggaattatcccggtcgtcgccctttgtctctatcaaaatcaccttacccagtttggtacccacaataaaatcggggtaatgatttgatttatatccgttaatcataaaacccttaccccgccccaggttacgatgccaaaaggtgatgttgggcagcgccgcaatattgcggatcatggtggtttcaaaatcgttcattagtccctcgcgttcatataacgatttgctaacggctccgccgagcattcccggcactatcatttcggggaaagcccaggtagcttcggcttcaatcttgcctatcttaatcaaatcattaaaccgttcctcggcataattatcagcatgctgttttattttggcttttattttatcagcgtagcttaacttcctcactaaaatatcctgaagttgttcggcgttaagtgagcttaagatccgttctatgtaaatcctgatctcctggtcggcaatggggtacatgtcgccaatcatctttatcagttggtgggcaatatcttttacctggttgcttggtggcttagctaaaatgtaggccactacgggttctttcagcaccatgtcttcaattttagtaaagcgggcatcatattcgctttgtccggtttcctcaatatctaccttatataaatccgacgagatctgttcaaaatcaattttgatatcctcattactcagcttaaacaggcttaacaaaggctcctggcttaaaaactccctgccggtaccaaaaatgttggccctgcctgtattcaaataaaactgaggcagctttattcccgcaacatagggtttgccggcagccaccagtttatagcgcttaattttatcgcccatttcttcaaatatttgctcatcggcaggctgcgtgcgttgctggttgatggtggcttgcagcgcagcgctttgtgcaatagccatatcttcaatttttgccaataccgaatcgttagcaacgggtgttatcgtatcacccaaatcaaaatttatccgattggtgtccagttccggatcatcggtccctgttttctccgggaataaaaattgctctaaaacaccgggtatagcagcttgcttctccgtttcggtcatcacatcaatttcccggtaatccttatcgctaaagcccgcggcctgcaagccctgcacaatattttgcagcgtatcgttaaatttggccgaggcagtgagcacatacgatatattgagcagcgatgcgctgtgttttgttacatacggttgccgcagtacccggcctaatatttgttcgacatccactgccgacgatttatcggccagcgaagccagcacataggcaaaagggcaatcccagccttcttttaaagcgttaatggtgataatgtatcgcacctcgcacaagggagatagcagatcttcgcccctaagttcatcaatggtagctgtttttatcctgatctggttttgggggatgccaatggttatcagctggcgtttaagtttttcgtaagtaatgttctcttcgccaatgcggggctgcgcctggaacaatactatcgggcgaatgtacctgccaccctgcttttgctgttcaatggccagcaattccagcttgcgttgcaggtgcagggcgctgtttaccacctcggttttgtcgtggtggttgtacacaattaccggcaactttaccatgtgctcttttttaagttcgatagcaggcaccatgctaatgatgttgctgttgtttttgggcgtagcggttaaatccaacacgaaggatgggttcagcgcattcagcatgtctacacttaagttgctctcggcattgtggctttcgtctacaacaataaccggctgcatactacgcagtacgtttatgagcgatgtctcgtccacatcctgcaataaataacctatattggtgtattgtgaagcgaaagaagctagctgcccgttttcctggtacactttgcggtcttccttgtttttagcccgcagactggcaaagctcattaccactatagacagttgttccttaaccacagcagggttaaagttcaatccctgcagcaaatcttttttttcatacacctctacccggtggttaaacaaactgtttagtttttgacggtaggggtgggccgggttgcttaatgccgataccgtttgccctaataaattgctccatggcaccagccaaactaccacgcggggcattacggccgagtaagcgctaaaaacggtgtgcagtgcgttgcaggcaataaaagttttaccgcccgccgtgggcaccttaatacaaacatgtgccgcgtttggaatggtatttttatacggttgcatgccctcgccgctaagcgggttgtagggaccaatgcgttcctcccaaaacaggttaaaagccctgtccgtttttttatattgctgcacatactccaggtatgtttccaggtcgcgaataactttatattgatagctttttaattccatgttaaaagcggcttaaatcgcgcgggatttttttaaaaacaatgttgtgcctaaacaaaaaatctttagatagcaggcagttatcggcgtatacaatgtattgccccgcctgtacattgatacccaccaggctgtcaaaatcaagcgaggtaagcctttccgggtggtaaataaagtaataagccgtattgtggtgcacacctaacaaagtatcatcggcagcgccgggagtaaacttatccagagcggtccgggtttcgctgtaccatacatagtttttaattttatcaatgcccacggcttcgttcaggtactcccggttttcgcccacaaaaagcggctcgcccaggatataataatcaaaactgccgccggtaccctctttgccgccgtaaccttgcattacccgtttcacccgctcggcggtaatgctttcggcatagtcctccatttcaatgaggataaatttgcggttgccgccatcctttttgttgaggttaagcacggcatgcgcggtagtgccgctgccagcgaaactgtcgaggatgatggagttggaggaggtagctaactgaattatccgttccataagctttatcgctttaggggtttcaaacagcagttcgttttctgaaaaaatagtttttatatcctttttcgcatcttgggtatgacctacttctttataagtccaaacagtcatgggggtgatgccatcttttacttcagaaataaatcgtttaatggccggcacattatttccatcgggaccaaaccaaatacgattgtctgcaattaaatcctgaaatcgcgattctgtataacgccaacaatatcctttcggtgggtaaactatgcgcccacttggtgttgtgatcggatatatttgcttttcgactattgggccgacacttaaatctcctggtttatataagcctcttttgtcgttgtctggatttatatagcgttcattagcttcgtctgttctttttagaagaaaggttagtgcgttaatatctttaccgtaacaaataatgaagtcgtgatttggagaaaaacgcttttttgtattgactggagcatatgctctttgccatatgatattgttaacaaagttgcccccaccaaaaatctcatcacatatgagctttaagactgcctgttcgttatcatcaatagatatgaatatcaccccatcctttgccaacaatttgtgaagtagtaccaatcgcgggtacatcatacaaagccatttatcatgacgggtaaggtcttcgctatctttgccaacaacctggcccagccatttttttaatttgggatgatttacgttgtcattatatacccaactttcgttgccggtattgtaaggcggatctatataaatacatttcaccctgccctcatattcggggagtaatgatttcagcgcttcgaggttatcgccgtggattattttgttggaaggttcgcccaggtcgggaggggcgctggtattgaaagtatactgatgtgccagcactttaaaaggcacatcatgatgatgggtaattactttttcttttccgatccaggttagggttggcataattgtgatgtattaccgcaattccttacatatgccccccttactgacctcaacctacggacggtaccgcgaagaaccagagagaattaaatacagtaaaggaggcacccgtaaagctgcatcactcaactgttccattctctcgtacaaaattcgcggttcttccgtagagaaacggtcagcaacgcttcgcgttgattaataatttggtattaggttgatttaatattctatattttgaaatatggtttaaattatccacaaagtataaaaattatttaacagtaagaaaaataatcaattttattatttaaagacttttgaattaattttttataaatttacttttcaagaatgaaagcaaatcacaataaggattattccgttgtgaaaacatttaaggcggggtaactcgccttttttaattttgaaaaatttaactttctaatatagataatctttttatatctttgaagcgatccaaaaaaaaccacggacaggtggtaatttctggttgcggctgtagtttaatggatagaacagatgcctactaagctccaaaagatgggttcgaatccctccggccgcacaatacaaatataaataaatttaataaggtggttgaatttgattttaatatttcgattatcaatgtattatgcatgcatttttaagagtctatattagttgcgatttgcttcattctttgtaatttgcattcttccatcttattaaattttacctaaatcaatactccatgaaaaaaatccttggtcttgacattggcaccaattctgttggctgggcactggtacatgaaccggagttacccgatgagagttattctattgctggtatcggcgtccgtatcattccactttcgtctgatgaaaacgacgagtttaccaaaggcaacgccatgtctaaaaatgcggatcgtactttaaggcgaggagccaggcgtaatttgcaacgctataaattgcgcagacggcagcttggcattctgttagaagcattaaatatgatgccggataaaaagctgtttcttttaagtgcgcttgatctttatggcttaagagcaaaaggagtaacagaacaattagcattgcaagagattgggcgtatattttttcatcttaaccaaaagcgagggtacaaaagcaatcgtaaggccaataacgatgaagagcaaacagctgttacggcagccgaagaaacggaagcctcgaatgcgaaacccaaaaagaaaggctatcttgatctgatcaacgatcgtgaacaggccttaaaagatgaaggtatcactataggccaacatttttatacacaattattgatcgatgataaaatccgcatcaaagaaaatatttacctgcgcagcacttaccttgatgaatttgaccggatttggaacaaacagcaggcgtattatcctgaagtattaacagaagataataagcaaaagatcaggaatgaaacaatttattaccaacgtccgctccgttcacaaaagggtttagttagcaattgcctgtttgaaaagcaccataaggcaacacctaaaagttcgccactttttcaagtagccaaaatatggcaggaactcaacaacatagaactcaccagttttaaggccatgaaggggcaggagcaaggctttgataaacaaggtaaacgccctttaacgatagaggaaaagcaaagcttatttaatttgctaacagttaaaggtaagttaactacaaaagattgtttgaaggaactcggctacaaatctgggtatgatgaatacaaactaaatatccgcaatgaaaaggaattggaggggaaccgtacttatgcggctataagaaaagtattcgaccactttaagataaaccatgaagaattattgcagtttaaccttacatctgatcaaaaagtaaacaagcaaaccggagaggtatacggtcaattgcaaattggtgccggctttgaaagagaaccgctatttcaactatggcatttgctatattctgttgaggagatagatacacttattgccaaattacaaagccgttacggcttttcgcccgaagcagcgaaagcattggctaaaatagattttgcgaaacaaggttatggtaatttaagtgcaaaggcattcagaaacatcgtgccttatttacaaaaaggtttgaattatgctgaggcctgtaaaacagcgggttataatcattctaattctcaaacaacggctcaaaatgaagcacgtgaccttattgataaattagaactttaccctaaaaatagtttgcgtcaaccggtagtagaaaagatcattaaccaggtaataaaccttgtcaatgaaattattgatgaaaataatggatatgtaaccaaccaggaacgttataagggtgcatttgaaataagggtagaacttgcccgagagttacgtcaaaatgcagaggagcggaataaggcatactcgcgaaatagcaaacaagataaacgccataaagaaatagaagccataattaaacaacttttaccctttagaagagtttcgcgaaacgatattgaacgatataaattatgggaagaatttggtaaagtatcaccttatgagcctcaaaaagcaatatcattaggagaacttttcagtggtgaatatgatattgaacacattattcctaaatcgcgtttgtttgatgattcttttagtaataaaaccatctgtcccaaaaggttaaactcaggaagttttggaagcaaaaatcaaatgacagcacatgattttatgaagtcacaaggcgatcatacctataatgcgtatctggaatttattaaaattcacctttataaaaaggatggaatatccaaagcgaaatttaataaactaatgatgtcgcttgataagataccagaagatttcatcaataggcagttacaagaaacccggtttattactaaagaagtaagaaatcttttaacgcagatatgtaggaatgtacatgcaaccagtggtcccgttacttcagagattagacatttatggggttgggacgatgtgataatggatttgcagatagatagatataagacagttaatcaaactgaattgatagaatatgtaactaacggacaaacgcataaaaaagaaaaaattattggatggagtaaaagagaagaccatcgacatcatgctatagacgctttaacggttgcctgtactaagcaaggctttataaataggattaacaaagtaaatgcccaggaaaatagggatgagatgtttaacgaggtcaagggtacaagatttaatgacaggttatctttacttcaaaagtatttaatcttacaacgaccatttgaaacagcaaaagttctgactgcgatagataacattcttgtttcttttaaatccggcaaaaaggttaccagtaatagcaataatttgattaagcaaggatcatctacgcataaaacaattgaagttattccccgcggctttttgcataaagaaacagtgtatggccgcataaaaagatttaaagaaatttccttatcgcccaggtttaataatttaaaagaagtagcaaggcgagaaataagagcccagataacagaatacctacggcagtttgataatgatataaaacaagctttcaataataaaaacctgtccctgtttaaagaaaggactgggtatgataaggttgtgatttactattatgagcacgtggttagatataaactggatactaattttaaagtggctgatgttgaatctattgttgacgaaggcgtaaaagcaattgttaaagcccatttggcgaagtatggaaataacccgaaggaggcatttaaaaacgagaataccatttggctcaaccaagaaaagggaatagccgcgagatcagtaaggtgttttaccggctacacagatctacaacctttgcataaaaatgagtatggtgagcccatcgactttgttataacacggaataatcaccacatagccatctatcgggataaggatggtaaaatgcaggaaaacactgtgtcattttgggatgcggtgaagaggaaacaggcaaagctgcctgtaattatcaaagaaccgggaatggtatgggatgaggtgataaattcaggtttcgatgaccaggaacttttacagggattaccacagcctgattgggtttacttaacttctttgcagcaaaatgaaatgttcgtgtttgggttagccgataaagaattacaatcggccattagcgttaaaaattatgcattgatcagtaagcatttgtaccgggtacaaaaaatgtcgaagagatcgtctggcgcgatagatctgtggttcagacatcacctcgaaacaaaattagacgacagtttagcagccaaagagttgaataaatttcttaatattcaaagcttaggaggggtaaacgggatgaaagtgaaggttgataacattggccgcattgtaaaggtataacctaagttaatcttataaaagggttttgtattaaaattaatgttgatcgtttaggcaacatccaaccagcataataatcaccaaacaataaagccggtcgcccggctttattccgattagggacaccccgatccgaaattatttctaaagatacaaataagtcgtgtctttttaataatgctgccaatagcgctgctgaagtgccgggatggggcgtaaaaaggtagcacctgcggagcaaaaaacttgtttggcatttcgctacaaatgggtagcctctgccgaggcatagcaccaccgtatgtggcggcagaggcgtgtaggcttgcctgcactattaaagcttatcttgatactcgctacctgataccagcaagcaacgccatatacagttcgcgattgccgggctctgctcataatgacgtgtttgtaagtttctgattgtcaatgacgaaagtttaggacaagatatattcccgcggctgatcttgatgcttgatacttgcgacttgatactttttcatgcagctgtcttgctactcgatactaaaagagacgcccatcagctattcccatgacgccggtcattttcctcggagatggacttacctaaattgccgaaattaaaaaccgggaaaaatcatgaatgggattattgtataccagggtaaatacggcgcaactgagcagtatgcgcaatggctggctgatgagctgcacatgccatttttaaaggcggacgaggctacaccaactatacttgcgggttatgatctggtgattttgggcagttcggtttatgttggtaaactgactattggaaaatggctgaaacggaatagtagcattttggccaacaaaaagatattcttatttattgtgtgcggtacaacggcaggtgataaggcagagcaacggctgctgctgcgtacaaacctggagccaggggttttgaaaacgacgggagtattttttttgccggggcgttgtgttgtttccaaactatcgtggatagatcgctttgttttaaaactgggggccatgctgcaaaaagatccccaaaagaaagcggttatgaaccatgggttcgaccatatgaataagaaaaatttgcggagcctggtttcggcggtaggccaggaatgtgaagtggaagcggtgatgggctcaaaggcaacaaggaggcactgaaatgttgggtaaactgaacgaaatgcagatggaagaactgcttaaaaaacaggttaccgggcgcatagcctgtaccgatgccggtgtaccctacattgtgcccgtaaattatgtttacgacggaaaacaggtgattggccacagtaccatggggaaaaagatagagatgatgcgaaagaacccacgcgtatgtttcgctgtcgacgacattaaaaccatttttaactggcaaagcgtgattgcctggggacggtttgaagagattacggatattgcagaaaaggagcaggccatgatggctattacccaccgtttgatgccctttgccgaaaaaccggccaatcacccgtcgcacggtttatcagagcgggaagatgacatcggcaccaaactcgacctcatcctatataaaatagtgctggttaataaaacaggccggtttgaacggaattgacgcggagtttagggggcatggcgacattgtgccgccgatgacgtgttcggttcaaataaaaatcggttttgaacgccggcgaagactcacccggtcgaggctgcgcccgagcaccctctcttcacctgcggtggaaagggggtcttgaacgcttaatatcaatgttttataaaagataaataatggatttccaagtccctctttccggcgaagccgaagagagggtggcgggcgcagcctcgaccgggtgagtcttcgccgccatgcgatatgcgtcattcctcctccggaatttcgggaaattttaccactcaggataacagctttttatttttgaatgccattttcccttcagaatcctcgaattttaacaattggcatagttttaaagccatacataccttcacagctatcttgatacttactacttgatactctcttcaatttctatccataccgggcaatggtcgctggttttttcccagccgcgtacgttgcggtctacgccagcggattggaggcggtcggctacgtgagggcttaataggaaatggtcgatacggagtccggcgttgcggccgtaggcgttacggaaataatcgaaaaaggtatagatcacctcggtggggtatagcttgcggatagcgtccgtccagccctgatcgaccaggtttttgaaggccaggcgtacctcgggtcgaaataaggcgtcgtccagccagcgctcgggcttgtaaacgtcaagttcggtgggcattacgttgtagtcgccggtaattatagtgggtatgccatgcgccagcaggcccgaggcgtggctggtaaggcgctcaaaccagcgcagcttataatccagtttgggtccgggagcggggttgccgttaggcaggtacaggcaaccgatgacgatgccatttataaatgcttcaatgtagcggctgtgctcgtcgtccgggtcgccgggcaggcctttgcgcagttctttaatctcgtagttgctgcgggccaggatggctacgccgttccagcttttttggccatgccatatagcgttgtagccggcaccggtaatggcctccaacgggaatttatcctggggggcttttagctcctgcaggcaaaccacatcgggggcggtttcggcaagccagcgcagtagcaccggcaggcggccgtttacaccgttaacattataggtagcaattttcatgtatttaaaaattgaatatttgtgtaaaaaagttaacgaaaattaggccataattattaaaaagctgcaactatttgcataaaaagtgcaactatgaaaataatccatgcgtaatctcttccacttccgaatcgccgtagaaaaatatggttaaaccgcgcgcgccatcggtgatggtcaggatgttttcgcgtttgatattgttttcgttgatataaagtgccagccgggccggggtgctgaatgagtcggtttttacgatgatcatggtgaggtgtttttactaagacagaaaagcgacagattttgttacaagcggaaggtttgaaagacaagaatgccccacgtgtaaggtagaagtattgttaagtaaataaggctttgattattagtagtttgtgatgcttggaaaatatccgaacacttaagtttcttataatcaactatttgtatcatcgcccccgaacacccgaacactccacaaaaaaccgaacacccgtacgcacaaaaaagcccgccgttttaagcggcgggcctgtgataggtatatgtagggtgctactttattgtgggcgggcaaagctgcataaaggttactatgctgctggcctcgtatgattgtatgtcgccggtggggcaggctaccgcgtagttacggtaggtgaggttgcgggtagcgtcgcggttttgccagcctgtatttacattggtttgaatccagcttaaatactgggtttggccggcctcggttatcagctgcattacgtactgggcaaatatggctttaagcacgccctgctcgttaaagtcgccttcggcgggtagtatgccgttggtacacaggttgttttttacgtagtcggtatacagcctggcgtcgtccaggtaggcggcatcattgctttgcttgtataatgcgagtgcggcgcctatggctgtccccgagttgtaggtataatcctggccgccggcggggttgttaccaattttgttatcgtttaccttacctgatgcatcaacaaggttggttttgctccaggtgtatatggatttggctttagcaaggtaaccggcgtcgccggtaatggtatacaggcgcatagccgcaattactgtagggaaattgatacaagagtttttaccgctgtgcttaaaatcccaaaacataccgccatccacagaatcataagaacccgcccaaacatggtcaaaaccctctttggctttttgcaggcaggtggcgttgccggtaatttggttagcacgtgccagggccattacccaccacatcatatcgtcgtaaataaaccatacggtttggttgctccagttatagccatcgtaatggttgtagttgccctggtaaatatcgccaatcatggttagctggcttgacgctttggtacgctggtaaacattcatagccatatcccaataaatggcctgtgtccatatagcggccacgccgtcctttttggtggtgctgtaatacagcttgttagctgaatcataaaaggcactgttgaacgcattataggccaggtcagcatcacctgcggtaaagtcctggtcaacaggttttactacggctgttttggcgggtgcggaatctttacccttgctgcagctaacaaagccggtgaaaatacttaatgctaaaaaacaggttaactttttcatagtgatgttttaaatggaattttgccccaaggccggttagggacctggtttaaaagcagcaacgggtgttccgctgctgctatagttatgcggcctgtattaccagcccgggttttgtactaattttttatctgtatccacatcctgctgcggaatagggaaaaagtaatgccgtttgctaaaaacacgggtttcaaacgcaactaccttcaaaaagtcgggcaggtcggcattgatattgaggccgtaaattggcccgttgtcggtttgctcggcaattttccagcggcgcacgtcaaaaaaacgcacgttttcaaaggccagctcaacgcggcgctctttgcgtatagcggtacgcatagccgattgatcggcaggtataggcaaatcggccgagccgtaaaccggtacgccggccctgtcgcggatgagattcaggtatttaagaatatcaggatcgccgggggctgcctcgttcaaggcctctacataatccatataaatattggctaagcgtagcagcatgagtgtgcggccacccacattccagttacctaacccctgcattttacgcacaatataaccggttggcgagtaatcgttaccgccggttgctttgcccgagttgccatgattgtataactgggtggttataagccctgtgttgatatccagccaggtactgccgttataggtaatatccacataaaaacgtggctcgcggtttacccattggttgtaaatgcctgctttggtgtatttggtatcggtagttgaattgccggtacttacatagcccgagcctgcatcggtgatgcttttgccattcgccataaaaaatgcatcaacaatattttgggtagcacccaaaccacccgaaccgcgaacttctgatgcgtagccgttgtgataaggtgtcatttcgtactggcgggagcttaatgagttattggccctggccaggataacctctttgttccagtcggtcaaccagatgtcgcggcatgacaggtaagggtcataattgccgtttgcatcgtttttgcggaacaagtcatacacggtaggtaccaattgagtaatgaaatctttgtaagcatctgaagctgttttccacttggctgcatcataagattggctaatgagttgcttgccatcggcgtttttcatagccgattcatcggtgttgccattgtacagcgggcttgcatccatcaataaagtttgcgccctgaaagccagtgcaatcccttttgtgatacggccgtaattgctatcatttgacggcacagcgggcaactgatcggcagcggcttttaacccggctgatacatagtttgtacactcgtcaaacgaactgcggggcaattgcacatcgctaaaagccgcatcgggcggtattacctcgtcgcccagtaatactacgggcccgtaaaggcgcattaggtagtagtaaaacattccgcgcagggcctgtgcttctgccttgtattgggttttaagggccggcgccatatcctgcactttatcaacgttggctataaaaaacgtagccgaacggatacccttgtaaaaatttgtccagtacgatgatacaaaaccgctgtttgcatcccagttaccaatgtttacatcgtttgatgaaacaaaaccccagtcgtagtcggcttcatcagatgcgcctgtccataaaccggcgttgcgcgatccgccgggaaagcgttgtccaaattcgtcggggatattgctgtatacattggccaggaatttttcggcactggcgcggctgttaaaggtttcgtctaatgataacctgtcgtttggtacctggtctaaatactttttacatgaagtagtagccgttaataccaatattgctgcaaataaaaatatctttttcataatgatgaatggctattggttaaaatttcaggttaaggcctaatgaaatagttttaacactcgggtatttggcgccgtcggcacgtccgttctgatcggtgttaagctccgggtcccataatttaaatttgctgaaggtgagcaggttgtaacctataaggtataacctggcaccttttacatgaaacttatcaaataagccggcgggcaggttataacccagctcggcggtttttaacctgatgaagcttacatccttaacccaccacgaactggcttgcgagttgttgaagttttcgctgtcgccataagccaaacgggggtaaaatacattctgacttgggttttgtggtgtccagcggtcaacagcgttgctataaacattggtttcgccgccatcaccattaaaagggataattccggcaccgcccagcatgatatcggcattagctataccctggaaaaatgcacctacgtaaaagcctttatactccacatttacgccaaaaccgtaaacagttgatggtacatcgccgttaccaatttttgtttggtcataggcgtttatcaagccatcgccatttaaatccttgtatttaatatcgcctggcaatacttttgatttatcgcccggtacggcgctggcatcaatttcggcctgatctttaaataaaccaactgcctggtagccgtatcgcgccaggataggctggccacgatgatcaagccatggatatgtttgcgttggcctgtcatcttcaaccactacagccttgttataggtaaatgtaccgcgcaggcctacattcaccttaccaaaatgggcattgtagtcaagcgtagcatcaatacccttattatttaccacaccaagatttccctcgggctggctaaccaggcccacaaagcctggtaccgattgcctttgcagaaatatgccggtgcggtgttctttaaaaagatcgacaattaatgacaggttatcatgtaatgttcttacctccatgcccagatcctgcttgtgtgattttgcccagcttacgcttacaccataatcggttacgttaataccgtttgagttttcaaaacctttaccaaaagtgtatccgccgttgttaacatctgttagttcggatactatggtcaggtaaccaaacctgcggccggcacctaaatcgtcgctgcccacaaagccatccgaatagcgaaatttcaggaatgtaagtgcatccttaacaggggcgaaaaacttttcgttagatacaacccaacctgcgccaaacgacgggaaaaatccatagcgcctttttgggtcgaagttttcggagccattatagccaaagttggcttcaaaaaagtagcgctcgtcaaaagagtaggtcccacggccggctaaactcaggtaacggtgcggtattgacgatgtaaaatcacctgcaaaagcatctacgccatcctgagcgttccctaatgcaaggccggtaatgtggtgtttgccaaagctgcggtcgtaattaatggcggcctcggtatatgattgccttcggcccccattgttgcgggtgtaacttaaataattgccgctgcctgtataggtgcgcaccaggttaagtgagccatcggcattataggggttattgctgtcggggaaaaaagtatcttcccgtttagaccggttgatactatgatcgctgtagttatcaaatgaaaacatagcggtagcactcagaccttttgtgaaaaatttcaaatcctgggtaacgcgcaggttggtttgtatggtgttattaaagtcggtattgtatccgcggcgggttaaatcggcgtatgggtttctgaaacctccgtttgcagatttgcccggaataaagccccctgggtaggagatggggtactcaaccggcggaacggaaagcgcgttaacaaaaatatcctgggttgaaagcgcagggccgtttgattgggccgcgtatccctgaacaccaagatcgagtttggtggtactgcttattttaaggtttaggttggttgtaaaattatagcgggtataggtaacatccgagttatattgcgcaagctggtctgttttaagaaagccgccttcgttgtaataaccaacagaaacgtaatattgcgcattatcaacaccaccgcttgcattaaagttggcccggcggttgtgcccaagtttattaaaggtggcatcaagccaatcaacatttgggtacagtaacggatcggtgttgttagccgttttgtcaatataatcctgtgtatatttaggagcctgcccacgggtggttaaagcttcatttaccaggttcatgtaggttacgccatcggccagtttggggcggcgtgtaaatgtggttacaccttcgttatagtccaaataaatctgggccttgccaactttgccgcgcttggtttgtaccagcactacgccattagcgccgcgcacgccgtatacagcagtactcgatgcatcttttaatatcgtaaacgacgaaatatcctgcgggtcgatgttgttaatgctacgttccacaccatcaaccaataccagtggatttgatgagccacccccaaaagtagctataccgcgaatccagatatcggcaacatccttgcctggttcgcccgagcgttgtacgccaacaacgcccgaaatcctgccggccagggccgaggtgatgtttgatgttggcagttttaattcttcgatatttacggttgattgcgcgccaataaggcttacctttttttgcacgccatagcctactacagcaacttcgttgaggatattgcctgcctctttcattttaacgttgatggtagtttgtacgccaacggcgatttcggtgttttcgaagcccacgaaggtgaaaattaataccgaagcagaagaggggacagatatggtatactttccattaacatctgttgatgttgccgagtaggtgccttttatggtaaccgtaacaccgggcaatgccacgcccttatcatcggtaaccaacccggttactaaaattgcctggctttcttttacagtttcttcctgggtttttcttttaactacaatggtattgccatcaataacataggttaaacgtttaccggcaaggcaaacagaaagtgcatcctgaatggaagcgttgcgcaggtttacgcttacagatggcgattgctgaatgatttctgcatcgcacaggatgttaaactttgtttgcttttgtatttcgcgaaacacttcctcgagcgaaacatttttttgcgacaggcttatccgctggccatagctttttgcgctaacctgcaataaaaatcctatcattataactaaagttagcttcattattagcaatatcttagtatagatgccgcctggtttacggcataaataatgaggaaaaaaattcataattttgaatagtttgggtttataactgaatatggtttgtcaagatttatataagggtaacccgggctattgccaacaggcatttaattgtccaggagtgttgcaaccacttctggattttttttgcactgtaataaaa

SEQ ID NO: 4020 - DNA, 16019 bp, synthetic construct
  variation 12381..12390: note = note, n is a, c, g, or t
  misc_feature 1..16019: note = Synthetic
  source 1..16019: mol_type = other DNA
  variation 5150..5249: note = note, n is a, c, g, or t
taacgaattgaaacgggtgctgcaaccgggcggtgacctcttatttgtaacgccggtggggaaaccaaaaatcgaatttaatgggcaaagaatttatagctttgaacaaattttaaattatttttcgccttttgaattaatggaattctcacttattcctgaccagggaggcattattaataaagccgatcctgaattggtaaaaaaacaggaatatggctgtggatgtttctggttcaaaaaaattattagctaaagtcctcaaccttatcaagcatttaattctatgtacctccattttagtacctcattagtaaaaaaagggctgtcctttcaactatttgctaagaataaacggattctcctttcatttctcagcattatgctcctatgcaatttgtcccatacacaagttccaggaggtgtgacaacaagtaccctcaaattgtggttcaaaggcaaccagggagttacagcaaccggtggaaatgtatctcaatggaatgacataagcggacaaggaaatgtcactacccaaccttctaagacagcaaacacacatatcacatacagaaacagcggtgctaattataatcctacattattatttgatggtaccaggctcgaacaactaaagggatctgccaataatcttggtggggcccctacacttttcacagtctcaaaatgttccaatacggccttgttcaaccccattttcagtaattttgaaatcaatccaaccattcccgacccaaacctggcaaaggaagtcggtccaggactgttcatatactttaacagctatgtagttgatgcatatgaagcctggcttcctgtttctgctgatgcaccagctgtcaataacaggttagatatcatgactagtatatacggatcatccacctccacagcagatgctgaattataccagaatggcattttagctgatcttcatacaggcccgactaaaccgctgactccgggcagaaaagtgattgaaattggaggaaggtctggcgatgatgcggaattcccgggtcgcatctttaacggtgatattgctgaaatcatttactttactgataggcttggtgctactgatcgccaaaaagtcgagtcttacctggcaataaaatatggtatcaccctaacccaaaactacctttcatcaaacgctacagtcatttatgacgttgcctctcataataaaaggataataggaattggaagagatgatgcttccgttttaaatcaaaaacaatcaaaaggggaaaactatacaccaattcttgaaatagggctttcacaaattgccacagataataacagcaatacatcagcattcacagccgatagagctttttttataacgggtgatgatgatcaaagtcttaccgggacatcaacaggaacacctccgggtattgaatcatggttgatcaggaaatggaaatcaactgttacggggagcgcaatagctaatattgcactacaaatgccatcttcggtattaaatactttacccggcacaggtgatatatctgttctattttcctctaacagtagttttacagctggattaactacacataaaatgaatttatcagggagtagttacactgctgtaataccacaagcacctgcaggaacccggtactttacatttgtaagatgcctgaaacccttaggaggtaatgatatttcaatttgtggcgctacttccattcacgattttcctgatgctttaccctatgaagcctggtcattaattaataatcctcctggatcgtcacctttgattcaacctgcaactggttctgtttcgggcttaacagttgatggcgtttattcgtttgccttaaaaaataataactgcgagtgctatgatactgtcattgtaagaaaaggtacacttcctgttgttactggcgtaggtagcaacagtcctgtttgtgaaggagaacaaataatttttacagcaaccagcagctccaataattatagctggacaggacccaatggctttacctctttttctgcaaatcctgttattgataatgcttcacaattaaattccggaacgtataatttagtgactgataatcttggatgtggagtagccaccgcaataaatgttattgtgaatatcaaaccaacagcggtcgtaacacctgacactaccatttgtacagtaacacctcttcaactggttgcaacgggaggcaattcctatcaatggtctcctccatcaggcctttcaagtacaactataaatagccctattgcttctcctgtttcaaccaccacctatcaggtaattgtcagtaataatggtaattgctctgacactgcttacacaaccatctatttagaccaggcactatgtgatggagaagtttatttccccacggccttcactcctaacggggatggtctaaatgacagctttaaacccggcaatggctttagcattataacggaatttgagttgaaagtgtataacaggtgggggcaattagtattcaaatcaaataatcctgcattgggctgggatggaagatttaaaggcgaaaaacaaccgggcaatgtatttgtctggcaggcaacctataaactggttaatggaaaaaaatattttaaaaaagggacaatactactgatacgataactattattaatgaaaaaaatcctcgttaacatacttaaaagaatcgggatatataatttcttgctgcaacagaaaagaaagcttgacaggcagaaatttgagcaggcagaaaaaagaaatgcacttaggcgtcgccccttctactcacaatttgtatccgctggtgacctggtattcgatgttggtgcaaacgtaggaaaccgggtgcaggtgtttctcgaaattggctgtaaagtggtggcagttgagccacaacaggaatgcattaatgaattaagaaagaaatttggcaactccattgagattgtcgaaaaaggccttggagagaatgaagaacaaaaaacactgtatatatcggataccagcactatttcctctttatctgaagaatggataaatagtgtcaaagaatcaagattcagtcgacatcaatggaacaaaacggtgcagatcgaattaacaacaatggaggcacttatcagtaaatatggcctgccaaaattctgtaaaattgatgtggaaggatacgaattggatgtattaaagggtttgaaacaaacagttccctccatttccttagagtacacggttcctgaacagaccactaagctgctggaatgcatagactattgtaaccggctaaatccaggctatacctataattatgcagcaggagaagaaatggaatttcagctaaaaacgttttgctcatatacagaatttaaaaagctggttcaggataaaacattccaggacaccgggtttggcgatatatatatttccattcgaccattttaaacaagaatatctttcatcaacaacagtcggattatgttcacagtcggtacaaccaatgagttattaagagaccggtggctggaaaaaaaattaaaaaaaattccagcaggcctgaccctgcttgatgcaggtgcaggagaatcgcagtataaaaaatattgcccccatcttaaatatatagcccaggattttggtcaatataatggcgatggtgatgtgggcttacaaatgggaaactgggataataccaaactggatatcatttcagacataactgcaattccattacctgatgcatctgtcgatgttattatgtgcacagaggtattcgaacatattcctgatccgctggccgcattaaaagaatttaacaggctgatcaagccaggcgggtatctcattattactgctccttttgtaagttttactcactttgccccttatcattttgctacaggattcagcagcttcttttatgaaaaacacctggaagcaaatgattttatgattgaagaattagaaaaaagtggcaactactttgagttccttgggcaggaaaacaggcgtattaaaagtatcgccttaaaatatgccaatcacaagatcaatttcttggaaaaggtcattatccaccttaacctgtacatcttacaacgtttgtcgaaaaaagataaaggatcatcggaactgctttgctacggcattcatgtttttgcaagaaaaaaatgattatctcccggatcataggcgggctgggtaaccagctttttcaatatgcggcaggaaaagcactggcactgcggcatcatacagaactattgctggatgtagctgcttttgatgaatacaaactccgcaattttgacctggccgcttttcatacggaattgaattttgccagcaaggagcaagtaagttcatttataaacaggggtattgccggcaagatcagggataatatattcccaatggctttacgtaaggtatataaagaaaagcagtttcattttcaatcccattttttccaggctccttccaatatgtacctgcagggttattggcaaagtgaaaaatatttcttgcccgttgcagaaacaataaaaaaagaatttaccgtcaaagaagagtatacaagaaatgtatcagcagtagcagcaaagcttagttcaactccttctgtgtccgtgcacatccgacggggagattataagagcccaacaactgttgaaatacatggtatactggaagccggatattataacaaggctatccaactgatcagtgaaaaaataccgggagcctgtttctattttttttcggatgatatgagctgggtgaaagaaaacctgtcggttgaaaatgccgtgtatgtatcgggagttatgtcgcaaactcatatcgaagacttctacctcatgtcgcaatgcaaacacaatatcatcgccaacagcagttttggctggtgggccgcctggctgaataataacccggagaaaatagtggtcgccccgaagaactggtttaatgagggaccgaaagatacccaggacctggtcccggagagctggttacgaatctgagtccgaaatatattgcagaaacaaattcattccctttcgcttggcttcatccagctcataactcaaatgcagctggtaatattttttcaggtcatagatannnnnnnnnnnnnnnnnnnnnnnnnnnnnnnnnnnnnnnnnnnnnnnnnnnnnnnnnnnnnnnnnnnnnnnnnnnnnnnnnnnnnnnnnnnnnnnnnnnnttcatccagctcataactcaaatgcagctggtaatattttttcaggtcatagatatcataaggattcgctgccacgatctcatcaagatgattcaatcccatcgcattggccgcattgaagagccggataaaatcatccggcaaaggttttttgcttacccaggccgcaaacacaaagggcagccccgtaatttttttccattccgatcccaggtcaaaaataaacgtggaaatgcggcgttgctccagggccctgtctcctatcactaatccagcagttgtgccctgtatcttgtcccggtacgattcatcttcggcttgtactaattcaggattcacaccccaatactccttcatcagccatttcaataaggcgactgacgaacggctctggtaatcgagataaacggttttgatttcttccatcggcacttcgctgaacaaacaaaccgaagcgatctccgcttcagcaccgatacaataatcacccacgatataataaggatcaaactgcggaatagcagccacgggtatcagtcccacatctacaatatcatccgccagcaactgtaccaatttagcagggtaagcacccaccaattctatctgctcactaatgggcggacgctccagcccccagatcagcggttttgtattcaggtagttaacgataccaacttttatcttctccaattcagctatttttgcggcagcaaaggtagtgaacaaggaacaaggaacaaggaacaaggaacaaggaacaaggaacaaggaacaagcatccagtatccagcaacaagaaaccagcaacactcatggaactaacccccctcaccgctatatccgccattgatggccgttaccgcaagcaggtgcagcacctcgatgaatatttttctgaatatgccctgatgaaataccgggtactgattgaagtggagtatttgttgtttttggaaaaaaagaaattcttcaagctgagtaccaaagccatcaaacacctgcaaaaactggcggctgatttcggccctgaagatgcacaggaaataaaacagattgaatttaccaccaaccatgatgtgaaagcggtggaatacttcctgaaaaatgaactggataaagccggcggcaaagaagccaaagaatggatccattttggattaacctcgcaggatatcaataacaccgccgtaccactttcctggaaacatgccatcgaatatgaatacctgcccggtttattgaacctgaatgcacaattaaaattactggcgcaggaatggcacgatatacccatgctggcccacacacacggacaaccggccagcccgaccaaactgggcaaagagatcatggttttcgtggagagaatagagaaccaggtggaacaattcatcggcatccccttcagtggaaaatttggtggtgccaccggcaatttcaatgcacaccatgtggccttcccgaaaatggattgggtaaaactgggcaacgaatttgtagcgggtatcgggctgaaccgccagcagtttaccacgcagatcgaacattatgataatctctccgctcatttcgattgtatgaagcggatcaataatatcctcctcgatttttcccgtgatgtatggagttatgtgtccatggaatacttcaaacaaaaaacaaagaaaggtgagatcggttcttcggccatgccgcataaagtgaacccaattgattttgaaaatgcagaaggtaatcttggtttagccaatgcggtctttgaacacctggcttccaaattaccggtatcaagattgcagcgtgacctcaccgattctactgtattaagaaatatcggtgtacccgtagcgcatacactgatcgcattccgttcgctggaaaaaggattaagcaaactcatcatcaacgatgcaaagatccacgaagacctggagaataactgggccgtagtagccgaagccgtgcaaactattttgagaagagaaaaatatcccaatccttacgaagcgctgaaagatcttacaagaggaaataataccattgataaaaaagcaatccaccagtttattgatgggctgaaagtaagtgacaccattaaaaaagaattgaaaaagatcaccccgcagaactataccggtgtgaacccgaaatactgattaccgcttcacaataaataccagcagttccttatcgccttccattttcgaaccgaagggttggaacccggctttcagcaatactttttgcgaagccacattcggtgtttctgttacggcataaatttcagaaagtgtggtttgggtccggaaatgatcaagccctgctatagttagttccgttgcataccccttgccccagctttctttgggaaaggcataacccagttgcattttatccgtatcatccgggatcgggatcatcgcaaacgaacccacaaactcatcggtggttttcaggtgaacagcccagcggccatagcccggcatcgcttcataatcggccagctgtttttcaaacgccgccatcgcttcttcccggctctgcaccgggcggatataccgcaccacttcctcatcgccattcagccggaagaaattttcaaaatcctccctcgtgtagcggcgcacctgcaggcggtcagtttcaaatattattgtatcgctcatggttgaattgtccattgaccatggcccatagtccatggtggctccggttagtctttacatgtttatttcaacattcatacttcttacaaacccattcgtgcaattcgtatcatccttggctaactattctttctgcgcagcaacacccaatccgtgttcatctgtgctaatctgtgttaatccgtgttcaatactttctgcgtagcagaaacctatctctgcctcacgactctcacttatgtatctcactcgtaaaatgaaactctatatccgggttattactccgctccgtattcaaaaaccactcactctgcgccaggtacaccatatgcccgtccttatccgcaccaatattcgcctgcttgaaccgggaaaaatccaacagcttttgttcatccttcgaggtcagccagcaggctttataatacggcagggaattaaatataaccgatgccccatattcatgcagcaaccggtactggatcacttcaaactgcagttcacctacacaaccgatgatcttcttatttccgccaaactgggtaaacaactgcgccacgccttcatccgtcagctgcatcaatcctttctctagttgtttcgtcttcatcgggtccttgttcaccacttctttaaagatctccggcgagaaagaaggaatacccgtaaagaaaaaatcttcgccttccgtcagcgtatcaccgatcttgaaattgcccgtatcaaacaaacccaccacatcacccgcataggcatcttcgatcacacttttatcacgggccataaaagaatacgggttgctgaaacggacgtccttatctaagcgtacatgatggaaatatttattccgttcaaacttacccgagcacacccggaaaaaagcgatccggtcccggtgcttcgggtccaggttcgcatggatcttaaatacaaagccactcatcttttcttcctccacgttcacttcccgcaaggtggtgctgcggcttctcggcatcggggcaatacggataaacgtatccagcatttccttcaccccaaaattgttgattgccgagccaaagaacaccggcgccactttaccggcacgatagtcttcaatagtcagttccccatgcaccccatccaccagttccacatcttcccgcaactgggccgcatccttatcgcccagcttctggtccagcaccgggtcgttaatatcagcaatggcgatactgtcctcatcattcgccttggtattcgccgtaaacagcaacaggtttttatcatgcaggttatacacgcctttaaactccttaccgctgttgatcggccaggtcatcgggtgcaggtggatggataattccttttcaatttcttccagcaggtcaaagcggttcttgccatcccggtccattttgttcacaaacacgatcaccggggaatcccgcatccggcacacttccatcaggcggcgggtctggtcttccaccccgttcacactgtccaccaccaggatcacactgtccaccgccgtcagcgtcctgtacgtatcctccgcaaaatccttgtgaccgggagtatccagcaggttgatcagggtattattgtattcaaagctcatcaccgaggtagccacggagatacccctttgccgttcgatctccataaagtcggaggtcgcatgtttcttgatcttattgctcttcaccgctcccgccacctggatggccccgccaaacagcaggaacttctccgtcagggtggtcttgcccgcatccgggtgagagatgatcgcaaatgttcttcgtctcgttatttcgttgtgatatttcataaatggccgcaaaggtaaggcagtaaaggcaatgttggggaagccagcgacaatgcacatggcatcgtctgttgcgtcgcacccttcagggttcggctcattattgagcaaaaaaaaggcgaccctgtttgcacagaaccacctggaatgttttcacaacggtaaaaccttattgtgatttgcttcaaattgtaatatgaaaataaagcctaaaaaataaatctcaaaatcttatttttatagataccattaaactgagctttatgagaaaaattctgggccttgacataggtgtcgcctctattggctgggcttttataaacgaaccagagacagaaaatgaacaatactctattgttcaaatgggaagccggataattcctttaaatcctgatgaaagcgatgaatttacaaaaggtaatgctattagtaaaaatgcaaaccggcgtattaaaaaaggaattcggcgtggcggtcatcgctataaaatgagaaaatggaaattaaataatctgcttgatgagttaggaatgaggcccactcttgatctttttaaattaaattctcttgaattgtatggattgagaaataaagcagtttctgaaaaaatctcccttctggaactgggtagaattttctaccatctgaatcaaaaaagaggctacaagagtaatcggaaagcaaataatgaggaagaaacagttaaagaaactgaagaaaaaatagataaaaagaaaggatatcttgatctgattaacgacagagaagcattactcaaaaataaaggaatcactattggccagtatttttaccaggaacttcagcataacccatggtttcgaataaaggagaatattttcttacgctcaagctaccagaatgagtttaataaaatttgggataagcaaaaggaatattaccccaatatattgtctgatacaaattataaaaaattattttcagaaatcatttacttccaacgtccattaaaaagtcaaaaaaatctgataagcgaatgtaggtttgaattcaccttcgcaaaagataaagagggtaataggatgaaggatgaaaagggagcatttaaaaaaatccatccaaaagtaattgccaaaagttcaccgctatttcaggttgcaaaaatctggcaggatataaacaatcttaaaatcaggagtaaatcaggggaaactattttacttaccaccgagcaaaaaagggagctatttaattatctgaatgaaaatgagaaaataagtattacacaattaaaaagaaaactaaaattaactccacctgaagattattatattaatctcaggaaagatagccttgaaggcaataaaacaactgccgcaattcgaaaagcacttaaaaacgaaagagaagatctgctttcatttacactaaatactcaggtaaagcaggtagtaaaccagcaatctggagaagtagaagaacaacctgttatttcacctgagtttgaaaaggagctgctttttaaattatggcaccttctttattcagtagaggaaaatgaaacacttatcaaaaatcttcaggaagacttcactctcaccgagcaacaggctaagtcattagcaaaaattgatttcaataaaggaggctacggagccattagtacaaaagcatacagaaaaatcattccgcatctcatgaatggcatgatgtatagcaatgcctgcgaagcagcaggctatagacattcagattatttaacgactgaagaaaatactgcaagacccctgcttgacaaactggaattatatgccaaaaacaccttaaggaatccggtagttgaaaaaataataaatcaggtcatcaatctcgttaatgccatcatagccgacgaacaacttggacggccagatgaaataagagtagaactcggcagggaattaaaacaaaatgccgaagaacgtaataaaacatattcaaataatggaaagagagacaaaagacataaagaaattgctgacaggctacaacgggaactgggcttcagaaatgtcagccgcagagatattgaaagggtaaagctatgggaagagttcggaggtgtttccccctatgaaccagacaggcctatttctttaaaacaattattcaatggcgattacgaaattgagcatatcatacccagaagccggttatttgatgatagtttttcaaataaaacaatctccagcaagcagtttaatgtaaagaaggataatgcaaccgccttcgattatattcaaaacctgggagagcaacaattccataattatacggaatttgtaaaaaagaatttttacagaaaggatggtatcagcagaaccaaactcaattacctgctgatgtctggcgaaaatatcccgcaagattttattaaccgtcaaatgagagaaacagcctatatctccagggaagtaaaaaatctgctgatgaatatttgcaggaatgtttacagtactagtggaggagtaactgattatctcagggaaaattggggaatcaacaatattctacagcaattgaactttgaaaaatacaaagatgcgggtcaaacagaaataataaccatcgaaaaggaagatggcagtacgcatcaaaaagaaattatatctaattggagtaaacnnnnnnnnnnaaacgggacgatcacaggcatcacgcaattgatgcattagtggtagcctttacaaaacaatcatacattaataaactaaaccagctaaaccagaattacagcacacaaaaagaattaaaagaaagtggccgaaaattccctgagccatggaaaggatttgttaatgatgccatgaaagccaccgaaaatattcttgtaagctttaaagctggaaaaaaagtagctacaaaaaatgttaaccagattaaaaaaggcaaaaaaatagtaaaggagatagtatcacttacaccccgtgggttcctgcataaagaaacagtttatggccaaataaataggtttgagaaaattaaactaaccccaaaatttacacaatgggacattattgccaacccatcaataaaattacagttggaagaaagattagcagcatttaatggcgatcctcaaaaggctttcaaagacgcagacaaaacacctgttccggctaatctcaaagaaataacagtctatcgaaaagaatttgttgtcagatataatattgatacaaatttcaaacccgccgatgccgaatttataatcgataaaaaaataaaaaaacttgtaaaagaaaggcttgctgaatataataacaaccataaagaagcttttaaaaacctggatgaaaacccaatttggcttgacagggaaaagcaaataccagttaaagcagtaagatgttttaccggcctgtcagatcttacaccgttacacaaaaacgagaatggtgatcctatagatttcgtaagtactagaaacaaccatcatattgccatttataaagactcaacgggtaaattaaaagaaaatgctgttaccttctgggatgcccttgaaagaaaaaagaataatttacctgttgttattaaaaatccgaggaaaacatgggatgacattcttaaaaatggattcgatgaccaaaaagtcttaagccaactgccaaaggatgattgggagtttattaatagtatttcccaatatgaaatgtttgtatttgaattatcaaaagaagaaatgcgaaaagcaattgcactcaatgatttaaaaaaaataagcaaatcactttatcgtgttcaaaaaataagtaagagatccaacggagctcttgatttttggttcagacatcatttggagtctaatctcattgattccaaagaagctaaaagcgttaagaggtatattaatatccaaagtataaacggcttaaatggaattaaagtcaaaataagtaatctgggcaagatcgttcagattggagaatgagttttttataattacaaaaaagccctgcacaataaattacagggcttttttgtttataggggtcataaaccattatcccatgataaagcgaaccctttattttggcaaccccgcatacctgaaaacccaaaacgaacaactcgtttttgaaagccccgagacaggcgaaaccaaacaggttccgattgaagatattggtcttttgtttttagaccaccagcagattactatttcccaggctttgatcgctaaactgctggctaacaacgtagcttttattacttgcgacaatacccaccaccccaccggcatgttactcaacctggatggcaatactttacaaagtgcaaaatttacagcacaggtagaagcaactgttcctttaaaaaagcagctttggcagcaaacagtctccgctaagattatcaaccaggccgccattctggaatggcacaggatgcctgtaaaaaatatgtacaactgggcagcggcagtaaaaagcggtgattcggaaaaccatgaagcaaccgcagccgcctggtactggaaaaatgtatttcctaattttcctgatttcagaagagaacggtttggccccccgcccaataacttactgaattacgggtatgcggtcctcagagccattgtggcccggagtcttgtaggcagcgggttactacctactctcggcatctttcataaaaatcagtataatgcatactgccttgccgatgacattatggaaccctaccggccatttgtggacaggattgttgtagaaataacccggatgaacgggaaattcctggagctgacaccaactatgaaaaagcagctacttgccatcccggcaacagatgtaaaaattaaaggagaaaaaagccccctgatggtggctgtgcaaaaaactactgccagcctggccaaatgctttgaaggaaaatcgagaaagattgaataccctgaatttgtaaaactgcaatgagccgccgttacaatcaacgcttaaatgcctatcgcatcatgtgggtacttgtactttttgacctgccaaccgaaactaaaaaggatcggaaagcttattcccggttcaggaaaagaatcatggatgatggctttcagatgttccagttcagcatttatatgcggcactgccccagccgggaaaatgctgaagtccacataaaacgggtcaaaggcattttaccggaaaagggtcatgttggcattttccagtttactgacaaacaattcggtatggtcgaactgttctatggaaagtccccccaaagtccaagttcgcctgttcagcagctggaaatgttctaaaaaacttctccaataggattgaaaaaaagcatttggaacccggatttttcatcctgattttggctccaaatgctgttccagaaaggctttcggccaaaccagttgtgtaagaactaagatacaatacaatttgaaagcaaatcacaacaaagggactgctggaatgaaacgcagaagcgttgtgtaagaactaagatacaatacaatttgaaagcaaatcacaacataacccctgatgttatttatgttctggacgttgtgtaagaactaagatacaatacaatttgaaagcaaatcacaacacgagtgcattgaaggtgttcgtcgtttggttgtgtaagaactaagatacaatacaatttgaaagcaaatcacaacacaagtgtatcatatgttataaaatcatggttgtgtaagaactaagatacaatacaatttgaaagcaaatcacaactagccaatattagaaccgttttggtaatacgttgtgtaagaactaagatacaatacaatttgaaagcaaatcacaacgctattgttgttcttggcgttcttatcgcagttgtgtaagaactaagatacaatacaatttgaaagcaaatcacaacagcagctatagcaaacgacaaggaaagtttgttgtgtaagaactaagatacaatacaatttgaaagcaaatcacaactttccgttttgttttccccttgttgattgtgttgtgtaagaactaagatacaatacaatttgaaagcaaatcacaacttgcaattctatcgtcacaaaatagaactagttgtgtaagaactaagatacaatacaatttgaaagcaaatcacaaccgaggatttctaaatatgtttcctctaaaggttgtgtaagaactaagatacaatacaatttgaaagcaaatcacaactaaaggggcttcggaaaaacaatcccaaaagttgtgtaagaactaagatacaatacaatttgaaagcaaatcacaacttgcaatt

SEQ ID NO: 4021 - DNA, 16528 bp, synthetic construct
  misc_feature 1..16528: note = Synthetic
  source 1..16528: mol_type = other DNA
  variation 13474: note = note, n is a, c, g, or t
gacctccgcacactgggtcggagtgttgcgctccttgcgcaaggaggatggtgggggaaacttaccgttgcgctcagcattgcaacgttgctaggatttgctgttcttgttccgctggaaccaacgattcagcagcaatggcttcgctggccgggtacgacactctttttggcttttctctgtgcgttctgttttgcgattctggggagctcgatccgtccgttgcctgccactgctcggcttgtggtcgctgcgtacctggtgtggtacatgctcctgggaccgtttctgacgttgcctcgttggcttgcgttgctgccagtttgggtcctctaccttgtcgagctacaatgccgtccggcgtggtattggattgttgggtggtcgctcttgctcggaaggcttagttggcagctcaccagtcccgttgagctttcgattgctgcgtgggcggcgttctacactgctatcggcttgcttgtaagcagagtgtctctgctcgagcgcatggatggtcggatcacgctctttgcagctcttggcacggtctatgccatcgcagggcttgaggacatcacaacgctctcggagactgtccgtgcaggtattgacgcgatcggagattttgtcggcatattctggatctggctggcagttgatttgatcgaagatgcaacgcgcgcagcataccacgttgctcgacggctgcagcgatggtttgctcgccgatggcatttgctgcttgcagggagcatgatcgcaagtgcagcactggctgcaatcattgcatccatcgcatttccagcagcactggcgtggagagaaggaacgctgctgtgcggtggactgcttgcattcgtcggaggaacgacgctctggcgctcccgtgtgagttcggatttggcagacatcggacacgatgctgtcatcgcaacgattgtcgtcggtttggtttacatggcaggggctgcgctctgggaatcctcccaaacaacacagtcgcttgtcggctggcaagtgctcctggcagcagccccgctggtgctcgaagaactcaaagctactgctggtggcatccagcaccagtctcatcgtctggtggttgcggctcttggtgtactggggcttgctgccaccgcagttcaatttgccaatcggagcaccgtcgcaatggaagcgacaatcacagcgcccctggtagggcttctgcatattgggttgccgtaccttgccggacgcatcgttctcggttgggatgtcgcgatcgagcctgcccggctatttttgatcgggtatggtgctgcatatccggcagttttactcggacctgcgattagcagcggctctgctgctcttgcagtgctgctatggtacatcctgctgcggcggtcagagatcgtgtcaatgtcaccacgcgaacgaatcgcggcactggcgatcgttgctggagggacgctgtcgttttactgcattcctttggttgtcccaatcccattcctcccttgggcaccagtaattctcgaacgactcaacgctgcgggcgctcctccattgctgagcaccgggcacctggtgatttggggagcactactggcagctgctgccatcctcggtcgctggtaccgaacaccgcttgcgtgggtaggtgcagcagctctcgttgcactcgtctgccggcttgttggctaacacttcaggtacacgatcgccccatcgagggttcgaataaggcagttgcggtcgcaacgcaaaagaaccgtcccaggcgctgcgtttcgaaatcgttcctgtaagtagggatgagtgatctgctgtgcatcgtaggcgacaactgtgcgatcggcaagatgcacagtgcaaccttgggtggatacgccaaatgcccgaactcggcggagaagctccgagctgggagttgttgtcgcatcgcacgtcatgtcctctgggcgacgcgtataggaacttggctcgccgtgctgcggagtgccgcggtaggtaaaatcgctggcggccaacttctccagcgctcgctgcatggcttcggcttcgagcaatctggaaattgcatagagcagcgcaagatccaactcctcggtccgctcgatgcaccgctgcgcaatgactgcaccggtgtcgaactcttcctccatcacatggacgctcgcaccaatccgaggttcgtcgttcagaattgcaccgttgagcggatgtgcacctcgcaagcgcggcaagcacgaaggatgcacgttgaggaacagtgcatccggcatccgctctcgcaagcgcgcaatcggaagtttccacggacaccccacagagaggagaacgtcgaacgctgttgattcaatcgcggccagggcagcagctttctccccaggctcgactgtgacggtgggcaatcctcgcacgtgcgcagcacgctctaagtgggaacctcttatcgcgatgcaaccagtcagatcaactgccgaatgtgctgcgagcacgtccagtacactatctcgctgaccgatcagcaggaaacgtttggtcatggcgccaccttttgctcgaacaagccaacccggtagcggaggaaatatcgcccgtagcaggcaactttgtcgggatgttcgcgttcccactgcgcgcagagtttctcgtaggtcggccgatggtggagccgaaaaccgacgaatgcgggcagacagaaattcccaaactttgatttgtagcggtagagcgagtcgcttgggtccgtcgtcgttccaccgccgaggctgactgctgtgatatgtcgcgcagcagcatcttcgagcagtgaagcaaagagcatatcattggggcgcaagtgccaccaccgctcattagaggcgccgaggtgataggttatcgttgactggcttttcaggagcatgagcgcggcgatcggctcaccgttggcgagggcaacgcggtattcgactcgatcaggcaggaaatctgcgcagcgttcgaagtacgaccgggggaagcggtagaacgcatccatcccgattcgatctgccgtgcacgcatagagtgccgaaaaaatcggagtaccttctcgagccgagatgcactcaattcgaacaccccctcgctctgcacgtcggatattcctccgcgtggcagcatcgagcgcactaagcgctgtctgcggtggcagtgcatagacgttcgtccgcacgcagcggtactccgcagcgcgtgcgtggctcggtgttcggtgcacgagtggatgtgcacgaataaattccgcaacgacgccttgctcctgcatccagtggtcaattgctgcattgaactgttcgagctgctgtgtttctacaggcgctgaagtaatgatgccgccgtagccgtagaacgactgcgcatcgtagcgccaatgaggatcacatgcgtaagggacttcgccaagcaaaaagcagtagaggaactctatgccaccgtcatgagcgtagagcgcaacggcagttccgtcttcccagcccagccatgtcgcacagtacgcggggtcgtagtacacatctgcacgctcagcgggaaaacgctcgacgcacgcacgccactgggaaggaatcggttcaccaagagcgaacatccatgtttccagttccataccgggtggaggcgcaaagacaatgccaattgcacgctttgctgtatcttcgttggtatggtatcaacaaacatgcacaccaacatgcaacgtcacagctttgtttctccagaagagcttcgcacgcttcaatcggtgcgtgggtatccattgattacgattgcaatgccaacgcaccgcgcattcccagaaaacaagcaggaccctattcgcttcaaggatcttgtcagagcgacgcgccagcgattaagcaacgagctcaacaagcgtgaagtccacgagattgacttgcaacttgcctcccttgcagagcgcattgactgggcacacacgctcgatgggcttgtaatttttctcggaggaggaatcgagcgcatagtctatctgccggtatctgtccgtgagcgcgttatcattgatgaaacatttgccacacgcgatcttgttgttgcacaatcgaagctcctgcggtactgggttcttgcactgagcactgaaaccactcggctgtttgaagggtggggcgatcagctcctcgaggtggaatcggaatacttcccgatggtgtacgatggtccacgttcgggagacccggacaatcccctacctgggggttttggtatcgatccatcgaaataccgcgatgagcagtaccgcaagtatttccgcagcgtggataaggcactctgcaccagcattggtcaacccaacgcgccagttgttgtcatcggtgtcgtccgcaaccgcgcgttgtttgcacagatgcgttcgtgtgattacgaagtcatcgccgagctcgatggaagcgttgagcgggaaacagtccaccagattgccaagcgagtccaacccgcactcgagcaatatttcgagcgtcgcgcacaggctgcactggcagagcttcgagcagcaattgcggcgggactctacacttgttcactggcagatatgtggcactactcgcggcaagggcgcgcatcgcttcttattgtcgaacgcgactatgcagttgctggccgatgggacgaagaacggaaaacatttaccatcgtggaggaccccagcgagcctggcatcattgacgacatcgttgacgacattatcgaagcaacgctccttcaccacggtcgcgttgaatttgtctccccaggtacactcaccgagtgcgcgcatattgcgatggccctacgctactaaggttcgacgggttcatgctcggggcattcgacgcgcaaatcgagcggagctaactccaggttgagaagttggcagaagtacggcgtcgttacactccgctcatcgtagcggagccagcggcaggtaagacacatgcgtggcatcgtaatcacgccgagctggtaaagctgctttaggagctgcagcagtgcttcgtacccaagctcccgctgaggaagcggcacgtgctcgagcgcgttgcggagcggtgcatcccacgcccgaatgcgctccagtatacgttcgccctgcgctgtaagcagtacgacaatcccgcgccggtcctctgggttcggtttgcgctcgataaaccctttccgctccagcgctgcaagcgtatcgctcatagtcggtgcagtcacattgagttcagcggcaagactggtcggcgtaagagcctgtccacggcgggctgcacagagcatcaacacttggagctgtatgggatagagtccctcagcataagcagcattccactgcaaaccgcggagaacggcactgagccgttcaatagcggcaataaactggtgctggtttgttcgttctacgctcataccacatgcaaacataaacaggggcgggtaaatgcgctgcccgcccctgcgaatccatccacgattacggccgccactggctgaacacgtagtcgcggttggcttgcccagtgtggcaagtgtagcaatccttgacggggtccttgacaacaggctctcggctatcccctttgaatgcctggaacccccagccgccggtctctttgtacttttttgcgttcttaaccatgactgccgtcaccttccgtgcaccttcgctgatcgcgtgctctgcctctggcgcctcgaagagatcgaagacgagcactgaaccatcggggaacttcccgtgccctgccttgagcaccttgagtgccttgtcgttggcgtagatgtgatggattccaccgaacccatcgtaaagcggatgtcccggacgcagaatgagcgttttgacatgcgtccacgaacgatagccctcaggatagggcaccgatgctgagccgctcccagcggcaaatccgaccaatgctgcagttgcagcaacaagcagagaccatccaagaatccgacgcatcgcacacctccgatacatgtgaaacattcattggagtattaggactccttacgaatgcaaaaatacgatcagcatgcgcgaaatgcaagaccccaggaaaaaattgcattcagttacttgtgaaatgccagctgtatctgttgaaaattgatttctgatgcgattgccaacgaatgggagtatagaattttgtcaacaatgctgtatatttgcggttgaattggtttcacacactgcatctggaacgcaatgccttcaaaaacgaaacccaagattactcttgcgcagcgcctttcgggtattcagcagattattctggcggaagttcgagctgcgcaacaccgcctaaaccaggctgttgatgcaggcgattatacagcgatccaaaacatgcttgcgcacttccaacgcatcatggaaatgcgccaactttccgagaagctgctggacctggcccgtgctgagaaagcatccccacctgcaccaccagctccacgccctgcttctgagccaacaagcatagccactccagcaccgacaaaaaaagtagcgaaaccctctacagaaaaaacaccagcgaagaagcccaccgcgaaaaaaccaagtactactgctgcgaaaaaatcagccacgcccaaacaagcagcaaaacaagcagcccgagcaaatgcttctgtcaccacgaatgctgcaacgccatctactccaggagcacctgcagggcctggcacgtcggaggcagcacccgcaccaatgaaacgccgggggccaacccccacaggactacgcactccggagcgagcgtttgttctcccaattttacaaacactcgccgagaaaggtggccaagccgatgctgcgtcagtcgtcgagggcgtgttggagcgaatgcgccaccagctcaaacagagcgacttcgaaaccaccgctacctcggatcaaccgcggtggaaagtatcgctctatctggcacgctcggcaatggtgcgacaaggcctcctccgcaacgatacaccgcgaggtatctgggccatcagtgagcaaggagagcgctacttagccgaacacacctcctaaagagaggcttccttcaggcaggaatgcaaaacaaggaggggcgacattgctgccgcccctttttcatcactcttggtcactgccggcttactattcatccgttgcagccattgcgggggtagcttcttctgcttttgcttcggtaaaggtcagcgcttttccactcggatcgagttctgcaacgattgcagcgccttccttgaacgtcccacgcaacacttcctcagcaagaggatcttccaagtaccgctggagtgctcgccgcagcggacgcgcaccatacttttcatcgtagcctttctcggcaaggaaatcttttgcctgctggctcaagtggagcgtcatgttctgctgggccagacgcttatagagccgttccaattgcagctcaatgatctggtagatgtgctctttcttgagcggacggaagatgatgtagtcatctattcgattgaggaattccggattgaacagccgccgcattgcctcctcaatcgtttgcttcatagcttcgtacttgtcctccgcttcagggccagcagcaaagccgatctttccaccggctttgagatcgcgaaccccgacgttcgacgtcatgataatgatggtgttcttgaaatccacccgccgacctaagccatcagtcaaaataccatcgtcgaacacctgaagcagaatgttgaagacatcaggatgcgccttctcgatttcatcgagcaacacaatgctgtatggctttcgacgcaccttctcagtcaattgtccgccttcctcgtagccaacatagcctggcggtgcaccgatgaggcgtgagacactgaacttttccatgtactcgctcatgtcaattcggactagtgcatcctccgaattgaacatgaaccgcgcgagagctttggcaagttcagttttcccaacgccagtcggaccaaggaacatgaacgaaccgatcggacgagcaggatctttgagtcctgcgcgagcgcggcgaattgcgcgtgccagctgctcgacggcttcatcctgtccgatgacttggcgtttgagttcatcggccatgcggaggagcttgtcggattcactttccgcaatgcggttgacgggaatccccgtcatgctggcgacaacatcggcaatgtcatcggcagtaacggtgaagatctgttcggtcgcttgctcttccccctcttctttggcgcgctcgagttcggcttggagtttcttttcctcatcccgtagtgcggctgcttcctcgaagcgctgggcgcggacgacatcgttcttgcggcgacgaacttcctcgattcgctgttcgagttcgagaatttcctgtggtacggtatagttggccagatgcacccgcgctcctgcttcgtcgagcacgtcaatggctttgtcagggaagtagcgatcggtgatataacgctccgagagccgtacacaggcggtaatcgcttcgtcggtgtaacggacgctatggtgctcttcgtaccgatccttgatgttttcgaggatctgcagcgtttcctctgcggtcggagggtcaacgatgattttttggaagcggcgttcgagcgcgccgtctttctcgatgtactggcggtactcatcgagtgtggttgcaccgatgcattggatgtcgccacgcgccagcgctggcttgaacatgttcgatgcatcgagcgagcccgatgcgccgcctgcgccgacgatggtatggatttcatcaatgaacaagatcacatcctttgccttctcgagctcattcatgaccgccttcatgcgctcttcgaactgcccgcggtattttgtgccggcaacgagtgcggcaagatcgagcgtgacgatgcgcttgtcgtagagcacacgtggcaccttccgctcgacaatgcgcagcgccagaccttcgacaattgccgtcttgccgacgcctggctcgccaatcagcaccgggttattcttcttgcggcgggcaaggacttgggcaacacgttcgatttcgcgctcgcgcccaatgacggggtcgagtttgccttcgagcgcaagtttggtcaagtcgcgtccgaagttatcgagcaccggtgttttgacgcgttcgggcgcgtccttttttcgagttcgtgtgctcgcgcttccgcgcgctgcggagcttttgcctgatgtgatcgcatcgagttctttccgtgcagcgtcataggtaacgccgaactgcgccagcacctgtgcagcgatgttgtcctcatctcggaggagcgaaaggagcaggtgctcggtaccgatgacgtcgcttttgtagagctttgcttcgaggtaggtgatcttgagaactttctcggcttgcttggtcagcgggatattgccaatcgtgagcgtaccgctggtggtgcggacggtgtcttcgattgctttcttgaggcggaagaggtccacacccagattccgcagaattttgacggcaatgccttcgccttctcggatcaatccgagcagcaagtgctcagtgccgatgtagtcgtgcccgagccggagcgcttcctcgcggctgaggcggatgacttcctgcacacggttcgaaaagttgccgtccatttgtgttacctacaaaatcgttgcattcgattcggcgccgagcggctcaagctcagagcgccaacgcaatggacgcagacaagccgcgctgtattgcagcaccgcaatcgcggcactgagagaagcactcgtggtctgattcaactatcggcagtttgccagagaacatgatgcaccgtgctctgtggcttcctgaccgcagcgcgaaacaaaaagccctcaccgaggtgagggcaaaggctttggaaagcctacggcactaagccttgttgcgaaaaggacacaaagtgaacattcttctcgcatgcaaatatagcatgcgctcgtgtattttgcacagtggttgcaaaccatcaatcggaggatacgatggaacgctccttaggtctcgacatcggcgccaactcaatcggctgggctgtgatcgaacagaatgggacaggtggtgccattctcggggtcggggtgtacaccttccccgaaggtgtcgagaacttcggggaaggagatcgcgaaatttcccgcaacgctacgcgccgtgccgcgcgccaacggcggagacagcttttccgtcgaaaactgcgaaaacgtgctctgctgaagttgatggctactcatgggctgtgccctgcactgtccgaggacgaactgcgccaatggcacaagtccggccagttccctgagcgtacagaggtgcaacaatggatcaaactcaatccatatcatctgagactgcgagctactcaagaacgtgtcacactctacgaactcgggcgcatcttctaccatttggcccaacggcgaggctttccaacaagcagtcggcgggctcagcaagacgaacgctcgacgattgaaaaaggcgacgtgaaagcaggaaaacccggtatcgagcaaactcgagcactgctcgatcatgcgcctacgttaggttcggcactcgctacgctctacccaccagaagggcagccctacaggaataacacctcacgcatccgaaatcgttacaccgaccgccagatgtatgtcgcagagtttgaatttctttgggaaaaacagcgacagttttatccctatatcctcacagacgacttgaaagcacaacttgggggcagacgaaaagatggctattcgatcgacggagtactgttcctccaacgcccgttgcgatcgcaaaaacacctcctcggccgctgcacgtttgaaccctccaagccgcgttgtcttcgcagccatccactcttcgagcgattccgtgccttgcagttcataaactcaatcttgtgtaacgaccttccactcgacgccgatgatcgcagccgagtgcttcggctgatgttgaccaaaaaaaatctcaagtttaccgatatccgaaaagcgatcgggaaactttccgccgagtacattttcaactacgccgatgacgacagcatcgtaggctctcccaccaatgctgctcttgcctcaaagaacattttcggcaaagcttggttcgacaaatccgaccacgaacaacatcaaatctggcacgtgctccaatccttcgatgatagggacaaactcatccatcacgccaccaccaaactcggcatgtccgatacagcagccaaacactttgcatcggtgcaactaaccgatggttatgcctcactcagtctcaaagcgatccgtgcaatccttcccttcctcgaacagggctatccttatcacctcgcagttgctcttgcagggactcggcgtgcgctgggtcctcgctgggatcaactcgacgaggagcaacggaccgctctctgcgatacaatcgaaggtcttgtcggaagcggcgtgcgtggtgggtatctcgacaagctcaaagagatgctccgcaccaaattcaaactcagcgataaagagttgagcaaactctaccaccacagccaattccgcgcagccaaccaactgctcaatcgcattcccaccgatgcagtctatacctcccagctcctagcgctgcgaaatccagcggtgacgaacgtcctctttgcttctcgccgcctcgtcaacgaactgctcagccgtttcggccacttcgaccgcattgtcatcgagctggctcgggatctgaagcgcaccaaaagccagcgtgcccaaatccgcaaagaacaacaacgcagggaaattatcaaccgaaccattagcgcaattcttgaaaaagaaggcatccgcccgactgctgagaacatcctcaaataccggctctggctcgaatgcaacaaaacctgcccctacagcaatcgcagcatctcattccatcagctctacaatggtgaagtccaagtcgagcacatcttcccatacgatcgctcgctcgacgatagctacctgaacaaaacgctctgctttgctgacatcaaccgcaaaaaagggaaccgtacaccgtacgagttcttcaccaatgatttcgggatggaccgctgggaggaagtcaaacagcgtctgcggcaaaccttcacaaatcaacgctcctggcagaaagatagcccgctcgactacttccctgagcgacgcaaaaaatatgaacgattcatcgccgaaaagctcccctcggatttcgtcggtcgccagctcaacgatacccgtcacgcgagcatccgcgcagtggaaatgttacagcttgtgtgcccgatcgtcagcgcctcagcaggcaccgcgaccgcgaaactccgcaacctctggggcctcgatcgggtgctcggcgatctcgaaagcgacaccaaatcccgaaacgatcatcgccaccacgcacttgatgctatcgtgctcgcgtgtactcgaccggcgcacattcaacagttagccaccgccaacgctcgcaagtacagcaaggagccgcagcttgagcctccctggagctcgttccgcttcgatgtcgaagatgcaatgcaacgctgcatcgttgtccatcaccgcacaaatcgcgtcattactcggttgaacgtgacaacaaccgtcggcggcaccgtactccgctaccggagtctcgctgctcgcggaccgcttcaccgcgagacattctacggcaaacacctcgatccaagcgatggccaggtgtactaccacgtccgaaaaccgcttgctcaaatcaccaagcgcgcacaggtcgaaaaaatcgtcgatcgcgcgatccgtgagcttgtcgaagcacgtatcaaagaactcggcagctatggctcgaacgacgacgtccccaaaggcgcattcttcggaactaatcccgatggttccccgcaaccgctcctgttcttgcccaaccgccgtggcgaaccagtccccatcctgaacgttcgcctgcgggaatctcttgcaaacgctcgtcctgtccatccgaaccaaaatcgctacgttgatccaagcaataatcaccatgcaatcatctaccgtctccccgatggaacccttgaaatcagcgtcgttcaattctgggatgctgtgctccgctgccgactgcgccagccactctaccaagtaccacccaattgcgaattggtcatgacacttcacatcaacgacatcgtcctgctcggatgccctgacaaagtcctcgaagaggtgttccaaacactcacacctgaccaacgctgcaaatcgctgtggccctatctccataaggtgcagaagctttcccaaagttcaccgaagtcatgggaactatgcttccgccacattgccgatgctcgtccatcggaggaagcaaagaaggattacatcctgattaggaactggggaactggtaagcagggctggtttacgtacaatcccatcaaactgcgcgtgactccgagcggcttgatctaccggtggggngagctaccgcaccactaacttcagacactggctccacgtgccgatgatggaatggaacactaagccaaggtagccccagtgatcaagcgaacgattgtcatcgcaagtccctcgtacctgcggctggagcacgagcagttgatcatcgaacatgcccagtcgggagcgattgcgcgcgttccgatcgaggacatcggctatttgttgttcgaaaatcggcaaatcacactcacgcatgcattgctgtcgcgttgcgtcgagcagggtgtcgcggttgttacatgcgatggttctttcctgccctctggaatggttctgccaatcgggcagcagcatcacctccaaggcgaacgatttctccagcaagttgcggcaacactccaactgcatcacaagctttgggagcagaccgtacgtgcaaaaattctcaaccaggcccaacttgcacagcgggttggctaccgctcctggcgttcgatcgagcgcatggcaagccgcgtccagcttggcgaccgcaccaactgcgaagcaagtgcagcccgtcactattggcgtgggatcttcggcaacaccttcactcgcgaccccgaaggcgagcccccgaacaattacctcaactacggttacgctattctccgcgctgctacagcgcgtgcactcgtcggtagtggcctcttcccgatccttgggatccaccaccgtaaccgcgggaactgcttcgcgttggctgatgatgtcatggaaccgtatcgcccattcgttgatggaatcgtctgggaactctcccgcaagggaccacttcctgcagacctatcgccccctgcgaaacgccaactcctcgaagtactcacgctcgatacaattatcgaaggcgagcgctctccgctacaaatcgcactctcgacgactgctgcgtcactggctcagtgctacgcagggaaacgaacgacgatcatctaccctcgcatgcctgagtagtcccacgattgcgtgaacacaagtggcaccacgacaccgacagcatttgcatctcgattcacaacgactcagtgggtatcgcatcatgtggctttttgttatgttcgatttgccgactggcacaaaaaaggaacgcgatgcagcgacgcggttccggaaagatctgatgcgggatggtttcacgcgaatgcagtactcggtctatattcggcattgccccagcggagaatcagcagagaccttcatccgacgaatcgaatcgtacttgccggactatgggcaggtgacaatactgcgtgtaaccgataaacaatttggctcgatgctgcacttctatcgctccaagccacatcctggtccagaaactccggttcaattggcaatcttctgaatgccgacgctgctaaaacagcactgctccgagccgtatgagactcggagcaggctgcacatttgccgaccgaacgccgactgatacaaccgcaactaccaatgatgtttggggattacggaagctctgttgtcggcaaaattactttgtgtccaatccgcaacatgatccctccggcttgtatcggttgattagttgtcggcaaaattactttgtgtccaatccgcaacgagtcggtgattgacgcactcgagcgtcgtgttgtcggcaaaattactttgtgtccaatccgcaaccacgcgtcatcacgaccacactcgagtgcggttgtcggcaaaattactttgtgtccaatccgcaacacggacatctacggcgacccagccagaggcgttgtcggcaaaattactttgtgtccaatccgcaacctacctacaaaggtagacaaaggtccacaagttgtcggcaaaattactttgtgtccaatccgcaaccgaggagatcaccaccgccgacgtcggcctgttgtcggcaaaattactttgtgtccaatccgcaaccgcacacgagatcatcgacagacgacgcatgttgtcggcaaaattactttgtgtccaatccgcaaccgaaacctcggccggtgcgattctgattgtgttgtcggcaaaattactttgtgtccaatccgcaaccggcggacgagcgcttcgcggcgatcgtcggttgtcggcaaaattactttgtgtccaatccgcaacctgccgtgggtgagcatggccgaggcgcttgttgtcggcaaaattactttgtgtccaatccgcaacctacgtcagcgtctttggaaatagcctcgggttgtcggcaaaattactttgtgtccaatccgcaacgctcgtgcatttgctattctcgaacgcgcggttgtcggcaaaattactttgtgtccaatccgcaacctcaaagaggacatcgagcgttacgagcgcgttgtcggcaaaattactttgtgtccaatccgcaaccctacacacgcacctgcgcccaacgggggcgttgtcggcaaaattactttgtgtccaatccgcaaccttgccgccatcgcgcaccgtcgtggtgtgggttgtcggcaaaattactttgtgtccaatccgcaactgacacctccgggactgcagggcatccgccgttgtcggcaaaattactttgtgtccaatccgcaacgcaggcacgcgagatgttgcttgcgacaagttgtcggcaaaattactttgtgtccaatccgcaacctacgtcagcgtctttggaaatagcctcgggttgtcggcaaaattactttgtgtccaatccgcaacagcgttgtcatcgttcgcagcgttaggcaggttgtcggcaaaattactttgtgtccaatccgcaacataatcctctcccacttgatgctgccatcggttgtcggcaaaattactttgtgtccaatccgcaacgtgaccgaaggaaccgcgaatgcaggtaccgttgtcggcaaaattactttgtgtccaatccgcaacgacgcgacgacctgctgcatagtggttgcggttgtcggcaaaattactttgtgtccaatccgcaactcggtcttctggcgccggttgaggcgatgtgttgtcggcaaaattactttgtgtccaatccgcaactac

SEQ ID NO: 4022 - DNA, 13920 bp, synthetic construct
  source 1..13920: mol_type = other DNA
  misc_feature 1..13920: note = Synthetic
cataggagtacaggaacatctgcggatcgggcagcaggttcgagaacgcatccagacggcccagcgccagcgcggcgttttgcgccagggtgtgcagccgcacgtccagttgcaggggcggcttgggcggcaaggggttgggaacaaaggcccggcaagtctcgccgaccgtcgagatcggcaggtaatgtccggtagggccgcgtttcatggctggaagttgaaatttgctggcatggaatttcaaattggttgctattttgcaatttagcggagaaaaatgcaagtctgtttacatttgcgctctgcctgccgcaaaaggaaacgggcaccgaagtgccctgtttcgtatcggtgagctttgaagctcttgttgccgacagccccaccatcggaatacctgatacgattttaactataccaaaccagcagaaaaggaacaagtgattatggccgcaaaatatcggcttgggctggacgtaggaacagcgtcagtatgtgcagcagcattttcgctggataaagacggtttcccggataagctgatctggcatcacaccagaatattcaatgagccgttagaaaaagggcaaggcggtctggtttcaaagaaagccggacgacgcaaagccagaatgcaacgccgccagatagatcgtcgcgctgcccgcctgcgccgaattgcacatcttgccaatctgcttggcttaaaccgcgaagaaattccacctgatgatggcagctccctgcctcgcctgcgcgcccaagccgcaacagaaaaaatcgagcctgcagaccttttgcgtattttcctgcggctctcgaagcggcgcggatacaaaggggagttcagagccaagaaaaaaggggaagtggcggaaggctcaaatgagctaaaacaagccatgagggctttggctacggagcgaggcattgcgctcaaggacgaaaatgacgcagggatcacactggggcaataccttctctatcggttggacaatgggttaccgacaaaactgaaagtcaaagaagacgatgatggtgatttcaagggcaaaagaactgaaaaggccaatgctccgaaaaatctctatgctttgcgcagcatggtcgagcatgaatttgagaccatttggaatacccaagccaagcatcatcccatcctgaatagcgtttacaaagacaagcccatccgcgaacatttctacgatgcgttattttttcagcgccccctgaaatcggctgccggattggttgcgcaatgctcattggagccaactttgcaacgcgcaccgcgtgcgcaaatggcgtttcagcgttttcgaatagaaaaaaccttggctgatttgcgttggggttcgggaaaacgcgctgaaaaactgacttgcgaacaaaagcaaatcatccgcgatttgctcgacaaccaagagaaagcgacattcgagtctatctatgaggtgctagaggaagccgggtatccgaaaccccaaggcaagggattgaaccttgatcgttccagtcgtgaagaattgcccggcaataaaaccctggctgcgtttcggaaactggacaagcacagcgccaagcatcacccggaacgggcgaataatcttgaacaaacatttctcaagcttgatgaaaaaacacaaatcgccgttatcaattttcttgccgaacttggctcgccagaacaactggatgaccctgagtggcacaacagctttgtaaaacgggatcgctcgaagcgagaattcagagagccgctgatcgaattcgtcaaccgcatcaaagaccatgacaactttgaccgcctgagcaagatgggttttgacagtggccgagcttcttattctgtcaaggcgctacgaaaactcactgattggctgaaagagccagaatggccgggagattggagcgatacggaagatggcgctatgagcgttgacgaggaaggtgcgattcgagcctgttatcgcgccgaaatcaagaagaggcggaaagtggtacagcaaaacaggttgcctgcgccaaaacctacgggcaacgctgtcgtggatggggcgctgcgccagatacaatggatcatcaataaaatgatcgccgagcttggctatcctcctgaagaaatcgtggttgaactgtcacgcgggatgaaccttggcattacgcgacgcaatgagcgcgaagcggaaaacgccaagaatcaaaaagtgcggcgtgacgctgaacaagaaatacgcgaccatggcatgtacccaacggatacaaaagtggatcgttacctattatggtcagaacaagacaaaagcttctgtccttattgcaatcagagcatcagttttgagcaagccatgagcggcgcagcaacagaatgtgaacacatcattccaaagaagctttctcaaatcgggaagaaacgatcagaattggttctttctcatagctcatgcaaccatgccaaaggagacttcacgccgtttgaagcatggggtatgggcagaaacagcatacgttggcaatctgtagaatcagcggcaaatcgtttccttgcaaaagcgcttgccttgaaaaagaaatttgatgacgcgcgtcgtaatgatcgccaagccccatttcgtggggaaatgaacgggctttttcgcaaggcagcattgcttaagctacaggaagcaagggaagacgagacagtggatggcttcgctgatcggcagcttcaccagacttcgtggatagcgaaagaagctgcgttgtggcttgcctgtctttgtccgaacaaagtttccacatcgcgcggtgaacttactgcgatgctgcggaaaagctggaaattggatacggtcatccccgaagtgcgttatgaaaataagctcccagtattggatgaagagggaaagcccgtaactccagaagattttgcacaattgaggaaataccttgagagaaacgtcagcaaagaagaacgcggggcggacaagaaagcaaatccaggcctgaatttcaatcgtcgacccaataagcggatcgaccatcgccaccacctcattgatgccatcacactggcgctcacttcccgcagcctgttccagcaaatggcgatagcgtacaagattgccgcagaaaaagaggagcgcccacgacttaaagcaccagctccgccgttgctcaatgttcgttccgccgctttacaagctgtgcgcgaatgcaaaatttccttcaagccggatcgttatcctgagggcgctttgttcaaggatactgcctatggggtagcgcagcgagacggtgaaggcaggttgcgcctcactttgagaacggctgttgcggggttaggaaagatcaaggggaaaaccagcctggagtctgctcgtaaggctatctccaatattgtcagcgatagcgtacgagaaatagtttccgaggtgtttgagtcgcgcatcaaacaaggcttggcggcgggaacggtactggaaaagccgatttttcatccgcgctacaacaaacccatcaagaaagtgcgctgctacgaaaccttcgcagaagattctctgccaatcatgtttcgcagcaggcatggcgaacaccgcaaatatttggtcagcgctgggtatgcctacgtagacctgcggacagatggatcgaaagagcatcggctggttaaaatccgcgatgctctttgcaacaggaaaagagcggctccagaaaatgttttgcgtctttacaagggcgatactgttcttgatagcaaagatggattgctgtaccgggtttgtcttttcaaggccgcaggaacaattgctctccttcctatctgggagcccaggtctttcaaagaagctaacgaaaaagccgaaaaagggagcaaggtaggcggcaccatctcctttgctcctgccgcgaaacgcttgaaacggattgactgagcatgcctgaacaacgagttctcgccatctccaatccagcgaccttgcgcatagataccggacggctgaaaatcgagcgtgagggttatgaacccgtctttgtttcccccaaagacattgccgtactctgtcttgagcatcatacggtcacgctctcggttgccgtcctgcgaacactcgcagaggcgggcgcggcaatcattgtcaccgacacaaggcatttgccttgtgcaatgcagcttcctcttgctgcaacgggtctggacacaggaaggttgcgccagcaaattgcattcgataccaacgaaaaacgaggcgtattgtggcagcaactcgtcagcgccaagctgctcaatcaagcttatgccctacgtctgctgaaacgtaatggcgcgctgagactggagcggcttgcttcacaagttcagcctggagataaaagtaatacagaggggcaaggctcgaagcattactggggcaatctttttccggaaacgttcaaacgcagcaaggagggcgcggaagacccgttaaacattcgcctcaactatggttatgccgtattgcgcgctatgattgctcgcacgttggtttctgttggcctgaacggtgcattgggattggggcactccaatgcagccaacgcttttaacctggccgacgattttatcgagccctaccgtttcatggtggacattcaagtagccgatgacgcagatgcatggagcgaagttcctgaattcgatagccgcgccaaacgccatctgctcggttttatcgagcacacggtacgcatggatggcaaggaggtgcggctgcatgccgcaatagatgcgagtatcgcaagctatgtgcgcattctggatggcaaagaccatcgactgttgttgcctgagggcgccgcgctcaccaaagacaaacgagcatgggagttaatggatggcgcgtaatgtgggtcatcgcggtatatgattgcccgatgaccgaacgcgaagaacgacgcgattacgcgctgttccggaaaagtttgttgcaggagaatttcttccagttgcaaaattctctctatgtccgccatttccctacaatggcggtcgccgaagcaactgttcagcgcctgcgtccgggcatccccgctggcgcacaggtcgctttttttctggtgacagacaaacaatatggaatgactcgtgagtttttcggcccccgcccgacaaggaaaaagcccgatttgccggagcaaatcgagcttttttagagccgcatctcaatcaaatcaaccggttgcaagtgatcgagtttatcaggcattccgatggtggggtgtcggaactttggatgtttgcgaagaggaaatagcatcaagtttatcaggcattccgatggtggggtgtcggaactacaatgtggaagttcgtcgaaatgccgattagtttatcaggcattccgatggtggggtgtcggaacatgcgggagtatctgttttgacgaatcagtagtttatcaggcattccgatggtggggtgtcggaacgacagcgctaacagtcccggtgccgccgtagtttatcaggcattccgatggtggggtgtcggaacgactcttttatcatccggcgaatcataataagtttatcaggcattccgatggtggggtgtcggaactagctcttttggttgtcaacagacagagaaagtttatcaggcattccgatggtggggtgtcggaacagccgattttacgcgcctcgtcgagcagaaagtttatcaggcattccgatggtggggtgtcggaactacggcgctcccgtaaacgggagagggaaaagtttatcaggcattccgatggtggggtgtcggaactgatatgagattgtgggacgcgcagacatgagtttatcaggcattccgatggtggggtgtcggaacgcgccatatataccagactgagacctaagtagtttatcaggcattccgatggtggggtgtcggaacgaccagatagtgcaggcggcggctggcgcaagtttatcaggcattccgatggtggggtgtcggaactctcaaagctttttctttatcagcgtcggcagtttatcaggcattccgatggtggggtgtcggaacagcgcggagttggagaaaacggagaccccgagtttatcaggcattccgatggtggggtgtcggaaccatctccgtacaccagcgcatctccgtacaagtttatcaggcattccgatggtggggtgtcggaacggacttgaggttatgggacgcgcaaacgtgagtttatcaggcattccgatggtggggtgtcggaacttgtctgatgtgtgctctacgccgtcaatcagtttatcaggcattccgatggtggggtgtcggaacgactgtgtgcgcaggagcaaacgaacctgtagtttatcaggcattccgatggtggggtgtcggaacatagcactgtgcatgctggcgatttgccgtagtttatcaggcattccgatggtggggtgccggggcttcgtctgccacaggtcgaaacagtggcgtaaacaaccacgctaacccaatgccgaatacggtggtcagtccgatcgttcgcagcgccggtgtgccgctcacggccagcaggccgaacgccagtagcgtcagcgacgcggcgacgcaaatggcgaggaaggcgcgggcgtcactcttttgcgcaatcaggaagaggccgtagtcgatgcccatgccgaagaccagcaggagggtgagcacgttgagcagttgcagcggaagtccggcgtatcccatgatggccaaagttccgagtgtggccagcagcgacggcgtgaccacgcgccaagtctggcggcgaaagaagggcaacagcgccagcggaaccagcatgtaggcggcaatgagcacggaggagagcagcgtccggtaacgtcccatcagcgaggagacttcggcggttttatcgacccattgggtatgggtgtcgctgaatgtcgccagttggcgcgcggtgtcggcatcgtgcagccctttcagcaggacgatgctcgaagtgcggttatcgcgttcgctgcgcccttgccacaggtagcgcaatgattttgtcgccggatgcgtcagccattcgtccgccgtcaatggcgcggtgggcgggatgttgatccagtcctcggcaagttccagctctttcgccagcgcggcgcgggctttggtgagcgtttgctgtgctcgttgtgcggtctgctgccgctgttgcgagggcagccaacgactgatggcgtcgaagccggtgagtttgccagcggcaatgagcggcgtcagttttgccaacagcgcttcttcgtgttgcaacacttcttcgggggttgcgccggtgatcagaaaaagctgcgccgggctggacagttcgagcgccttggcgacgccgatctgctcgcgcaacaactccggatcgatattgatcagactacgaatatcgtcgttcgttttcagttgcgcgatgcccgcaccgatgacgaagacggccagcgcagcgatgagccattgtgtgcgggtcgccgtccagcgcggccaatgccgcaatgcctgcatccatcgcgtagccagcggtgtgaccggcaacgaggagggcagcagggcgggataccacagcatgatcgtgagccacgcgccgatgatgccgctgacggcaaagcaggccatttgccgcatgcccggaaacggcatcagcaacaggctgaaataagccagcgccggggcaatcagcaccagggtcaatggcgagagcaggcggcggaaacgaagccagcgatgcggcgtctcggaactgtccagatgttgtgcaagcaccagaacgccgtaatcgacggcgaccccgatcagactggcgccgaagaccatcgttagcacgtggaggcggtcgaatatcagccaagtcagcgacaaagccgtcagcgcgcccgcggcaagcgagagcagaatcagttgcaacgccctgaggttccgaaatacgaaccaagtgagcagaatgcagcacagcaacgaccccgagccgatcagcgacatctcgaaacgcgcctgctgcgccgccgccgtagcgtgcagaacgacaccggcgcgcagcagttgcacgtcaggaaattgttgcgccagatcgtttcggacggcggtcagatcggcgtcgaggcgtgtctgaaggtcggaagaaaaggcgctttgtgtcagttgataaagcagcaccgcatagtgccgatctgctgtttgcaccatcagcgtgtcgccgtgagggcgcgccgggctggccgcgcccaattgcaacatccagttgctgaaaaacccgaaggggtcgtcgcgccagttgagtgtgccgcccgcgaagagctggtaagcgagcgccagggcgcgctgggcttgtgccggagggtcggattcgttgatccagcgtagatcctgatcggtgatgaaaccagcgcggtagggaaaatagaggtcacgcatggcctcggtctgcgcctggggcgcttgcaacgtcagcggcgcattgtgcagcatgtctcgaacccggtgagccgcgcgctgtgcagtagcggcgtccggggcggatagcagtaacgccaactcccgctcgccgtgttgtgtcagggttttcagcgcggcttcggcatgcgggttgcgctcgtcaacgggaagcagcgccagcaagtcggtgtcgatctggccgcgccagggcaggacgtgcgcaagaagcacagccgccagcagcgccaggacaaccagccaactccaggccagcgcgcgatggcggcgagcgtagcaggaatcgtcgaggggcgctttactcgaactgggcgcgttcatcggcagtcaacgcggagtcggtgacggtattggaaaaggtgatgcgggtaatgtcgccggcggcgctggtcagcgtgacctgacgaacgacgttatcgccctccagcgacaatgcgccgatgaccgccttcaagccagcgtcgcgcggcgtgaaatgcacttgccagccggttttgccgttaagctgaccttgatattcgaaatattcggccagcgccgacaggtcgcccgcaaacagcgaaaacaggacgcgactaatggcgttgaccgccggctcctgatcggcgcgcaagttcatcaacacgcggtctccgtctttctggaggatttcgccttgagtgattcgcgttgtctgcgggaacggtttcagcgtgcgccacagcacgccgtgcgttttctcgacggtgaaagagccgttggcgatcagcggttttttgatgccttttaattgtcgggtctgggtgaaatcgccgcgaatcaccgtgtctatcgccagccgggattgaatcgtcgtcagcaaggccagatcggtcgcctgcgccggaagggcagggacaagccagcacaagccgaagcaagcaagcaacagggggcttatcacgtttttcataggtagctctttaacttttcgcgcagtatatcagggcaggcgaagcacatttcgcgggtttgaatatcgacggcaacttgtaccgtatgtccgtaagtcaaccgtttttgtgttgttgcgtcacggatttcgtaggcaattttcagccggttttcccattcgacgagacgggcatcgagatggaggcgctgctgatacgtcaacggctgcgcgtagcgaatgaacagttcaatgaccggccaggcgtaaccggacgcgcgcatttgtgggtgatcataatcaatgcgctgtaacagcgctgtgcgcacgatctcgaaatactggacatagtttccgtgccagcacacctccatcgggtcaaggtcatgaaaagggacggtccagtccatgcgagcggtcagcgacatctgcgagtctccttgggtcggtttgagttcaagcggctgccttcctgtgaaggtgcgctacattttatctccctctccccttgcgaggggagaggttagggaagagggggcaggagccccaccccggccgctctctcgaaggaaggggcgttcctccccggtaggcgccgacgacgcccagaacggaaaaaaattggaccactggaagggcgctttcaggcactcttcctccagcagcttggcgaacgcggcggcgtaaggaacgataaccgcttcccggttgcgacgcggcaggataatcgattcggcgatctgccgcagtgtgatggcgaaaccgtcgtggcggcgaacgccgaaaacagcaaacagcgggcattgcagtgtcgcagcaagcacatagggactaatcggaaaacgggtgcccttccccagaaacggaacctgcacagtggcagcgctgtctaccggcacgcggtcgccgaggataacgatgaaaccgccgtcttcaattcgttgcgccaacgcaatggcggtgtcgatgccgatctcgtccgcccggatcaaatcaatgtcgtagccaggatcaagctctttcaacagccgattgaagcgagcagagttttttttatgagcgagaacggtcatgcgtacgccgatataacgctccgtcaatttacgacacagttcgatgttgccgaaatgagcggaaacaaaaatcgcacctcgcttttgttcgagtatcggctgaacgtattccacgccgtctctatggaaaggaaccgacaaatcggtcgcgcttgtcgccagcagtttatcgagcaggatttcggagtacgccagaaaatgtcgaaaggtgtttcgccgcgtcggcatcggcgtaacaccgccgctgaaagcatacagccgttgcaaatactcgcgcgacgcttcgcgggcaatgcgccttcgtgcgtaaaaccacagcaaaacgaagaacaacaaaaaacgaaacggccatcgcccgaatatgcgataaacgcgcagcaaaaaacgcattcctgccaaaccgcccgcttcctgcatttgcgcccaatgcatcagcgtcgctccgaggcaaggaaatggcgagcgatcaacttcggcatccgccacaacattccaaaaaacaagcgggtgtgcatccagctgatacgcacgttgtcgcgcccgatccggaaatgcgacacgccattcgccggataatgcacgtaaaccggcaggttttttatcggcgcgcccgcccaatcaagacgtaccagaatttcggtgtcgaattccatccggctctgtgacggcatcgcatcgagcaccggcaacgtcgcagcgagcggataaatccgcagcccgcacatcgagtcccgaatgcgaaacgacaaggtattgatccagacccagaggtgcgtcacataacgacctaacagccgaccaaccggaacgctgctgtcgtaacgcgggaaccccacgatcaccgcctgcggcgcatcgcgcatcgcatcgagaaacgccggtaacgccgcagcatcgtgttgcccgtcagcatccagttgcaatgcgtggctgtaccccttcgcgtgcgccgcacgcaaaccggcgatgacggcgccgcctttgcctccgttcaccggcagccgcagcaatgaagttgtcggcacagaagccagcttatcgagcgccgccgcgcattcggcgtcggagccatcgtcgatcagaatcaccggcaacgctaaatcatgcagcgtttgcaccacggcgccgacggtggcagcgtggttatagaccggcacaagggcaaccggcgcagacgcagcgggtttcatggtgcgttattcggcacgatggcagggtgagtaaacaacgcgcgcccctgcgaatgcaccccatgcgccgaagcatagatgaaatgcacctcttttttctccggggaaaaacgaagcgtcagcgatactttgtcgtcgggtgacaaaatacgctggaacctgagctgccggaaaccggagaaacgcccttcgacaggaaagtatcgttgcgccaaccgtagcgcccaatcgatttgagcgacgccgggcaaaatcggcagctgcggaaaatgcccggtgaacgcctgcacacagtcgcacagcgccagcgtcaacaccacctcttgttcccctcgcgcagcaaccgtgaacggcggcaatgcctggcgctcgagcgagcgcacgatctcggcggtggtaattttgcccatttcgttgcagggcaacgacgacaaataacgccaacgacgcgggatggcgatacgctcaagcgacgccgacaagccttgccgcaaccaacgatcgaaacgggtcttgcccactgcttgcagttgcgcgcggccgctgtcgctcaacaccacggcggcaacaatttcgtcgcgctccccgtacagcgccgccgtgcgcgcttcggccacttcgggtaacgccagcaacgccgtttcaatcgcatccaatgccacgcgtcgtccttcaatcttggcgacgcgatcggcgcgaccggtcaaccgccaaccgttgtcgtcgcgtacggcggtatcctgcgtgaaaaaccagtcttcgtcggccaagagcggcgagcgtaatttaagacagccgtgttcatcgagtgccagcgtgacgcccgggtgttcccgccagatgccgccgggagcaatgcggtgcatgatgctgcccgcttcggtgctgccgtagatttcgaccactcgtgaggtcgccaaccgcgacgcacagacagcggcaacgctgtcgtgcaacgggcttcccgcagaaaatgccgccagaaaagtggctggcgaaaaaaaggcatccagttgcgccaggcgtttcaacgtcgccgggctgctgatcagcacatgctggcctggttccagacgcaacagctcttccggataacggtagacttcgctgatgatcggataaccggcccatagtggccacatcagccggaacggcaatccgaacatgtgctgatgcggtacggtgccgacaaaacgggtttcaggaggcacgtctttaccgaaaatttgttgtagcaacactgcttcgcggtacaactgcgtcggcgttttgaaaatacgattcggcgcaccgctggagccggaggtaaaaaccaccaggccagcacaatcgaactgcggcggtgagccgggaaacgcgcttgtgccgcccgccgcgccgaaccagtcgggcagagcgctgccctcgcaacgcccaacccagggaaacggaagagctgtgcgcgttgccggcaaatcttccgccaccaacaaagcggtttggccgttctgccaacaagcgagcagccagacagcgaacgcataagcatcggcgtcgtacaacacgatttccggcgcgttgagcttcatcagcgcctgccgggcagcgacgagatcggcgcgaaacgtcgcgtacgttatcggctctgtctttcgataaaagacgacgccgtccgccggcgccgacagcagcagcggcggcaagattgcctgtagcgcatcactcatggggcaccgttggggggattggggaaaagcgacgcatcacacggcggcgaatcagccattcgctgccgaacatcacgcccatcgctacgtaggcgatcaagccgttataaagcgtccagacgatcatcggttgcgtcgttgtccaccaggcgacacctccgttgacaatgaagaagatgcaccaggcgaacgtgacctttcgggtataacgaacaccctcgggcggcaattcgggatcgagtcggcgcgccagccgttcgaccagcgtttgcgactgaaaaagactcgttgcgaacgccagcagaaacactgcgttgaccagcaccggataataaagcaacgacatcgatgaacgcagcagcaatgccgctacgccgagcaacgctgcgcacggccccagccaaccaagcacactgccgatgccgtgccgccgccacgccagcggcagcagtagaaaaccgcccagccagaagggccacccctgccaataacaccaccagaaaaacaacggcaaggcaaccccgagcagcggaacgacaaacgtcggcatcagcaaagctccgtggtgtgccggtggtca

SEQ ID NO: 4023 - DNA, 10362 bp, synthetic construct
  misc_feature 1..10362: note = Synthetic
  source 1..10362: mol_type = other DNA
gaccatcgcttgtgccgagaaggcgcgcaacgatgaggcgctgcgcgcctgtgccgagtaacccgccctctcggcacgctggcaaacaatgaaccaactcgatttattcgcccacgtcggggcggcgtatgccgaagccccgggtggcgcgatcgacaacactgcgctctaccgtctggttgccgagcgtgcggggattgacccgaagcacatggatgcccgcgcgcctatcggaaacgctggcgcactgcgcagcccagtcaagcggaagatccgctggtatcagcaaacgctgaaacaattgggcgtcatcgaacgcatcccgggcgagcgcgggatatggcggttgacggagaatgccggcaaggatcttcataaggccgccgccggcgtcaagctggtcgctttcagcacagacctcggcgtcgccatctggggtcgctgccagggggtgtacagcgggatcagcgagccgattgccttgtgcgtgacctcacccccctaccccctgcgacaggcccgcgcctacggcaatcctgacgagggcaggtacgtggatttcatctgcgaatccctggagcccgtcgtcagcaacctgatcgccggtggcagcatcgtcatcaatatcagcaatgacatcttcgagcccaagagcccggcgcgatcgctatacgtcgagcggctgatccttgccctgcatgaccgtcttggcctctcgctgatggaccgcatgccgtgggtaaacttcagcaagccacccggcccgacctattgggcgtgcgtcaaccgcgtgcagcttacaacagcctacgagccggtgttctggttcaccaatgacccggcgcgtgtccggtccaacaatcgccgcgtcctggagccccacagcgaccgccacaccaagctgatgcaatccggcggcgcgcgccgcacggcagtctatggcgacggggcctacaagatccgtcccgactcctacggccgtgtcaccgagggcaaaatcccccggaacgtgattcagcgcggacattcctgcaacgatacccgcgcctaccgggagcacgccaaggccctcggcctgccgacgcatggcgcaatgcagccgacctcgatccccgacttctttatccgcttcctgaccgaacccggcgacctggtcgttgacaccttcggcggcaccgcaagaacaggcctcgcggccgaacgcctcggccgccgctggttcgttaccgaattgattctcgaatacctgcgcggcgcggcggagttgtttcgtggccacgcaggcttcgacatgcacccagccatgttggcggtgcgtggaaaccgcgcctgagtgaaaggaagccacatgcctgtaacaaaaactgtagccgaccgttacaccgttcgccatgccggggaatatgcagcgatcttcgtaaacgaatggagcgagcccggcgaaaaaagcatgcgctacctgggcgaaatcgcaatcaacagttcgtttggatcgtgggcgtaccagtggtccgcgtgcggcatgccgtttcgcgcattcctggcccaactggaccacggatacctgatggacaagctggctggcgcgagcgcctatgtctttgacggcgaggcatccttgcggagcgcgttcgacaaggtgctcaaggcccggcgccaacgcgaaatcgatcacgatgaagcgcgtgacctgtgggatgccctggtcgatgttcaggacgacgcagcatccggctcctcgctattcgtttatctgctgtcaggcatcgaagacaagcatggcattctggatgagccctggtacatggtcacccaaaaagaggatccacagatggccggattcttgcgcgatctgtggccggagtttgttgcggcacttagggcagaaaccttggagccggtgaaggcatgacagtagagaagccgacagaacgcccggcgttcggcaccgcgccgattcgctgcggcaaggcgcgctgcaagtggcggggcttcgagactggcctacgcgagattcacacaacgcgctggacgcagaaggtctgcccggcatgcggctgtgatagctacatctttatgacgccgaaggagattcaggcgtgggagcgcagcaagacgcccaacaattgcgtaaccagcctgccggccaaatgacgcaattgttgggcgtcttgctggagaggaaagacgatggactacacgactgaacgcaatgcacgaggaggcctccgcttcagcgtacagaacccgcctgcgaagggcacgaaattagtacttaccgacgccagcgtggtgacgtttgatggaatcggcatggctggaatgctggaatgcaccgactgcggcggtgttgacaagctgcgcgacgacctgtttgccttggtggatgagtggggaggcgaactggatgaggcggacgaaacgatgaaggtgacgagggaagacatcgggcaggttttaacctcgattgccagtagatttgatgaggaattgctgtccacaccggaatgcgaacttgagaagaattggcatttcaagtgggacgaaacggccagcattgagtggaacacctacaagttcagcggcatgctggagatgttcaagcgaacttgccgccgatgggaagagcaccacaacggctcaggctgtgtcgttgagcgagtgcgcgacaaatacctgatgccgaagattcgtggattcctggcggagctgcaggcgcataacggcaaaggagatgaaaatgcagattgaaccactgaccagaacagaccagatcaggcccggcgatacgctgctgattagcgacgggaaggcgattaccccggcagtagcgatcaaagtgaaggtttccgaattcgacggcacagaagtaattttcgacgtgaagcgcaacaagtttttcaacgtcgggatgtacctcgaaggcgcgtcgtgggcgaaggacgttcgcgtggtgcggctgccctctgacgctgaattgaggggcgggcgccttttcgcccgtcccgcggggaggaaagacgatggcagaagaatatgaggcatacccaaaggtttgtgagtgctgcccgacagagtttgccggtgatgataacgccgcaaaaaaggctggctggcgacttggttgggatggctggctgtgcggaaagtgtaacgcgccagagcaaccggaatgcagcgtgcgcgggataatatcgcacggcgtggcgtgcggttttgtgatctcgggcgaccacagtaaatgcggatacaaaggcgaatctaagtgcaggcacatggtggtacccaactgagggataggtgcatggcaagcgtggtgcaaattgcagcaaggctctatgaatgcagggatgccgcgcgcactctgcttggcgacaaatacccggaacgaatgcgcgagtatggcgactcaatacggattgtggcggccgtgaaaaaatgcagcgaacttgaggccgggaagatgctggccgaggccggcggcgggggtatggccaccgtgctgatgctggcggcgacagtcgagatcatcgaaccttccaatgcctgaatgcgagcgaggattgcgacatgtctaccaagattgagtggaccgacgaaacctggaacccggttaccggctgttccaaggtaagccagggctgcaagaactgttacgccatgcgcgaatggccgcggctggccggcaacccgaagaccgcatatttcggacgcgagtttaccgacgtgcgttgccacccggaacgcctcgaccagcccttgcgttggagcaagccgcgccgcattttcgtcaattcgatgagcgatctgtttcatccggacgtgccggacgatttcattgaccgggtgttcgccgtgatggctctttccccgcagcacacattccaagtgctgaccaagcgacctgagcgcatgcgcgcctacatgaaccacggcgagggctttgggcgatggggttttattgacggtcgcgcacgccagatttacgcagagcggtaccgcgcccccttccccactggcaaggttctgctcgggcctctgccgaacgtctggctcggcgtcagcgtcgaggatcaggccgcggccgacgagcgcatcccgctgctgctggaaacgccggcagccgtgcgatggatcagcgcggagccgctgcttgggccgattaatttggaaagcgtcctatggccgaacaaaggcgggcatagggttgatgtgctacgcgcaggctactggaatgctgccggataccgttatgggggaccgtcggctgaactgggcgcggaacgcggtttgttcacaaatcacagcgatatggcgcgcctcgattgggttgtcgtcggcggcgagtcaggccctaacgcccgcccgatgcaccccgactgggcacgcggtctgcgcgatcagtgtgtggccgccggcgtaccgttcctgttcaagcaatggggggagtggcgaccgatctgcgaaggtggcggggactggtacaacgatctctaccgatcgaggcggattgccagggatggcgaaagccaggaggccctggatgacctgtgggggcgaacctgcacggtgccagatggcgtcatacagatagacggcgccctgctcgggcataccgcccccggcgcgtatcagcaaggcactcactcgatgcagacttttcgcgtcggcaagaaacgcgccggccgcctactcgatggtgcgcggcatgacgggtatccgtaattggcacgcatcaatagccccaaagggcgggctgttgatgcagcaagcggtcagggggttgaatcgagtattcgaaaataaaaaagggccgaacctaagttcgacccttgtatcggtgaacttgccctttcggacttgttcttgttaccgatagtccccaccatcggaatgcctgatacggaaccgatgatagcaccgtccaacagaaaggcaacaaaatgaaatatcgcgtaggtctcgatcttggaacggcctctattagtttggcggcctttttattaaataacgaaagccagccctccgatctggcctgggccagcatccggatttttgatgagccgctggacaacagcacagccgggcttcaatccaagaaggctgcgcgacgtgccgcgcggatgcagcgtcgtcaagttgaccggcgtagagggcgcaatcgccgggttgccgccctagcccctatgctgggtgttgcgtgctttcaatcggccgaagatggcggcgcttcaactctgaagctccgctctactgccgcgcgcaacaggatcgaattggatgatctgttgcgcgtgttcttgcgcatgaccaagcgtcgcggttacgcgggagaattccgacaaagaaaagaaggcgcgaaaacaggggaagtcgagggcggcagcaatgatctcatggctgccatgaccgcgctcgcggaatcgtgcaaactggaaagttgcacgctgggcgaatacctctaccaccgttggcagcagggcttgccaaccaagctcaaggtcaagaaagaccgtagtgacgacagcgccgatatgcccaatctgtatgcgctacgcagccaggtcgaggctgagttcgagcagatctggtcaacccaggccgaacatcaccctgttctcaatggtgagcaccaagggcaaccgatcaaggcaattttcaagaatgcgatctttcatcagcgtccgttgaaatcgatcggcggtatggtcgggcagtgctcgcttgaaccgaccctgccccgtgcgcctaaagcccagccagccttccaggggttccggatcgagaagaccctggctgacctgaagtggggttccggaaaacgtgcaaccgacctcaccgcagagcagaaagcggttattcgcgcaatcctggcagagaaagaaaccgtgagtttcaaggccatcaacgaagccctgaaaaaagccaaccatcctggtccagaaggccgaggcttgaacatggatagggtcagccgggaagagatccccggcaacaaaaccaaccacgcctttcgcaagctggggctgggagatgaatggttggcgctggaaccccgcattcaggttcaagtcatcaatttcctggccgatctcgggtcgcccgagcagttggacgatccgtgctggcacacccgttttgtgcgccgcgtcaaaaccaacagaaaggatgccgacgatcggtggatttacgagctgcagcctcgccagtttgaccccgcttttgtcgccttcgtcagcctgcttaaaagcaacgacaaattcgaccggctgccaaaaatgggtttcgatggaggccgcgcatcgtattctgttaaggcgctcaaggagcttggtgactggctcgctgaaccctggtgggatgaaagttggcagggcgaaaaacggcttgacgaggaggccgctgttcgcgtctgctaccgacacactatcgttcggcccacgagccaatcaacacgcctgctcgcccccgcaccgaccggcaatgacgtagttgatggcgcattgcgccaattgcacggtgagtttaaccgtatgattgacacattgggggcgccacctcacgagattgtggtcgagttggcgcgggaaatgggcgttggggtcaagaaacgcaacgagcgtgagaaagagagcactaaaaaccgcaacgcacgactagatgcgggaaaggctatccgtgacgcaggcgtggctgtcacggatccccgtattcggcgatatctactctggcgtgagcagggagagacctattgcccctactgcacgaaaccaatcaatctcgcagatgcgttaagcagtatcgaaacagagcacgaacatatcctgcctaaaacgctgacccaagtcggcctgaagcgcagcgagatcgtgctggcgcaccgcaactgcaatcaggaaaagggtgaccgtacgccctgggaggcctggggcaacggcaaagatgatgagcgctggagcgccgtagaacgacaagctgcccggttcatcaaagatagacaataccgcaaagcaaagctgctactcatcaaggatttcgaggcagaagtgctcaacgatgaatccattgccgacttcgcagaccgccagtttcaccagacttcatggattgccaaagaggctgcaaagtggctacagagtgtttgtgccacccccgtttccgtctgccgtggcaattcgactgctgcactgcgccgtgggtggaaactggaaaccgtcatccccgaggttcgcatcgaggaaggcttgccggtgttgggagaggaagaggaacgcataggcaagaacggcaaacccgaaaagtatctccccgtcatcacgccggaagagttcgagaaatataaaccagtgtgggaggggcatcgcgcgcccagtagggagctgcacaccgaccgcaaacttaacaagcgcatcgatcaccgccaccacctgatcgacgccatcaccatcgcactcacttcgcgcgccctctttcagcaaatggcacgcgcttacaaacaggaaagcgagaggtgcggatcgggcaaacgacctcggctgcatgcgccggagcccccggtacgcaatgttcgcgaactggcgatgaagactgtccgcgagtgtccgctaacgatcaagccggatcgtttttctgatgggcagatgtttcaggacaaagcttacggcgtcgccatgaaagaggaagacggcgaatgcctgagcgttctcacgctcagggcggatctccgctcgatggtcgatcgcaaaaaaggcacagtcgagcaggccagaaaagccatcgacaccattgtcagtcccgctacgcgcaagatcgtcagccaggccttcgaggcgcgcatcgccaatggagaatcggcgcctgctgcactggcaaagccaatttttcagcggcaatatgggagggatatcgccatcaagcgcgtggtctgcttcacgggcaagtacgccgaaggggccatgctggtgcggcacaccagtcgcaacggtaaggtacatgacaagcgattgctgcacggggggtatgcctggcttgagaccgatttttccgaagagcgcatcgttcgtcaggagttggtcaccatacagcaggcgatgcgcctaaaccgcaaatctatccagaaaggggtgatgcggttgtacagaggggacgtggtgctcgacagcaatgacgcacggaaatatcgggttgggtttttcaagaaggagggctgtatcttccttgtccctcatatcgatccacgcgcgttcgatgccatcaaagagccggggtcgggtaaaaagaaagtatcttttggacagataaaacgtctaagcattgtcagttaggctatgtccgcccaccgcatcctgctcatcgaaaatccggccgagttgcacacggacttgggcagggtgcgtattcaacgtgacggcatggcggatgtctttgttctgcccggtgatattgccgtgctatgtctgcaccatcactccatacaagttagtgtgcaaaccttgcgggcgctggccgaagcgggtgccgggattatcgttacggacgccagccatcacccctgcgcctggttgttgcccaccaatggcaacggcgacatggtgcgccgcctacaccagcaaatccggctggatgccgatccaataaaaggcttgctgtggcagcagctagtccaagcccgtttgcgtactcagtccaccaatttgcgtgggttgggcaggaaaggtgtgctgcggctggaacgtcttgccaatgatgttgcgccgggcgacgctggtaaatgcgaaggacaaggtgcgaagcattattgggcgcatctgtttccgcaagggttcatacgtgccaagcgtggcgctgatgaccccatcaatgcccgcctgaactttggctatgcggtattgcggtccatgatcacacgctctctggtaatggctgggcttaaccccattctaggtctcggccatcacagcaccgaaaaccctttcaacctggccgacgatttcatcgagccctaccgatttgtcgtggagcgtcatgtctgtatgagcgaatgtggcgagtttgatggcaaggccagaaagcaattgctgcaattggttgaagcggaaatattgttcgataacaagggttatcgcctgccagcagccatcaccgaaaccatctccagttatctgcgaatactcgaagtgcgcaaaggccggctgatcctgcccgaagacgccctgtttccgaagccctcatcgtgggcgtgaacggctggcgcgtcatgtgggtgatatgtgtctacgactgccccatgacggattcggaggcacggcacaactactctgttttccgaaggtgcctgctacaggagaatttcgttcaactgcaaaactcgctgtacgttcaccatttccccaccctatcggtcggtcaggccaccatcatgcgcttacgacaacacgttccccctggcgcgcaagttgcctttttcatcgttaccgacaaacagtacggcatgacccttgagttttttggtcatgctctcacaagaaaaaagcccaaccagccggagcaggttgagcttttttgaacaactacaacttaccaatcaaaaggttgcgttcgatcagatcttaacaggcattccgatggtggggtatcggaacaggtagcattctgtccaacttggggtcgaagatcttaacaggcattccgatggtggggtatcggaacttaattctcccgcttccccaggcaccagaaggatcttaacaggcattccgatggtggggtatcggaactgtcagcgcgaaagaatggcttctgaagaggatcttaacaggcattccgatggtggggtatcggaaccatgtaagcggcggcatttgatcgcttggagatcttaacaggcattccgatggtggggtatcggaacaagaaaaagatggtcattttgaggttccttgatcttaacaggcattccgatggtggggtatcggaacccgtttgatgccgtgctcgctggtcagtatgatcttaacaggcattccgatggtggggtatcggaacagcgtgctcgatccggacttcaaacgcgttgatcttaacaggcattccgatggtggggtatcggaactcatcactgagcttgtgttgcgggtcgaaagatcttaacaggcattccgatggtggggtatcggaacgatgagtctaaaaactcggctgattcaccgctcgaatgagcggcacgccgtaaaggcgggcctgaagctcaaccgaaatgcgctggatccttgacgcggaagcgttgccgaaccagttgtttccggaagacaggatggccacaggatctccggccgcgaacgaccagaccaaaggccacaccaa

SEQ ID NO: 4024 - DNA, 8344 bp, synthetic construct
  misc_feature 1..8344: note = Synthetic
  source 1..8344: mol_type = other DNA
ttttttttttaatgatacggcgaccaccgagatctacactctttccctacacgacgctcttccgatctccagcaggatgtcgcccatgccgcgggtattcgcgtgcagcttttccatcagcggctgctggatattgatctgcgcgccttccgccatgtattccggaacctgggtaccccagtcttccagcgcggaatccagcggcaacaccaggtcggcctgcaacgcggtctcatcgaggtagtgcgcgaacgccaccttgaaaccggccttggccatgctgtccttgaacttcagcgcacccggggcggtaaacaccggattcgccgcatagctgaacagcaccttgtacttgccagccgccagaccgtcgttcagcgacttcagcgcggcggtgttgcccttggccggagccatttgcgggaacggtacgacggctgcggcttcgaccgtcttgccgacgttgcccagcacctggttcagcaggttgatcgccgcggcattctgcgaaccatgcgcataaccttcggccgcgctgcccgccagcaccaggctgggcgtgcgttccttcagcagggcggcgatcttgccgatctgctcttccgacacgccagtgtccttgctgacgcgcgccttgtcgtaaccctgcaccgcggcggcgatctcgccagtcgcggtacccagcgcgttgatgatgcccggcgccaggatgccttctgtgccgggacgcaccgcgagccagcggtccgcgttcgcgccggtcagcgtcatcttggactcgacctggatcagcacgccgcgctggccgttcacacccttgcggaactgcgcgtattgctgcgagaaatgcaccggagagacccagctgcccaggaagtccgcgccgaaggacagcaccaccttggccttgttgatgttgaagcgcggcatttccacgccgtaggccttcttgttggccgcgcgctgcacggccggtgcgatcgcttcgtatacgaaatggttcttgctgccgatgctgtccagataattgcccagcagcaccttcaggtgaccgctcacgccgccgctcaggaacgcgacctcttcaccctttacgccgttcagcttctcggcgatcagcgcataggccttttcccaggtgatggtctcgcccttgtcgccgctacgcagcaacggctcgcgcacgcgatccgggttgtagtgatgctgcacgcccgcctgccccagaccgcagctcttgccgcggttgatcgcagaatcgggattgccttccagcttcagcacccggccttcacgcacgcggccgttgatgctgcaacccgcgtcgcattgcgcgcaggtcgagttgtagtacacgccgataccgggaatcacgtagtccgcggcttccacataggagaccacggtttccttaccgtcctggatggaggtgttgccgcagccgcttagcgcaaccgccgcgccgccccagcccaacaccttcagaaaatcacgccgatcaaaaccactgtcaatcatcacaacctctctggaaaattcttgaaatgtcatgcccgctcttatttgtggcattgccagcagtcattagggccctgcgccttgacttcaccgccggcggcaactgcagcaggcttctggaagccgtaccaatacgcctgattacccaccggcgtcccgcctgccgcggtcaccgggtgatccttctggtgacaggtcgcacaccagcccatggtcagcggcttgctgcggcgcgcaaccgtcatgttcttcacgtcgccgtggcaatagccgcaggcttcctgagtcggacgattttgctgctcgacaaaacgcttgatgtggcgctcgtggttgaagcgcacgaagtcgggcatgtcatgcaccttcttccatggcaccggcttcttcgcatcccagtacttgaacagctccacgatacgcggcttgttgcgcacggtctcgatgctctggtgacagccgatacatttttgcagcggcgggatccccgctaccgcactacgtctggcgtaggtatggcaatactggcagtccatctccataccgcccttgagagggtcgctattggtcggatcgttgggattgcgaaggcccgcgtggcgatcatgaggaaactcgatcggctggacgacttgcggacctaaactatcttcggtcgttaacgcgggttggggaacatcggcagcaaaactgctcacagcggcaaacaggcccgccaacagaatagacaaacgtaagaaacggtgcatcgtaagggctcccccagcaaacaaatgatcccatgccggctcatcgccagcatgatcgaacaagtaaatcggattattttttgatgcgttgtgtcgcgataaaattattatctaaatttgctttattttccgcccgaatgagcgcggcgcgactacactttcgaataatgtctagtctgaaaaataaagtcaacactgtatatcgagggccacccctagatagcagaaaaaagtcatacgcggcacagaattacagcaattgcttatattcgtttttactatttcgccttaggggtttcctttatgaatgaagagcaggcagtattggattttttcgcccggcaggaaaatctgccgctgggtctttccgtcgccgagcaaatggaccggattcgcgaacaaatgaacagccgttactggcgtgaatcgctccagcgcctgaatgcgctgatcgccgaacacgcgctgccgtggcaagccgcgatcaccgaggacaaaaatgcgccggacagcctggtcggcctgcattgcacgctgcatgagacgcaaccgctgtatctgcgcccgatgctggaacagcaatatctgggcggagtctggcgcatctatttcggcctgatgtggagcaccgcccccgcgaccgagcaactggcgctgcccgccgtgtccgcactcaaacaggcgctgcaggatgccggcttcaagcacaacgagaatttcctggcctggcagtggacggcgttgcatccgcgccgccaagactttctgctgcgccttgcgcaacaacccgaaaccttgctgaatgaaacgtcggccattctggaaaaattactgattagacaccgaaccttgatcgaacaagccaatgccgcattgcaaaccgcgccgcgcagcatggcgatctcgctggatcagctgcgcagcaaacgcggcgattaaaccggattgtcctgatcgaagaagcgatgctccaggcaccgggctggccagatgcccgcccggtgcctgagtgccaaaacgctcggtcgcgtgatgcgcatgatgtttgaattttggctaacacagcctgaaatgcaaccacaaaaaggaaacgggcaccgaagtgcccgtctcatatcggtgggcatttaagcccttgttgccgacagtccccaccatcggaatacctgatacagttctcatcctacagaacgaaactcaaaggggcaagcgactatggcagtgaaatatcgtttggggttggacgtgggtacggcatcggttggtgctgcagcggtgtcgctggataaggatgggcaaccggatgcgctgatctggcatcacgttcgaatttttagcgagccactagaaaatgcacaaggcacattgatttccaagaaagccggacggcgcaaagcgcggatgcagcgtcgccagattgatcggcgtgcttcacgcttgcggcgcatcgcaaatcttgccagcctgctcggactaaagcgcgaagaaatcgcacccgatgatggcagcaccctgccctatcagcgcgcccaagccgcaaccgaacgcgtcgaacttgacgatttattgcgtatcttcctgcgcatttccaaacggcgcggttacaagggcgagttcaaggccaagaaaaaaggtccagtcgccgaaggctcaagcgaactcagccttgccatgagagaactcgccgcaaaacacggcattgcactccaggatgaaaacgacaccggtattacgcttggacaatatctacgacatcgcatggaaagtggcttgccaaccaagctcaaggtaaaagaagtcagcgacgaaccgaagagtaagaaaggcgaagacgcgaacgttcctaaaaatctctacgcgctccgcaaaatggttgagcatgaattcaacatcatctgggatacacaagccaagcatcacgacatcctgaacgaaatacatgacggcaaacctatccgtgcacatttccatgaggcgctgttctatcagcgcccactgaaatcggctgccaacttggttgcgcaatgcggacttgaaccgacgctgccccgcgcaccgcgtgcgcaaatggcctttcagcgttttcgcattgaaaagacactggcggacttgcgctggggggctggcaaacgcgcggaaccaatcacaccggatcaaaaacgggtcatccgtgacttgctcgaccacaacgacaaggtgaaattcgacggcatctacgaagcgctggaaaacgcgggatgtgccaagccgcaaggcaagggactgaaccttgaccgcgccagtcgcgaagaactgcttggcaacagtacgctggcggcgctacgcaaactggatagacacagcatgaaaaaacacccagaacgtgctgcaaatcttgaacaagccttccgtgctctggatgaaaaagcacagattgccaccatcaacttcttggcggaaataggctcaccggagcaactcgacgatcccgagtggcacaccagcttcgtcaagcgcgatggcaaaccgcgccaattcagcgagcctttgattgccttcgttaaccgcatcaaggagcacgacaatttcgaccgtctgagcaaaatggactttgacggcggacgcgcttcctattctgtcaaagcattgaacaatctagctgactggctggaagagccgagctggccgggtgattggctagacgatatgaagcgcatggatgaagaagctgccattcgcgtgtgttacccgaaatcgctcaaccacgagatcaagcgcatggataaattgcccgcgcctgaatctaccggcaacgccgtagtggatggttcgctgcgccagattcgctggacagtgaacaagatgattgccgagcttggaacaccacctgatgagatcgtagtagaaatggcacgcgagatgagcttgggcatcagccgccgcaacgaacgcgaaagcgatatcaacaaacaaaacaaggcgcggcgtgaagcggaaaaagaaattcgcgcacacaatcaaacgccgacaccatccaagattcgacgttacctgctttgggcagaacaagataaaagcttttgcccttactgcaacaaaaacatcagccttgccgaggcgctatcaggcagtgcgacagaatacgaacacatcatccccaaatcgctcacacaggtaggcatgaagagttctgaaatcgtgcttgcccatcacggctgcaaccaagaaaagggcgacctcataccttgggaaagatggggcaatacagatcgctggcaatccgttgaagccgcggctacccgattcgaagcaaaaaagcgttaccgcaaagccaagctgctacgccttaaagattttgagcgtgaagtattgaccgatgaatctattgacggctttgcagaccgccagtttcaccaaacctcgtggattgcaaaggaagcggcgcaatggctggaatgcctatgcccaaacaaggtatccgtttcgcgtggcgaactaacatccatgctgcgcagaaactggaagatggaaaccgtaatccctgaggttcgcatcgaaaataacctgccgctgctggatactgaagggaagctgattgcgcagaacgattttgacaacctcaagaaataccttgaagggcatccggtcaggagtgaagaccgcaaaacgaatcccggtttcgatttcaaccgacgaccagacaaacgtctcgaccatcgccaccacttgattgatgcgatcacgctggcactcacctcgcgcgggctatatcagctaatggcgaagaactacaagaccgccgccgaaaagatgcaaccgcgcgaaggcgaaacacaagaagaacgcgaacgccgcatgaagagtgaaacacggttgcgcctcgaagtgcctgagccacctttacgcaacgtgcgtgctgccgcacttaatgctgtacgtgaatgcaacatttccatcaagccggatcgctacccggatggcgcattgtttaagagtactgcttatggtgtagggcaacgcgaaggcgaagatagattacgccttacattgcgtcaaccaatcgaaaacatgggcaaagtgcagggaaaaacaaaattggaagcagcgcgcaaagcgattgcctctatcatcagcgatgacgtgcggcgtattgtcggcgatacattcgaggatcgcattgctaacggcatggaggccggagctgcattagcattgccaatccggcatccgctctatgacaaccctatccacaaggtacattgctttgaaaactatgccgaagatgcacagcccattgggttcactagccgccatggtgaacatcacaaatatctcgtcaatgaaggatatgcctatctggaattaatcacggatggatcaagtgaaccgcgcttggtaaaaattcgcgatgccatgcaaggcaaaaataaactcgtatcacaaggtgtggtacggctttacaagggagacacaactaaagattccaaggatgggaagctgtatcgggttggctatttcacagcggaggggaacatttttctaattccaatggttgatcctcgatcttttgacaaaattacggaagccggctctggaaaaaagaaggtggcatttacgcaggccgtcaaacgactttcgctaattggctaggtaatctaccatgtcagagcagcgtgtcctcgtcatcgaaaatcctgcccacctgcgcatagacacggggcggctgaaaattgagcgggacggctttgaccatacgtttgtctcgccaaaggatgtggctgtgctttgcctcgaacaccacaccaccacgctctcggtcgccgtcttgcgcgcgctcgccgaagccggggcagccgtgatggtcaccgatgcgcggcacatgccgtgcgccatgcaaattccactcgcagctacgggattggatgcaggcagattacgtcagcaaattgcactggatgccagcgagaaacgcggcgagttatggcaacaactcatttccgccaaattgtccatgcaggcccacgccttgcgcggactgcaacgcaacggggcattgcgcttggagcgtctctcaacgcaagtacagcacggcgataaaagcaacgcggaaggccaaggcgcaaagcactattggaataacctgttccccaaaacattcaagcgcagcaaagaaggcgcggaagacccgctgaacattcgccttaactatggctacgctgtgttgcgtgccatgattgcccgttccttagtctctgccggactcaacggcacgttggggttgggacattgcaatgcgggcaatgcgttcaacttggcggacgatttcatcgagccgtatcgctttctggtggatgtgcatctggctgatgatgccgacacttggagcgaagcgccggaattcgacagccgcgccaagcgctatttgcttgggttcgtcgaacgccctgtacgtatggcagggcaagacatgcggctgcacgccgcgattgatgtgagcatcgccagcttcgtgcgcatccttgatggcaaaggcaaaaaactggcgcttcccgaggggctggttattgacgaggacgatgaaaaatggcggtcaacggatggcgcgtgatgtgggtaatcgcggtttatgattgcccgatgatagaacgcgaggaaaggcgcgattacacactgttccgcaaaagcctcctgcaagaaaatttcttccagctgcaaaactccctctatgtacgccatttccccacgatggcggttgccgaagccacgatacagcgcatccgtttgggcatcccggcaggcgcgcaagtggcctttttcctcgtaaccgataaacagtacgggatgactcgtgagtttttcggtactaagcccacaagaaaaaagcccaaccagcctgagcaagttgagcttttctaaaacaacttcacaatcaaaacaaccgactgcgtgcgacctagtttatcaggcattccgatggtggggtgtcggaactgcgcggctggtcgtatgaatacaatgaagagtttatcaggcattccgatggtggggtgtcggaacacacatcgcgtgggatcggcgcatcgagctagtttatcagg

SEQ ID NO: 4025 - DNA, 8041 bp, synthetic construct
  source 1..8041: mol_type = other DNA
  misc_feature 1..8041: note = Synthetic
aacaaagtgaattttagatttggcaacattaagcttatttcaaaagtaattgatggtaaaatcactgactacaaccgcgtgattccactggggcatcaaaacacatttagcattgagcgtttaaatgttttactcgctatgcaacgcgcttcaattttatcaaatgaaaaataccgtggtattcgtatggtattaagtaataataatttaaaactcattagtaccaatagtgatcaagaagaagctgaagaagagttagaaattaactatggtggcgatacacttgatattggttttaatgtgacttatttaattgatgtgctcaataataccaatagtgatcaagtgatattttcatttgcagatgcaaatagtagttgcttaattactgtgcctactaatgttgattacaaatacgttgtaatgccaatgcgcatttaatgtttcacgtgaaacacaagttttaaaacctctaaatttaaaagaaaattagcatgactgataaaaaagaaatatccactgattacgactcatccagcattaaaattcttgaaggtttggatgcggtgcgcaaacgtccaggcatgtatattggggatacttctgatggctctggcttgcaccacatggtgtttgaggtgctggataacgctattgatgaagctttagcggggcactgtgatgatattaaggtgattattcaccctgataactcagttagtgtctctgataatggccgtggcatacctactgacattaagtatgatgatattaaagcggtgaaacgttcagccgctgaaattgtgatgacagagctccacgcaggtggtaagtttgatcaaaattcgtataaagtttctggtggtttgcatggtgtaggtgtttctgtggtgaatgcgctgtcagactggttaaaactcaaaatttaccgtaacggtaaagtacaccaaatggaatttcgccgtggtgaagccgtagcacccctagtagaaaccggcacaacggataaaaaaggcacagaggtgcactttttagcctcagttgaaacctttgttttagtggaatatcactttgaaattttagctaaacgtattcgcgaactttcatttttaaacaacggtgtaaaaattgaactagtagatcaacgtacaggtaaaagtgaaaactttgcgtactcgggcggaattaaagggtttgtggaatatatgaaccgcagtaaaactgtgttgcaccctaaaaccttttacgcaatgggtgaaaaagacggcatgacgatagaagtggccatgcaatggaacgattcatactcagaagccgtgcaatgctttactaataatattccgcaacgcgatggaggcactcatttaacgggtttacgcacggcgatgacgcgcacgctcaaccaatatattgagcaatcagaactcgctaaaaaagccaaagtagaaactacgggtgatgatatgcgcgaaggcattacctgtgtgctttctgtaaaagtaccagaccctaaattttcatcacaaactaaagataaattagtttcaagtgaagtgcagcctgtggtatctgaagtagtttcagctaaattggctgactttttacaagaaaatccagcggatgccaaaataatctgcggcaaaattgtagaagctgcccgcgcccgtgaagcagcgcgtaaagcacgtgaaatcactcgccgtaaaggggtgatggacacgatgggcttacctggcaagttagctgattgccaagaaaaagatccagcactttgtgaaatttaccttgtggagggtgactcagcgggtggctcagccaaacaagggcgtgaccgtaaaaaccaagccatattgccgctaaaaggtaaaattttaaacgttgaaaaagcacgttttgataaactactgggttcgcaagagattgcaacgctcattactgctttgggtaccagcatcggcaaagcagattttaatgcagaaaaattacgctaccaccgcattattatcatgaccgatgcggacgtggacggcgcgcatattcgcaccttattactcaccttcttctaccgccaaatgacagaattggtcgagcgtggccatatttacattgcgcaaccaccgcttttcaaagttaaacaaggtcgtgatgaacgctacctcaaagatgaacaagagctggatatttacttgctgcaatcagcccttaaaggtgccgagttagatacaaaaactgccgcaggcgtattgactggcgatgcgttgggtgaaattgccaaacaagtggtactcacagaagcggtgatacgtagaattgcagcactctatgatgaaagtgtactccgcgcgatacaagatgctggtgaaattaacttaagcgatgagcaaagtgcaaatacgattgcggaaaaactacgcccaattttaggcgcagtaggcagtgaagtgattgtggcgtttgatgcagaaaccaatgcttaccgcctagaaattaacaagttcgttcatggcaatttacaaagctgtgtgattaacgcagaatttttaagtagtggtgattacagacaaattattaaaacctccaccatgctgcaaggcttagtaggcgcgggggctgtaataaagcgcaatgaaaaagaacaaaccgtaactacatttaagcaagctctcgattggttacaaggcgaggcaaaaggcacgttgaatatacaacgctataaaggcctaggtgaaatgaacccagagcaactgtgggaaaccactatggaccctaaagtgcgccgcttactcaaagtgcaaattgatgatgccattgccgccgatgaaattttcaccaccctcatgggcgataacgtagaaccaaggcgcgcctttattgagaacaatgcactaggggtgggtaatttagatatttaagaatgtaggtttgttctaaactcgagataagtcgcaaaaagtgagatattgagagaataaaaaaagcccgaaagggctttttttattgaaactgaaaagtaaagaaagttattaggtacgttaaacagaatgaggttaataaagaaaaaagcagaccgaagtctgctttttatatcggtggggttgtttttacacttccccttgttgccgatagtccccaccatcggaatacctgatatatttgcattgttacatcaataacaataaagggcaatggttatgcgttatcgtgttggtttagatgtggggacggcttcattaggggttgcggcattttcactagatgaaaataacaatcctttagaattaaagtggtcgcatgtacggatttttgatgagccgttagaaaaaagtcaagctgggctaaagtctaaaaaagcagggcggcgtgctgcgcgtatgcaacgccgccaaattgatagacggttagggcgaactaaagcaattgcagcgttagcacctttgttaggcattcaaattgaaccatctcatgacagtgggcgaaccttattaaaaattcgcgcaaatgccgcgcgtgaacagattgatttgtcagatttaatccgcgtgtttattcgtttaggtaaaaggcgtggttatcccgcagataagtttagtaaaaaaggtgaagtagaaggcggtagtagtgatttaattgcccagatgcaagctgttgcagaatcacgtggagtaacaataattactttaggtgaatatctgtatgaacgttggcaacaaggcttgcccaccaaattgaaaatcaaagaaaagcgcgataaagaagatgagttacaaaatctttatgcgctacgtagccatgttgaggctgagtttgaacaaatttggcagacgcaatctgctttttaccctattcttaattctcagcacgaaggcaaggcacttaaggaagtttttaatcatgcaattttttaccagcgcccactgaaagcggtaggtggcatggtgggacagtgtggattagagccaaccttggctcgcgcaccacgagcgcagctagcttttcagcgttttagaatagagaaaacgttggcagatttacgctggggtgcaggtaagcgggccgagaaattatctgtcgcacaaaaggctgtgattcgccaattatgtaatgaaaaagaggtggtgaaatttgatgtgatttaccaagcactagaagccgcaggctgtccaaaacctgaaaccaaagggcttaatttagataggcttagccgtgatgaaattccaggcaataaaactaaccaagtgtttcgtaaattggatttaggggataagtggctagctttagatgaacgcacgcaaattcaggtgatcaactttttggcagatttaggatctcctgagcaactagatgattcattgtggcatacacgctttgccaaggccgatggcacggtgcggcaattgccagaggcctttgttgcgtttatcaacttagtgaaaagccatgaaaaatttgaccgcttaagcaaaatgggttttgaaggtggtcgagcttcgtattctattaaagctctaaataagctcattgattggctagatacgccttggtggccaaatggctggcaaggtgaaatgcgcccagatgaagatgctgcggtgcgtgtgtgttatcccgaaagccttaataaacctgtgacactgaaagataaattggattttgcgccaagcactggtaacgccgtggtagatggttcgctacgccaaatgcgctacgtattaaaccgcatgatggcagatttaggtgcgcagcccgagcaaatggtggtggaaatggcacgtgaaatgagtgtgggcgtgagtaaacgtaatgagcgtgaaagtgagaataataaaaacagaaaagcacgtgagagtgcggaaaaagcaattcgtgcagcacctgcaacggttacaccttcacgtataaggcgttatttgctttgggttgaacagggtgaaggacattgtccatattgcaccaagaaaataaatttgggtgatgcacttaatggggcagaaactgaatatgaacatattttgccaaaatcgctcacgcaagttggcttaaaacgtagtgaaattgtgctagctcaccgcagttgcaaccaagaaaaaggcaatcgcacgccttatcaggcatggggacacgacacagaccgttggcaaattattcaaatgcgtgccaagtattttgcagataacaggcaatatcgcaaagccaaattgctgttgctagaagactttgaaacagaagtactgacagatgaatcaattgccgaatttgcagaccgccaatttcaccaaacctcatggatagccaaagaagcggcgcaatggttgcaaggtatttgcaaaacgccagtttcagtgtcgcgtggtgagcttaccgctatgcttcgccgtaaatggaagctagaaacggtcattccgcaagcgcgagttgaagaaggtttgccgattttagatgaagaaatgcaagtggttagcgttgaggattttgaaaaataccgtgatgtgtgggaagggcatagagtgctagatagtcacggacacctagataaatcgcgccatacagaccgcaaactcaataaacgtatagaccacagacatcatttgattgatgctattactattgggctaacttcgcgtagcctgtttcaaaaaatggcgcggcaatacaaaattgacagtgagcgtgaagcaagagggcaaaagccaaggctagaagtcggcgaaccgccgattaaaaatgtgcgcgaaattgtcctagcagctattcgagaatgcccattatctattaagccagaccgttaccctgatggggcgatttttcaagaaactgcttatggtgtagcagttaaagagggtgaagacaaagcccgattagccttacgtgtgaaagtggcagatttaattgaccgcaaaaaaagcacggtagagcaagcgcgtaaagcgatacaaagcattgtgagtgaaacaattcgtgagattgttgctaaagaatttgaaagtaggattgttgcaggtaaatccgcgcctgaagccttggcgatgcctatttatcaaacaatgtatggtcagcgcgtagagattaaaaaggtaaaatgttttacaggcaattatgcggatgatgtggcgattattagccacaccagcaaagacgggtgcgagcatttgaagcgtttgccgaatgcgggctatgcttacttagaaaccgaaatctttgatggacgtataggcaagcaggaactcgtcaatacgcatctagccatgaagcgcaaacataaaccacaatctgaaaatatggtgcgcttacataagaacgatacggtgctggatagtaaagtaggtaaaaaatatcgtataggatatttcaaagcggtaggtgttgttgctttaattcctattacagaccctcgcgcatttgatgcgattaaagagccagaatcaggaaagaaaatggtttcgtttaaccaaataatgcgcttgaaacggcttgattaaccatgtctgaacatcgcattttgttaattgaaaacccagcctcactttcagtagatttaggcaggttacgcattcggcgagatggttttgaggatagtttcgtattacctaaagatattgccgtgttgtgcttgcatcaccacaccatacaaatttccgtgcaggctttgcgcggattggcagaggcgagtgcgagcgtgttggtgacggatgaaattcaccatccttgcgcgtggtttttgccacaagtgggtaatggcgatttggtgcggcggctacgccaacaaatggctttggacagcactgaaactaaagcgaagttatggcaagcattggtacaagcaaggctcaatacgcaagcggttaatttacgcgtgttaaaccgcaaaggcgcattaaggctagagcgtttagcgcaagaagtgcaaccagcagataaaactaaatgcgaaggacaaggcgcaaaacattattgggcatatttatttgaggctgaatttagtcgtgaaaaacaaggtgcagaagatgcgattaacgcacggcttaattttggttatgcggtattgcgcgctatggtggcgcgtagtttggtattggcaggcttaaaccctgctctgggtttggggcattgcagtatggaaaatccatttaacttggcggatgattttattgagccttaccgttttgtggtggaacggcatgtggcaaaaaaccacataggtgagtttaacagccaggcacgtaaagaaatgctgggttttgtaacacaagaaattaagctcaacggcgcaggctatcgcttgcccgctgccatcaatgaaagtgtcgccagctttgtgcgcatattagatggcagagccaagcaattaaacctgccagaagacatgctaatacaagccgatgatgaagaatcatgggcgtaaacgggtggcgcgtcatgtgggttatatgtgtatatgattgcccgatgatagattccgatgcacggcacgattacacaattttccgtaaaagtttattgcaagaaaattttgtacaattgcaaaattccttgtatgtgcatcactttccaacccttgcagtgggtgaagcgaccatcattaggctacgtccacttatccccaaagacgcacaagtggcattttttatagtcacagataaacaatatggtatgaccaaagagttttttggtacacgccccacaagaaaaaagcccaacatgccagagcaagttgagcttttttaactacaattaccatttaaaacaatagattacgaataacctattttatcaggcattccgatggtggggtatcggaacctaagcgtttctagcgcgtttccgacgcctattttatcaggcattccgatggtggggtatcggaacctgcatcggcatttgccgtatatccttgatattttatcaggaattccgatggtggggtatcggaactgtgatgctctagcaccccgccatttttgcattttatcaggcattccgatggtggggtatcggaactttagatagagaggttattttagaagctggattttatcaggcattc

SEQ ID NO: 4026 - DNA, 23006 bp, synthetic construct
  source 1..23006: mol_type = other DNA
  misc_feature 1..23006: note = Synthetic
gctgcgtctccgagtaatcgctgaagaatccggccgcgccggccggcgcgccggtgctgcggaagcgggtcgcgcctttttcgcgcagatcttcgagcgtgacattcttcgtgatggtcgagtactcgagaatgaacttgagggcctgctcttcgtctccgggaccgaagcgccctctgtccgtgaacgcttcgcccaaccgccccgcgtcgcgctcgacctcgcctatgtcctgatacggcttgagctgacggttgccggcttcgcgtgcgacggcctgcgcaagcaaggcgaagatctcccactccggcttcgcctctccctgcggcgcacaggcgcgatcgccgaggtgcacgtacgggatgaacgaagaaagatacttgagatccgtcttttcgtaccagaacgctgccggcaggatgacgtccgcccagcgtccggtctcgctgacgcggaaattcacgtcggcgtgcatgcgcagcttgggccacaaagtttcgcgcagtcgcacgttgttgcgtgagtgacgcaggatgttgccgaataccgacacgatcaccttcggatcgcgtccgggctcgggaatcatcggaaaccacttcttctcgatcgcttcccgcaggtagtgcgatgcatcccgcggcgcgctcttgtctccgtgcttattgtcgccggaggtggcggcgagatcgccgtgaacctgatgccagaggttgccgggcacgaagtagcgggcgaatgtatgttccgttccgacgggatcggcgtagttcttcgcggcaaagcccgccaggtcgagaatccccaaccgttcctgcatcgcgagcagagcaaaaccctcgggcgcgaagaatccgccggaacgccagccgccgcccggccgcccgaagtttccggtgagagaagccagcaggatctgcgaccgttgaatcaggtcagcgtgcaggaacttgcattgcccccacgacgaaagaatgagcgcggaaggtgctttggccagaccgcgcgcaaagccgcgaatcgtctcggcgccgacgccggtgatctccgcggcctgctcgggccggtagtgcgcgttgaggttttcgcgaaggagcgagaacacagtacgcaccggcactgccttgccggcgatctgcatcgtaccgctgaacgcgagatccggtttcagcgccgccatgtgcagagtgtccagatctccgctgccgggcgcgggcgcgggtccgccgcggccggcgtcccacacgaagaacgcgctgtccgagccgccggcgcgcagatccgattcgcgcacgaaatgtcgcgtgtcgctgcgcacgagcagcggcagatcggtctgctcggcaacgaaggacgggttgtacaggttctcctcgatgatcacctgagcggcggcgagcgccagcgccgcatcggtaccggggtgcgggttgagccacagatccgcgtgcatcgaactgttgttgagatcgggacacaccgtcacgatctgcgcgccgcgataccgcgcctcccacaggaagtgcgcatccgggatgcgcgtggccgacgggttgaacgcccacagcacgatataggacgaccgcgaccagtcgtccgaagatccgcagggatgcccgttgcccagcgtgatggtcgcgccgagcggtagatcgccgacctgcgccatcgagtcggtggtcggcgcgcccaggaggcggaagaagcgcatcggcgccgcactgttgggaccggctccgatgttcggaccgagttcgcacatgatggaagacggcccttcgtcttcgagcgaatcgacgatgcccttggctacgctcgacagggcgtcatcccacgagatgcgctgccaacgcccctccccgcgctcgccgacgcggcgcagcggatagaccacacgcgacggcgagtacatcaacgtcgaagcgcacgctcccttctgacaaccgcgcggattgaaatccggcacgctcgagttcgaggcggcgtagggcgatttctgctcctcgcgccacaccatgccttccttcacgtaaaggttccaggcacagcccgagacgcagttggtcatcgagtgcgtcccgcgcacgacgcgatcccacgtccagccccgccggtacaggtcttcccacgagcgatacgccggaagctcgacgcgaggcggcggcacggccgccgtgcccggagccgccggagccgaactgcgctccgcgggccgcgaatcgcagccgagttcgaggttggccagtcccaacgacagtgcggctacgccgccgattcgaagaaagtcccttctggaaatcccacgcttactgttcacagccatgacagcccacctataccctcgatcgacgaagaccgccggacgtaccaacttccgccgagattcgcgacagcatttccacccgccaacatcgaccgcgacgaaatgagaagccgatggcggcaaacatggcgtctgcggcgaagaacgcaagcgacggcaggcgattcaaaggcccggacgcaatcacgtcgttcagataccgcctgagagttcgaccacgagccgctgctgccgagaaccgaggactcctggcgcgcgaagtcacgcgcccattgccggatctcttcctgttctgcggtgaggtcggtcatgtcattctcctcgctgatttcgtggtcgatggggcacgctcaggaatctgcaagcgcgctccgagccgcttgcgtgtcgccgccggccggtgtcagaggggcgggttgcacgccctggtacggctcgcactccacgtacacgcagcgatcactcggtgtgggttgccactccaccggcgtgtaggtcagctgcccgtaaccggccaccaggtgcagccacttgaccagccccggttccacttcgttggcgcccttgccgccggggaacgcgaaaccctcgaagccgttgtagacggtgagcgagcccggcctttgagtgggactggtgcgcgccgcgacgaggaattctcccgcatcgttgtggattcgcaccagagcgtcgtcatcgattcccttcgctctcgcatcggcgtcgttgatcagcacgaacggtttgccgcggtgggtttccatgatgaccggattggtcatgttcatggagtggatgctccagcggctgtgaccgctggagagcgcgaacggatgcacgccgcccatcgccggcggttccttgtgcaccggcaggtcctcgccgccttcgcgataccacgggtgatcgagcaggaactgcgcgcgccgggtcagtgtcggataaggatgaccgagttcgacgtgattgcgcagcggcacatgagtttcgccgtccgggaacggtgaggcctgcccggtgccgaacgccgatattccccagttcgtatagcggcacattccctgcgtgcgaaacgtttccaacgtcgtaccggccggcagattgccgagcgccaccgaagaggcgaccatgtcggcggccaccgtctcgtcgtcgatcagagctccgctaagggtgtagttgtcccacagctggtcgtagcggcgctgcatgcctaaacgatcggcataaccctcgagcccgcgctcggaggctcgctcggcgagtttgcgaaagagcgccgccagcacttcccactccgaacgcgcctcgcccggcggctcggcaacggcatccgacatcgtcaggaacatggtccacggcgtcggcatgttgaaggtcgtcttctcgtagtgctgcgtggcaggcagcacgatgtcggcgtacagcgccgtctgcgacatccggtagtccatcgcgacgatcttcttgagttgaggccacaggttctcgagcacgaccgcctttccaccgcggctgcggcgcagcatgttaccggcgatttccagcaatacgcgcggcggagactgcggaagcggccgcgccgcgtcgccccaccagcccgactcgacggcttcgttccaatactcgtcgaacttgcgcggcatcgccggatcgttccacgcatcgcggttccagcgatcgcggtaacccatgtgccagtaccagaagaaggccggagggctcatgccggtgccagggcccatcattcgccacaaagagctggcagcgagttcttcggtcagcgtcggatcctgctcgcgcatcgactcggtgaccatccgcatcgagtcgcgcagttcgaccgccgcctcgccgccggctttgaccttggcgatcgccagcgtggtgccgtcgaacatcgccgaacaccagcccgaagcaccggcgcccttcttgccccagtttccggtcagaccgagcagcagcagcatcgtgcgctggatcagatcgccgtggtaatacttggtcataccggcaccgaccaggatgctggtgcggccgcgcgcgaccttgcgcgcgatggtgcgaatggtgtcgggatgtgctccgcagatcggagctgcgatttccggcgtgtagtgggtgtcgagctggcggcgcagccgcgcgaacaacggctccacggtgcaacggccgccgccgtggagttcgacgtcgaaggagccttccagacacgcgtcgaagtcgagcagcagactgcctgcatcggccggcaccacaccgcgcgcggggtcggcttgatggaaacggtcgtcacgtccgcctgcctcgacgtgcgaagagcgcaggaactctccggtatcggtgcgcaccagcaacgacaggtcggtctgcgaacgcacgaagccgagatcggtcagtccttcggaaacgatcacctgacacatcgccagtgccagcgccgagtcgctgccgttgcgcaccgggacgtggaagtcgacgtgactgtgcgacggattgacgtccggcgagatcagcaccagttcggcgccgcggtagcgcgcctcgaccatgtagtggaaggcgggaatctgcgtgtaggccggattgctgtgccagatcaggatgcagtcggagtggaacacgtcgtcgaccgaacgcgcgaacgccgacttgccgtacacctggtggaagccggcccagaaatcgttgatcgacgcgttcacgtccaaagaagtgccgccgagaatgttcatgaagcgcgccgccgccggcatcaccgcgatttccggcgagacttcgtggacgatcgcggccggccccacttcgacgatggcgtcgagcatcgcgtcggcggtctcggccaaagcctcgtcccaggaaatccgctcccagcgcccttcgccgcgctccccggtgcggcgcatcgggtacagaaggcgatcgtcgccgtagagctgccggctccacgacgcgcctttctggcagcccatcgggttcatgtcgggaaccccggcttcgacggtgcccagcacgcctgccgcctcctcgtagacgaccttgccgtccttgacgaagacgaacagaggacagttgttcggatagcaatccacgcagtgggtgccgaatgcgacgctgtcccaggcgttgttgcagcgatcgcgctgtgcgtcttcgctcacggctgcacctccttgccgacggcgccgacgcgtcccggcggcgtggtgaacggcccgaacagttgctgccacttgtagactatcagcgtgtcgagcagctcggattttcctccggcgcgcacggcggcgagttcgccgcgcatcttgtcgagcgcggcgtgaaccttggggccgaacagcgactccaggtaagccgggggaatacgcggcgtctgatagtcgatcgacagatcaccgttgagacgatgcggcgacagcggcggaatgtagaaaatgttcggctcggtgccgtattcgggatgcagaggcagcgcgactttccactcgtgcaccagtttgtggatcggcccgtccttgtcgtcgagcataccgacgaagaccagccgtccgggacactgccgcgcgcagaccggagcgacaccgttttcgagacgcggaaaacacatgttgcagtgctgtgcgacgttacggacgtggttgaaatagattttcttgtaaggacacgccgccatgcacgcacgcgaaccgcggcacaggttctcatcgcgcagcacgatgccgtcctgctctcgcttgtacatggcgccgctcggacagacttcgacacagaccggacgcgtgcagtggttgcacagccgcggcaggtagaagaagtacgagttgggatactcgccgccgccctgatcctcgtcccagttcggtccccaggtcggctccttaccggcgccggtgccgcgctcgctcggcgccaggtgcaccgacgagcctttgccgccgaagaacacttccttgtggttgaactgccagccgccgccgaagtcctcagcggtgggaaccttgccgagcaccggacggccttcgacatcgtaaccgccgcccatgctctcccagcctttgggagtgccgagtccgggctgcgtgttgaccgaacaccaccactggttctcctcacccggcgcgccggtccagagcatcttgcaggcgaccgaacaggtctggcaccccatgcacttgttgaggtcgaagaccatggatacctggcgctcggaggtcggctggcttgggctcgtcatcggtcgtctctcccggacccgtgcttgtcgtatgcgtcacgatggcgtgcggaccgcgaggctttatcgaccatccagatattccggtccaatactatcttttgatacatgtattcctcctggctataagacggcagcggaggtcaatgcgggatggacatgcggcaggtgcgccacctggtggcagtgatcgaacacggcaacatcctgcgcgcggccagcgcgatccacatctcacagccggccctgagcaagagcatccagaacctggaggccgaactcggcgtgcctcttctcgagcgaggcccgcgcggcgtcactccgacgatctacggcgacaacctgctcaagcacgccaggctgctgctcaaccagtgcgaccaggcgatcgccgagatccgtgcgatcaaggacgggcagctcggccacttgcgactgggcctggccaacttcgcgatctattttctgccgggagtggtggccgagttactggtgtcgaggccgggactgtcgctcgacatcgtcgacggcacctatgaaggactcaccgccctggtgcgcgaaggcgcactggacgcggtgatcagcgggttgccgcctctgcatcaggctcaggacctggtgcacgaagaactcgtctccaccgagttcgtgatcgcctgccggcccgactatccgctggctgcgcaggccgcgacgtcgatagccgtactcgacaaggcgcagtggattctgccgaacaaaccccaggccatcgtcgacctgtgggaactggcgtttcgcacggccggcgcgaccccaccgcggccggttctgcaatcggcgtcgatgatgttcgtcaaggcaatgctgctggaggggccattcctggctctgctgccgcgcggcatcgtccactatgaactcgagagcggccggctggcggcgattccggtcgccacggtcgcggaaggaatcatctaccgcgcaggcagcgtgcatccgcccgcgctcttcgtgctgatcgaggcgatccgcgcggcgcagcgcgaaggcgtcggcggcgcacgcacatcgcggcccgggcctcccgatggtggcacgctcgcagcggcgttcaccgaagcgatccgtctcgcgcagcaacgcgaagccggcgtcgtcgctggtaacacccggcgcaagaaaagcgcgcacaaaacgcgcgacacagccggcgtcgtcgaagcgagcgacgtatcgcctgccaaagggttgcgccgatgaacgaatcggccgtgggccaccgtccgaccgccggcgacatcgccgcggctccagcagtacgcgcgccgcggcgatgtcagatccgccgtaagtcagcgatcaatcacgtggatgtcgcaccagcgaggcgttgttcgcgtccgcgcgcctctcgcccatggcaacgacgcgaacaacgacattgacgcaagcaagcccatgctatacccgcaccgggccacccgaggaggggctcacctcatgcacctactgacacgccacctgactgccgccttgctgctctttgccgccaccggcgccgaggctgtagttccggtgcccgatcacgtcgtggtcgcgatcatggaaaacaccaactacgggtcgatcgtagggtcggcggccgcgccgtacatcaactcgctgatcgccgacggcgcgctgatgaccgacgcgcacggagtcacgcacccgagccagcccaactacctggtgttgttttcgggatcgaatcaggggacgacgacggatgcgtgcccgatcggaccgttcgcgaccgacaacctgggcagcctgctcatcgccggcagtctgactttcaccggctactccgagagcctgccagcgcccggcgacagttcctgcaccgacggcgtgttctaccggcgcaagcacaatccgtgggtgaacttttccaacgtgccgagtgcttccaaccagccgttctcggtcttccccgccgactactcgacactgcccaccgtctctttcgtcgtgccgaaccagtacaacgacatgcacgacggtcccaccgcagccggcgatgcgtggctgcaagccaacatcgacgactacgtacagtgggcgaagacccacaacagcgtgttcattctgacctgggacgaggacgattttctgcccatcaaccacatcgtcacgctgctggtcggcgagcaggtcgttgcaggcagttacgcgacgcgcaccgaccatctcgacgtgctgcgcacgatcgaagacatgtacggactgtcctacgccggcgccagcgacacggccaggcagatctcggaagtgttcgcgacctgcggcgacggcatcgaggaaccgggtgaagaatgcggcgacggcgcactggtctgcgatggcgctcaggtctgcgtctcgtgccagtgccttaatccggtggcgtgttcgagcggcatcgcgctggacaaaccgagcgtctcgctgacggcctcaccttccgttttcaagttcaaagccagcgccgtcatccccaagccctgggtcggagtcgatccaccgacggccggtattcgcatcgtggtcgacacgatcgaccacagcggcggaatcgacgccacgcttgcggctggcgcagcctggaaggccaacgccgcgaacacgaagtggacctacactgacaagaccgccgccgtgtcgggtatcaggaaagtcacggtcaccgacaagtcgagcaagatcgacggtcagttgcagatcgccgtcgccggcaagagtgcatcttcgacgctcccctacctcggcgacgtgcgcgccagtgtcatcttcggtgcttcgagcgaatgtgcggcggtgagcgaaggcggagcgacgctcacgtgcagcggcgacgccgcttacgtcaagtgcaagtgaggctggcgatggccgtccaacgcagcgagccctcgcctgtgtcacgacacaaacgtaagacggcatcacttgtgggatagagccatcctgggttgcgccgctacccacgtatgcaggcttggcgaataagacagtcgcgatcagcaggcgagagacacatgccggacgatatcggcggagtcgcccagcgcgccaccgccccctcctgcagcccacgatcagcccacgaccgcgaacgccgaaagaatgtgtgccgcagatcacacatttcacgtttgcctgccaggtgactgaaccgcccggtcttgctctccaacgaacggagccccccgtcgtcagacgggaggctccagggtttacccttaaagggatatcctgcgaagctttcgcttcttgttatggaaagcagggcaggcgtcggtcagctacagtgctgctgattcctttactcatcggcgcccttttgtcaaaaacgctgcacaagcgaagcaggagtttttgtgtcaaagagcatcttaggccttgatctcggaacgaacagcatcggctgggccttgctcggcaccgctcccgacgggtctccaacccatctcataaagtgcggcgttcgaatcttccaagaagcggtcgatgcgaaaacacgcaccccaaagaacaaagcgaggagagatgctcgatcgctgcggcgcacactagcacggcgccgacgtagaatagcgaaactcaaaggcattctcttccgtcacgggttcatccccaaagaactcgctacagcaacgaatcccgaagcggcactaaatgccatcggggacccctacgaactcaggtgccgtgccctcgatacgcccctttcgctcgtcgagtttggtcgggtgctcctccatctctgcaagcgacgtggattcctgagcaaccgtaagacactcgtcaccgagcttgcggacgacccgcgcttcacgactttgctggcgcaggttgacgacgcaaagagttcccgcgactcagattccgaagaagcaaaggacgagggagagatcaaggaagagatcaaagggttaaagcgacacatacgcgagtccggagccagaacgttgggtgaattcctcgccagacagcgctcggaagttgtcgatgggcacacccggcgtatccatactgaccgcgcgatgtatcgagaagagttcgacctggtctggaacagtcaagaacgttttcacgaatcgctgcgcgatgtcgtattacgcgccgaaatccactccgccatctttttccagcggccactcagatcccaacgccacctcgtcggtcgttgcacgctcgagcgcgaccggcaacgcgccgcaaaggcctcccccgaagcacaacgggttcgtatcctgcaggatctcaacaacgtcgagattctcaaccgcgtgacgggcgagttacgccccctctcatccgacgagcgcgagctattgctgcgcgaactcgacggcggcaaggtccgtaaactaccgtggtcgaaggtaaagaagctcctcggcatccacaaaggcgagaccatcaatctcgaagaagggggcaaggacgaattgcccggcaataccacttactggtggatgaacaaggccctcggtgacacttgggaagcactgcctccagtcgagcgccggcgagtgatcgaagacatcctcaccatcgacaaacccgcggccttagccgagcgactcatgcgtgtttatgggttttcgcccgaacagacgctggacctcctaacggcaggatttgagcctggatacgcctcgcactctctaaaggcgcttcgtcgcatccttcctttcctggagcagggagccaagtaccacaaggctttcgaagcggccggatacctgcggcctgaccagataaagagaaccttcgttgaccggctaccgtcaccgcccgaggtccgcaacccagtggtccagcgtgcgttgttcgaaacccgcaaagtcgtaaacgcggtcgtgcgaaaattcgggaagccggaaatcattcgcgtagaactcgccaaagacctcaagcagacaaagaaggatcgcgaacgcgagcagaaacagaacaaagagaacgagagagcaaacaacgaagcaagagagcaagcgggcattgccggcgtgtcccgaccgagtaacgacgaccttctgaaatatcgcttgtggaaagaagccgggcagtgttgcccgtacacgggccggagcatcggaatcgcccaactgttctcgggcgacgtcgacatcgaccacattctcccctacagccgaacactggacgattcctacctgaacaagactatttgcctcgccgcagagaaccgtctcgtcaagcgaaaccagaccccgtacgaggcctatggtgcggacactggccgctatgaacagatagtacagtgcagcaagaacatgcctctcggcaagcagcggcgctttcagcagcgcgaactcgacggcattgatgattttgtcgctcgacagcttaacgacacacgctacgccagcgtcgccgcgcgagatttccttgcgattctcggctgcaatatgcaggtcgccaaaggagccgtcaccgcacttctacgaaccaaatgggatctgaaccgggtcctttccatcgacggctccggcaagaagaatcgtgcggaccatcgccatcatgcaattgatgctttggtaatagcactgagttcaccaagcatcctcaaggcggtttccatcagcgccgctcgccccgtggggatgggcccctgggacaaaggattccacatcaaccctccctggcatggcctgaaggacgaagtttcggcgtgcatcgcgacggtaatcgtctcacatgcaccgacccgcaagatttccggcgcgctccacgaagaaacggcctatggccgccgcggagacgggacgtacgcctatcgtaaactgctaacggccctcagcggcaagagcgaggtcgaaaagattcgcgatcccgcgatcaggcgtctcgtcttagagcgagtcggcgacgtcagcgacagagagatgaagaaaatactcggcgccccgctcatgcagaacccagaaaaaggcatccccattcgccgcgtcaggctggcagttacgttcagcgacgaagccgtccttcccgtcgtgggaaacgacggcagcccatacaagtacttcaagctcgggaataatcaccacgtcgccatcttcgaagaagaacgcacgggcaaaaggcgcggagtgttcgtacgagcgatcgaggccgcgcagcgagcacaccgcgaacgcagtccggtcgtcgcaacatcggcggacgcaggctggcgcttcgtggcctcgatcagcgcgaacgacatggtcagaatagacgaaggcgggaagtcacgcgtgtaccggctacagaagctggaagccacaaacaaccggctcatattccgcgagcacacggcagcaacgctggatgataacaacaccctactgcggattagcgtggggaaattcagggggacgaaaatcgaggtggacgtgcttggagaagtgaacccagccattcagacatgataaagcgcatcgtcgaaatttcgtctgctgcctacatccacacgaggctcggccaactcatcgtcgagcgcaatgaccaggatgtagtgcaagtcccccttgaagaccttgggactctgatcctcgacaatccggcaatacgactgacccaagcaatgctcacagcatgcgccgagcaggatgtggtggtcgtcatctccgacagcaagcacctccccgccagcgttttcttgccgtcggatggtaacactctgcagggcaagttcgtcgcggcccaggccgcacttacgctgccgactcaaaagcgactgtggcaagatatcatccggcgaaagattgccggccaagccgacgtcctggcgaacgcaggcgtaagtgatgtggctgttcgaagtatggtaccgcgagtcagaagcggtgatcctgacaatatcgaagcgcaggccgcacgagcctactggcctctgctctttggtcctggtttcaggcgcaatgtcggacaacctggaataaacgccctccttaattacgggtacgcggtgatacgagcggcatgcgcaagagcgatctgcggagccggactgcatccatctcttggaatccaccaccacaatcaatacgacccgttctgcctggcagacgatctcgtcgaaccgctccggcccataatcgacgccgaggtacacgacatagcgggaaaagctggagaggcagttgtcgatatcactcggggcaacagagaacgcctgctgactctcctgacccgaccggtaaccgtcggcgagcagagcctgccgctcttgtcttcgctgcacgtctacgtggcgagcatccgcgccgagatcgtcggcgagcgaggcgcgctcgtgatccccgcgccgtgagcttcggcggatttcgcagcatgtgggtctttgcaatgttcgatctgccgacggacaccaagaaagcgagacgggaatacaccttttttcgcaagaacctgctgagaagcgggttcttacaactccagtattccgtatatgctcgacactgcgcgagcgacgaaagtgccgacgtccacgcgcgacgcgttatggcgaacctgccacccgacggcgaggtccgggtgatgcgcgtcactgacaagcagttcgagcgaatgctgatcttccatggaaagatacgcggacagacggagaaggccccagagcagatcagttttttctgacctgcccaaaggccttcccttgcgatttcagacccttacgaccggcgtactgtagctgaccgacgcctgaccgcaatccacaacgcaccgggatatctgggaacactacgagcaactgtagctgaccgacgcctgaccgcaatccacaactacatcctgttgctctggagcatcccgatgactgtagctgaccgacgcctgaccgcaatccacaactgattgacacgcgggggaccattctatgaaactgtagctgaccgacgcctgaccgcaatccacaacagtttgggatggggatccccgtcgaggccgaactgtagctgaccgacgcctgaccgcaatccacaacgaggtggcggtcgctgtcgcggcggacgacactgtagctgaccgacgcctgaccgcaatccacaacctgcggggcggaaccaccgtggtggttgacactgtagctgaccgacgcctgaccgcaatccacaaccgtcggtcagcagggtgcggcattgtgggctactgtagctgaccgacgcctgaccgcaatccacaacgtcaccgacgaccggatcgcggtggtcggcactgtagctgaccgacgcctgaccgcaatccacaacggtggcgttccccagcacgtgtcgctccatactgtagctgaccgacgcctgaccgcaatccacaacaccgggaaacggtcctattccaacatgctgactgtagctgaccgacgcctgaccgcaatccacaaccgtgttcccgagaaggccacgcagccttacactgtagctgaccgacgcctgaccgcaatccacaacaacctctcgcacggggtctacaggtgagagactgtagctgaccgacgcctgaccgcaatccacaaccaccacgtcgcgactgacgatctggatcgaactgtagctgaccgacgcctgaccgcaatccacaaccgcaatcgtgagcgtgccgtgccgcatcgaactgtagctgaccgacgcctgaccgcaatccacaaccccaggagatgacccccatgactttgaaagactgtagctgaccgacgcctgaccgcaatccacaacacagacggagtctcagccgattctctggtcactgtagctgaccgacgcctgaccgcaatccacaacatgctcgacgctaacccgcgagcccatgccactgtagctgaccgacgcctgaccgcaatccacaacagatgctcccgcaaggggagcacccgttgtggatacggcaagacaggaaggcgaggaagggaacgccgaggagcagccggacaagacgactgcgatcgacaaactcttcaggcgccgcgctgtcgcagtgcaatgaagcacaaggctacatcgtgggattgtgcggaatcggcgcgccgcgagtctatctaccacacctcaggaacaagtagtggcgcgttcactccgccccggccagcagtcgctcggcgccttcgagagccagcgagcagatgatgatctgcgggttgactcccggcgcttcaggaaaggcactggcgtcaagcacccacagatttcgctgtccgcgcacgcggcctacgccgtccaccgtcggacctccgcggcaggcgccgccgaatggatgcgcggtgtacaggtaggtccagccgggaccgagtcgcagatccgtcggcggctgagtgacgaagtgcgtctctcgatgggacagcaacacccggccggcatcggctgccatgaacatctccactgcacgttgatagaagttcaaaatctgctcgtagtcgcgcgcttgcagttcgaactcgatgcgcggccggccgccgggacccagttggacgctgcctctggtagtcgagcgcagcagcatcaccgcaccggccagatagcgataacggcgcagtatctcttcgtgcagcgcgccctgagcctgaggctggaccgagaacgagagcgcctgcgtcgacactccttcgatcatgaagccggggcccgtgttgccgtagacatcggaaaactcgagcacaccgtaggccatcggaatgccgttgaagccgtccaccggctccgcgaaatctccccacgccagagtctgaaggtgcatctgcaggccttgccccgcgggaatgccgcttctcagcaacagcatcggcgtctgcaccacgccggccgcgagcaccacgtgctctgcctcgatctcgagttcaccgcactgcacccgccagccgcctgcacgcggcaccagaagctcggccctggtcatcggcttcaggcgcgcaccggccttcacggcgcgcggaacatagctcaggttcatcgaacgcttgctgtcgtaggcacaaccaagatgtcgcaagccgcactcgggacatcccggcgcattgtgatgcatgcgctcgcccttccagcccagtcgcgccgcgcccagtcccaccagatagttcgcgcgattgatcatcgagcgcggaatctgctcgacgccgagttcctgttctaccttggcgacatacggagcgagcgcgctcaacgacagttccgcgccgagcgcgcgccaacgctcttcgagttcaggcggcggacgcagacacagcgcgtcgttgaccaccgtcgtgccgcccacgcagctggcctgcaggagagcgatgctgccgtcttcggtggcttgcgtaccgctgcccgcgtagagcctgggcatcatctcccgctctacctgagtgaagtcggacgcgtgcatgtgaggtccggcttcgagcaacaccacgccttcgccccaggtctcagccagacgagcggcggccggcgcgcctcccgctccggtgccgatcaccaccactttacaacgctcgatggtacccatgacttgctcccgatcccgacagactggctacggaacgcgctcgtcccactggaaggtcgcagactgaccgggcgatcggccgggaaattccgcactcttcaggcagggaccgggatagcccatgatctcccagcccgccgaggttcctgaaaaagacgaacagttgatcgcgtgcagcattccccagacgctgcgtttgaggcccagggaactcgttcgccatgaagccagatgacgctgctgcgcctgcgcgtcgagtccgctgaagcccgccattccccaggtagattcctcgaacacgttcagcgccgtgcgcaccaggccgcgctggtcttcgtacatcgccgcaagcatgccgtcggcgtcgcgcgctggctgccagcggccggcacgatacgcggcctccgcggcgggaccgaccatcgccagagccgcagccgagagaatcgccgcgtggcgcttttccaggtgtttcaagccgtcgggcaacgaagctccggccggcggtctcgcgccgagcactcccctgacacccaccttcagcagcgcgtagccgccaagcgtgacgaccccgagtttgaggaagtcgcgccgccgcagtggccgtcgcagatccacaccatgctcgtcgctcatgtgccgtctcccttaccgtccgaggatcgatctcaccgagtcgtctccaatgccgcgatgtctgtctgtatcgaaggaccaggcaagacaagcggcgccgcgctgaagatcgcgcggacggttccggcttcctcggaaacacgctagaagagcctcgatcaccatgcgctacgaaggacgaatgttccggccgccgagcgaggccgacgcctatatcgtgcaggccaccatcggctgctcgtggaaccactgcacctactgcgacatgtatatcgacaagcgctttcgcgtgcgcgatctcgacgagacgctcgcggacatcgaggcggccggcacgcgctacggcccgcgcgtcgagaagctcttcgtcgccgacggcgatgccctggttcttgatctcgaccactgggaaccgattctggacgccggacgcgcggcattccccaacctcaggcgtgtcagcgcctacgccaccgccattaacatcctcgccaagactccgcaggaactgcgcagactgcgcgaactcggactcacgctgctctacgtcggccccgagagcggcgacgacgtgacgctcaagcgcatcgccaagggatcgacgttcgaccagcacgcgctggcggccgcacgcgctcacgacgcgggaatcgaactatctgtaatcttcctgctcggcgcgggcggcatcgagcgcagcgccgagcacgcgtcggagtcagcacggctggtgacggcgatggatcccgagttcctgtccgcactgacgctgacggtggtcgaagggacgccgatggcgacgctgcagcaacgcggtgatttcacgttgccgtcgatcagttgcatgctcggcgaactgcgcaccatggttgcgcagtcgcggcccaccgacgccgtgttccgcaccaaccacgcttccaactacctgccgctcagcggcaaattgccgcgcgatcgcgagcgcatcgtcgcggtgctggacgacgcactggcgggacgcattgcgctgcgccccgaatcagcccgcggactctgagcccggctccgatccgtccgccgcgccgggcgtctgctcgatttcgtcaccggttcccgcgtcgatcgcgtcatcggcccccgcctccagcgcacctatgcggtcgaacatgcgatcaagcttgctgcgcctggtcgaactcagccggtcgtattcgccgcgcacgctttcgatgtgacgacccatacggtccatcgactcgcggtactgatcccaggccttgcgaagatcggccaccacacgcagcacgtcatgcgagcgccgttccagggcgaacacgcctaccgcacggtggatcaccgcgagcagtgcgtagagcgtgaacggcgaacacatgatcaccttgcggcggaaagcctcttcgacgatcgacggatcgttctcctggatgaaagcgaaaacctgctcgttgggaatgaagaccagcacgtaatcgacggtaccggcggccgtgtcgatgtagtcgcgcgccgtgacttcgcgaacacgattgcgcacgtcggcgaggaaagccttgagcgccgcagcctgggcgccggcatcggcggcgagcaggtaaagctggtaattgtcgaaggggaacttgacgtccatgttgacgcgcaggccgcgcggcaggcgaaacgtgaaatcggggcgcgaacggcctccttccaccgtacgctggcgctcgtagtcgatgccttcgcgaaggccgagcaacgaaaggacgttgtccgccatctgctcgccccactgcccgcgggctttggtcgaagccagcgcgcggcgaagttcttcggtggtctgctgcaacgcgccggtgcgctcagtggcctcggagagcgcgcggccaagagcgccgaactgcctggcgcgctcggactcgatgccggctagcagcccttcgaccttgccgagttgctcggtaactttggccatgtcgccgccgatggcttgacgcttggcctccaggaccgcatcgctgcgctggctgtactggtcgagacgcgtcgccgccagggccaggaagttttcactggaactggccagagcctgagcggacgcaccgctgaccacgtcgcgtaccgtcgagcgcagcgtctgctcattgcgagcccgcgcttcttcctgctcgatccgcatcgcgtcgagcatcacccgcgcggccttgtcggcgccgtcggtgcgactgcgaatccacagtgctgtcaacccgatgccgagcggcaggccgatggcgaggcccgcgacgaactcggcactgaggttcactgattcaggcctcgcggccttgatgcgccgcgctgagcagatcgcccacggtcttgaccggatggaaggtatcggccggaacttcgacgaagaccgtattccaaccagccatcgcgccgttccacaggcccggccgttccagcgagcgaagaggacggccgccctcggacttctctgcgatgaacaccgcgtcgtgatcgatgaaacggtccaggtccagaggacgtcccttccagtcccgcatcgcgcacacgagatccaccggattgaagtggcgtgcgctctccaggatggcgcgctgggcatcatcgccgcgatcaacctgagaggtctccaccacctgcgcgctggcgcacgcttgcgcgtccatgacccagaacggtccgccgcccgggttggtctcggcgctgaccatgccgcaagcgcgcagcggccgatccagacggtcgatcacgaactcgcgtctgccgacttccgacattccttcgggcacggcgacaccgaagtgctcgctaagcagcgccaaagccgccgtgaccgcatccgcaccgccggtctccaccgcgcgacggcaggcgaatacctcgctgcgcagttccagcagcacgcccgccagtgcgcgtttccagaccaccgtcagcggcttcagctcgtcgaccgtgacgttgtcgatgttcttgatgaagacgaggtcgcagtcgaggtccgccaggttctcgatcaaggccccgtgcccagccgggcgaaacagcaacctgccgtggcgatcacggaacggactgccttcgggatcgacagcaagagtgtcggtcgagggtttctggtgcgagaactcgacttcgtagcggacgccgaaacgttgttcgtagatgccgaccaccgacgagagcagcgcccggaagcgggtttcgtgctcgggcgaaacggtgaagtgcagacggcaaaggtcgccgcggccgcgcgcgtaggctgccgcctcgacaagatgttcctcgaaggcggtgcgcacttcgccgccgtcccggtggaaagctagcaaacccttgggaaggctcgcgtaggccaaccccttttgatcgagcagggtggagagcagcatcgacacgtcgctctccgcgcagtcttcgatcgaacaatcttcacgggccagcgcctcgcgcaggtcttcgtaaaatgcgaagcgtctcagttcgcccagcacatgcaccgccgccttggtgtcgccatcggctctggcaacgaggtcggtgcgcgtgcgcaacgcctggtcgccggccaccgccagcagagatctgaacatgcggctggcggccccggaagccggaacgaacttggcgacggcgagcgacgcgacttcctcgtcgtagagtgaggcgtagtactgcacctgctcgtcgcctagacggcggatgccgtcgccgacggtgcacgcacgcaacagtcgtgcgggaggcggcggctcgcggtagagacgcagctgctggagcaccgcctcgcgggtcacgcctcgcgcctggaggtcggcaaggtcacggtcgctgaaagaagaggaatacacgggattagcgaacgcggccggtgcccttcggcctcaggccgaagggccggcgttgaccagtttctcgagttcgccgctgtcttgaagcgaaaccaggatgtcgcagccgccgatgaactccccgttgacatagagctgaggaatcgtcggccagttcgagaattgcttgattccttcgcgaagctcggggtcatcgaggacgttgtagctggcgtaccgggcgccggcggcctgcaaagcctgcgtgctcttctgcgagaacccgcacttcgggacggccggtgttcccttcatgtagagcaccacccggtccttctcgatctgcgactttatcttttgaaaaatgtcatccgccatgggtccacctgtccatcgataaaatgctgtttaatgcgccgctgcaacgttcgccgcggtttccttccgggactgctccggagtcagcgtgcgaatggccaacgcgtgaatggcctggcgcatgttgtcaccgagagcaccgtacaccatgcggtgctgctggagtatggccagtccgtcgaaagccgccgacaccaccaccacgtcgaagtgatcaccggtgccatgcatgtcgaccacccggacgtctgcatccgggatcgccgctttgatcatcgcctctattcgagttgtttccatcatctagccgtacacctgactatcttgcgcgcctcccggcgccgtcacccgcttcgcgtcaaaaactacgctgtgcgcgcgaagatcaccttagcccgactcgattgcaacgcgtgaccgcggctgacaccgccggttcacaaaaccggagcggtcacctgcccggcttccgtgaaacgcacgatcgcactgcacaactcatccaccgtattgggcttcaatacgatctcggccacaccggccgcgggcgcttcggtgcgaagttcatcggtgacgcaccccgaagccaggatgacaacgaggtcagcacggatatcccttatcgcgctcgccaactgcaaccccgtcatgccgggcatggcctggtcggtcacgaccagatcgaatccggccggatcggcgcgcaccatcgccaaggcatcgctcgcctcggtgcagcccgttacctgaaaacccttgcgccgcagcaggcgcttcatcaagaaaacgatcgcgtcgtcgtcatccacgtagaggatgcgccgtccttgagtgagtaccaccggcgcagcagcatcatgctcgctgacaactggcccggattgctccgcaagtgaagcgggccgggggtccgcagcggggaaatacatgcggaactcggttccatcacccggcttgcttttcacactgatgccggcctcgtgttgctgcacgatgcctcgcaccaccggcaagccgagaccggtgccctcacccacaggtttggtggtgtaaaacggctcgaacaagtggcccagcatttcttcatccatgcccggcccgtcgt

SEQ ID NO: 4027 - DNA, 19530 bp, synthetic construct
  source 1..19530: mol_type = other DNA
  variation 17705..17896: note = note, n is a, c, g, or t
  misc_feature 1..19530: note = Synthetic
  variation 18803..18904: note = note, n is a, c, g, or t
  variation 16582..16776: note = note, n is a, c, g, or t
ctgccgttatggcgcaaaccgagtcggttccttctgccactagcacgccacctgccagatcggcacagcctgttggtaaaacaccgggaagtgtttcaggtttctcctctatttccatcaaaaatgcggtatcgaatatttcaacgccctcaaaaagcactgaaataacagagaaatcggacgatgtcgagccagaagatgaacaggatgcagatggcgaagatcttgtggacaagccctttactgaggctgatttgaagcaggtttggaggagctatgccgaacgggttaagcaaaataaattcaggctctataacgccatgctgacctttgagcccaacctgcttgatggctataaagttgagtttttggtggccaacaaccttcaaaaggaggaggttgagaatgtttttaaggagctacagtactacctccgcaagaatctgtcaaatagccaagttgagctgattgttgacctttcggaggccgagcagaagtcgttgatatacaccccggaagataagtttaggcacatgagccaaaaaaatgaggcgctaattctactacgccagcaaatgaacctagattttgagtagatttgtatagagtgacatttgaatataaccacaacataaaaatagcgttatgcttacgaaacggatggaagatgctttatgcgagcagattaatgcagaatactggtcggcatacctatacctttcaatgtcggcacattttgccaatgtaggatttccaggcattgccaactggatgaggattcaggcaaaggaggagggtacccatgccgccaagtttttcgattatgtgctcgaacgcgatggaaaagtagtgcttaagcctattgcagcagttccagcaagttgggaaagtccgcttgctgctttcgaggaggtgttgaagcacgagcaaaaggttacctccttaatcaatggtttgatgcaggtagcagtggaggagaaggattttgcctgccagagcatgctgaaatggtttatcgatgagcaggtagaggaggaggccaacgttaaggagattttagactctttgcgtatggttcagggcaacggcaatggaatgtttatgatcgaccgtgagttgcgtcaacgagtttttgttgatgctaccgcttctgccacctaacaaaaaaggaacgttatttgaatagcactcttccgaccttccggtggaaactggttgtggtcggaagtttttttgtcaacggtctgcaaaacaaaattttttaggacaaaatattcagctaattttgttggcagttttaaaataataggaaatgagcattcttaacgtaattcttaaaggtatcttcggtgataagtccgaaaaagatataaaggagatctccccctatctcgaaaagattattgaggcatacaacgctcttcagggcctaagccatgatgagctacggggtcgcacggctaagctaagacggaccattgccgatagaacttcaccaattgaggctcaaatcgccgatttgcaggtgaggatggaggatgatgaaattgatatccatgagaaggagaccgcttataatcaaattgataagttaaaaaaggaactcgataacaccattgaggctgtgctgttggagattcttcctgaagcatttgcaattgtgaaggagaccgctcgacgattcaaggaaaacactgagatagttgttacggcttccgatgtagatagaaaccttgcggcaacaaaggattttgttagggtggaaggcgataaggccatttactccaactcgtgggttgccggtggaaccaagataacttgggacatggttcactacgatgtgcagctgcttggaggtattgtgcttcatcagggaaaaatcgctgaaatggctaccggtgaaggtaaaacgttggttgctacacttcctgtcttcctgaatgcactggcaggtaagggaactcacattgttaccgtgaacgattacttggcacgtcgtgactccgagtggatggggccactatatcagttccacgggctttcggtggattgcatcgacaagcaccagcccaattcagaggctcgccgccaagcatacaactgcgacattacctttggaaccaacaacgaatttggcttcgactatctccgcgataacatggcgcttagtccggaggacctggtgcagcgtaagcaccactacgccattgtggacgaagttgactcggtgttgatcgacgatgctcgtacgcctttgattatttcggggccgatacccaagggggacgatcagctcttcgaggagtttagaggccatgtggaaaaaatatacaatgttcagaaaaacctcgtaactcagatacttaccgacgctagaaagctggtttcggagggaaaaacagaagagggtggattattgctaattagagcacacaaagggttacccaagtataaaccgcttattaaatatctttcagagccgggcaataaggcgctgatgatgaaaagcgagaacttctacatgcaggataatagcaagaatatgcatgtggtaaccgatcctctttacttcatcattgacgagaagcaaaactccattgagcttaccgatcagggtattgactacatcacctcttttgttaatgatcccaagttttttatcctaccagatattggctctgagattgctgaaatagagaagaactatgacgatcctcagaaacggctcgaagtaaaagacgcactgctggccgacttctcggttaaatcggagcgtatccataccgtgaaccagctgctcaaggcatactcactttttgagcgtgatgtggagtatgtggtaatggacaacaaggtgaagattgtagatgagcaaactggtcgtattttagaaggaagacgttactccgacggtttgcatcaggcaattgaggctaaggagcgtgtgaagattgaggcggctacccaaacatttgctaccgttacattgcagaactacttccgtatgtatcataagctggctggtatgactggtactgcagagaccgaagctggtgagttctgggaaatatataagctggacgtagtggtggttcccaccaatgtgccaattattagaaaggatatgaacgacttggtatacaaaaccaagcgtgaaaagtataatgctgttatcgatgaggttgttcgcttagttgagctcgaccgccccgtgcttgtaggtacaacctcggtggaggtaagtgagttgctaagccgtatgttaaagcttagaggaattaagcacaacgtgctcaacgctaagcttcaccagaaggaggccgatattgttgctgaggcaggtcgacccaaaacggtaaccattgcaacgaacatggccggtcgtggtaccgacattaagcttacgcctgaaacacgcaaggctggtggtttggctattgttggtacagagcgccacgagtctcgtcgtgttgaccgtcagctgcgtggtcgtgctggtcgtcagggtgaccccggaacatcacagttctttgtctccttggaagatgatctaatgcggctatttggctccgatagaattgctcggttaatggaccgcatgggactcaaagagggtgaggttattcagcactccatgatatccaactccattgaacgcgctcagaaaaaggtggaggagaacaatttcggtattcgtaagcgtttgctggagtacgatgacgtgatgaactcacagcgtgaggttatctacactcgccgtcgtcacgccctttatggcgagcgtattcagctcgatgtggccaacatgctatacgacctttccgaaaccattatcaacgcaaatcacggaaatgtagagtacgaagactttaacttggaacttatccgcgcaatctccatggaggccccattctcggagaaggattatctcgagcgaaagtcggaagagctcaccgagaagcttttcgatagcatgctggagatgtataaccgtaaaatgggaaccattgcacagcaagcatatccggtaattaaggatgttttcgaaaagcaaagcggccagtatgagaatattgtagtgcccatttccgatggtcagaaaatattccagattgttaccaacctgaaaaaggcatatgaaagtcatggccgcgagctggtgaagtcgttcaacaaggcgggcatcttggtatccattgatgagaactggaaggaacatcttcgtgagatggacgaattgaagcaaagcgtgcagaacgcctcctacgagcaaaaagacccgttgttgatatataagtttgagtcctataacctcttccgaaacttgattgaacaggtaaaccgagaggtatcatctctgctactcaaggcacacattccattgcgtgatccttcgcaagtaagggaagccgatcaacgccggaagctcgatatgagtaagtatcagacttccagaactgatcaggttgcctccggtaatgagggaccacagcgtgtagagcctgtgcgagtggaaaagaaggttggacgaaacgatccgtgcccctgtggaagtggcaaaaagtataagaactgccacggagtaaatgaaaactaatacaaaagcgcatccttatcgatgcgcttttttctgctcaggttctttagtttgcgcttaatggattaactttgcggccgactgcaaagtagcgttttgctgttttgaccagcgagttgctggatcgttgtggtttctattgttgaaaatttagaattgaatatgaatctcgaaagttacttctttggaaaggttgctgaagcaattaaggtgcagtatggctctgtggacgaaaaaatggttcagcttcagaaaacgcgaaaggagtttaagggcgatattacgttggttacctttccgttgctcaaactctcaaaaaagagtccagagcaaacggctcaggagttgggagcctatctcactgaacatttcagtgaggttgcggagtataatgttgtaaagggttttctcaatatctctttttccaatcgcttttggatagagcagctgaatctggttgccgagcaatccgattttggtaatgctactcccgatggcaagacggcaatggtagagtattcctccccaaataccaataagccattgcatttgggtcatattcggaataatctacttggtgcttcagtttctcgattgttaaaggctgcaggacacagggtaattcaggtaaacttggtgaacgaccgcggtatccatatctgcaaatcgatggttgcctggaaacatttcgggaagggagaaacaccacaaacctttgggaagaagggcgaccaccttgtgggcgactactacgttgccttcgataaggcctataaggccgaaatacaggaacttgttgccaatggcaagagcaaggaggaggcggagaaacaggctccccttatgcttgaagcacaggatatgctccgcaagtgggaagcaggcgacccagatacaattgcactttggaaaacaatgaatggctgggtttacgaagggtttgcacaaacctaccgagatttgggaatatcgttcgacaatacttactacgagtcgcaaacctatcttcagggcaaagccatagttcaggcaggcttggaaaagggtgtcttctacaaaagggaggatggctcggtttgggtagatctcactgccgatggtctcgacgaaaagttgctcctgcgtgccgatggaacttcggtgtatatgactcaagatttgggaactgctgtacagcgctttaccgaggagaagctcgatgaccacatttatgtggttggaaatgagcaaaattaccattttcaggtgctaaagctcgttctgcaaaagcttggttatgagtgggcacagcacatttttcacctttcctatggtatggtggagctgcccgaagggaaaatgaagtcacgtgagggaaccgttgtggatgctgatgatttggtggaggagatggttactacagctagagatatgtcgcaggagttgggcaagctcgatggtagaacaccagaagaggccatgcaggtggcgcgtatggttggcctaggagcgttaaaatacttcatattaaaggtggatccacggaaaaccatgacctttgatcctcgggagtccatcgattttaatggcaatacggggccattcattcagtatacccatgcgcgcataaaatcggtgttgcgtaaggcggaggagcaggggatttcacttcacggctgcgctaacttcagcctgctgctggccgagaaggaggtttcgctcattaagttggtgaatgaattcccggctacggttgccgctgctgctgccgagctaagtccctctgtggtggccaattactgctacgatatttcaaaggagtataaccagttttaccacgacctcagcatattgaaggaggagaacgtagacattcgcaatatgcgtctgcttctttctgcacaggttgcaaaggtaattgcctctggaatggcactacttggtattgaagtgccagaacggatgtagataggctttattccccgggattttttataattttgttccttcaatctaagagacaatagcatatgtttgagaacttatccgaaaagctggagcggtcgtttaagctgctgaaaggcgaaggtaagattacagaaattaatgtggcagaaacgctgaaagaggtacgtaaagcccttttggatgccgacgttaactataaaattgctaagagctttaccgatgaggtaaagcgtaaagccttaggtgcaaatgttcttacggccgttaaacccggccagatgatggttaagattgtccatgaggagctggtggctctcatgggaggttcaatgaccgacatcgacacaaaaggggcgcctgcagtcattcttatagccggtcttcaaggttctggtaaaaccaccttttctggtaagctggctaaccacctgaagacgaaaaagggacgtcaacccttgctcgttgcttgcgacgtttaccgtcctgccgctattgagcagctgaaggtgctgggaagccagattggtgttccagtatattccgacgagggaaataacaatccagtagccatagccaaggcagccattgcacatgccaagagcaacagctataacgtggtaattgtcgatactgccggtcgtttggccatcgatgaggccatgatgaaggaggttgccaatatcaaggatgccattaagccacaggaaatcctatttgtggtcgactccatgactggtcaggatgcagtgaatacggctaaggagtttaacgataagctcaactttagcggagtggtgcttaccaagctcgatggggacacccgtggtggagccgccctctcgattcgatccattgttgataagccaattaagttcgtgagttccggtgagaaaatggagtcgctcgatgtatttcaccccgagcgtatggccgaccggattctgggcatgggcgacattgtttcgttggttgagcgtgcgcaggaccagttcgatgcggaggaggcgcgcaagctgcacaagaagattgccaagaatcagttcaacttcaacgactttctctcccagattgcccagataaagaagatgggtaaccttaaggatttggcgggcatgatacccggcatgaacaagatgatgaagaatatcgatatcgacgataatgcatttaagaatattgaggccattattcactccatgacaccggccgagcgtgataatcccgaactgttgaacggtagtcgtcgcaagcgcattgcggatggcagcggtacctccgttcccgatgtaaaccgtttgctcaagcagtttgaggagacccggaagatgatgaagatgatgactggaggtggaaagaatattgcccgcatgatggggaatttcccacaaaaatagagaccataacatcagtttaccatggaattaatcgacgggaaaaaaatttcggatgccgtaaagcaggagattgcgcttgaggtgaaggcaattaaggaatctggggggaagatacctcacctttgtgccatattggttggtcacgatggtggcagcgaaacctacgtggggcacaaggagaaggcttgcgcacaggttgggtttaaatctaccgtgatgcgctttgaggataccatttctgaagccgatttgcttagccttatacagaagataaacaacgatgaggacatcgatggccttattgttcagctgccgttgccaaagcatattgatgagcagaaggttattgagaccattgacccacgaaaggatgtagatgggtttcatcctatcaatgtaggccgcatggtaattgggcttccagcctatatttccgctactccagatggtattatggagcttattcgtcgctataatattcctaccgcaggcaagcgatgcgtggttattggtcgcagcaatattgtgggccgtcccatggccaacctgctttcgcataagggatatcctggtgactgcaccgttaccatttgccatagccgaacacagaacttaaaggagatatgtctcgaagccgacattgtgattgcagctcttggtaaaccagagtttcttaccgccgatatggttaaggatggtgctgccattattgatgtgggtattacccgtattaagtccgaaaaaactaagagtgggtggaagttgctgggcgacgttaagttcgatgaagttgcccctaagtgcagctttattacccctgttccaggaggtgtaggtccaatgaccattgtttccctaatgaaaaatacgctgttagcagccaaaaaagggatctataaatagtgtagacctttttccccctataacgaacaaagccctcatgcgagggctttgctgttttttatgcgagatggtggctatcgcagcataacatattttatgagcttgcagctgttgccaaacggcgttttatagattgctacaatttccactttacgcgactcttccagctgggtgccaaagatttcggtaacgccaacgccatccttaaccataacctttgtgtagggctgtgtttcagaaattatagggtattttctgtaaagcctaaactgtttattctcggggttgagtttagcggtaataataaattcgccttgcgttgagagcttatttgcaaccgttactaccagctgtgccgttggaattatttcaccttgctccgtatactccttcaagtcgccattactcatgttcattttgaacgtctgaatggacttgagcttacctgaggggtagaactgcttttcggcaccatccttttttcccatgaagtagtttacttcacccgatttctcccccgtaatgtagtatgaaacactggtgctatccttaaccccattaaccgccttggtaatctcctttaccttgccgttggagtagtagctgatcaccagtccattgggtaagctatccttcagcggaattaccatggtgaggttgtcctctgggccatacacccgttttataccatcgatcacggtaccttcgagcagttccttacttccgtcgggcagatattttactttaatatctctaccgcagaaggataggagcgcgccaaacgcgacaaagagtagaactttagctacctgtttcataacattgggtttgttgttaaacgaaggtaggctattctgcgcagatttcaaagaagggtataggcgagttccgggctgacctatgaggaaacgcaaatagtcaccctgaactgatgaaaaaatcaattaatagtttgtgctttagaaaaaaagtataaactttattaactgaatattttacgaaaaagtaaagaaagtgagtgggtaaaataagtttttaaaaaaaaagtcctacggagcttataaagacgcaggactaaatctttcggcttatagccttgttgtgaaaagtctttcagattgtgacaaatgtaagtaaattagttataatagcaaatatcatggaaaaaattcttggactagaccttggaacaaactctattggatgggcgataagaaatacatcgattaatggaaatgaccaaagtcaaatagaaaagtttggtgtaagaatattctcgaaaggagtcggagagggaaaaacaggggagttttcctatgctgctgaacgaacaaaacatcgaagtaaaagaagactttatcaggcaagaagataccggatatgggcaactcttgaagttcttattcaaaatggatattgccctttgacaattgacgaacttaatggttggagaaagtatagtaaggaagctaaaagacaatatccgcattctaaggtttttgaacaatggattagactggattttaatggtgatggaagacctgattatcagagtccttatcaattgcgcaaactatcccttgtaaagcaactatcacggttggaagtaggtagggctctttatcatattgctcaacgacgcggatttaaaagtagtaggaaacttggagacaatgaaaggactgcagtatatgatggaagcaaagaatctggagctagaggggtgaatgaaatattggaattaatagaaaagcaaggaacattaggtgccgctttagcaaagatagaacaggatggtgaacgtattcgtaatcgatatactttgcgcaagcactataaagaagaggctcataaaatatgcgaggctcagggtatagatattcgtggtgacttttatctaagtatcgacaaagctattttctatcaaaggccacttcgttctcagaaaggtttagtaggcaaatgtactttggaacctaaaaaatcgagatgcccaataagccatcctgcttttgaagagttccgtgcaagagcattcttaaataacataaagtatttcgatgaagtaaatcaaaaatggcacaggctggcgcaaaattatatagaagaaattatagaagagaagtttttgcgacaaaagcccgattttacatttgatgaaatagggcgctttttagaaaagaaaggtttaaattctaaactgaactacaaagattatactgctgttactggtagtccagtttcagcaagatttaaaaacatatttggtaacgattggcttcacataattattccttggaaaaataaaacatactcaataaatgatatttggcatgctttactatcatttgaggacgaagagtttgtcttggaatttgctttagtcaacctccaattagatgataccaaaagcaaagcttttgttgctgcttggaggaatttacctgatggatattctatgcttagtttaaatgcaattcaaaaaatattaccttttttaagagatggtttgggctatacagaagctgttatgcttgctaatattccttctatcatcggtaacacaaattggacaaaagagaaagaatcaattataaaagacatcaattctattattgaagaaagccgaaaagaaaagaccattattaatattgcaaataaccttataagccagtattatgcattggctgaagaagaaaaattcggatataaaaataatgaatacaagttagacgatatagataaaagacaagttgaagaggctattgttaaaacatttggaaaaaaaagttgggaacttgaatcaattaataagagagcggaaattattgaaagagttatcagcctatatcaaaatttttttcaatctactacaggcaagcattataagataattacattaaaagagaaaattgcagactacttgatgcaacattcatattgtagtaaaaaagattgtgagaaattatatcatccatcacaaattgatatttatcctgctgttaaaccgaatgctaaaggcatcgtgcttttgggaaatcctcaaataggttcgtttaaaaatccaatggcaatgcgcacaatgcatgagttgaggattttattgaaccaccttatttcgacagatcaaattgatgaaagcactaacgttgtagttgaagttgcacgtcaattaaatgatgctaataaaagatgggctattgaaatgtttcaaagaaataggcagtttgaaaatcaggagtttgcaaaagttttagttgagttaaataaagatggatacactagtataagccctgaaaatccagaaaacatagataggttcagattatggtatgagcagttggtaaatggtagtgcggtttttgatgaagtaaagaaattaaagtctgatattgaaaagtataggctttggaaggaacaaaattgccaatgtttttatacaggacgcatgataaagctcactgacttattcgatgagaatacaatcgattttgagcatacaattccccgaagcaaatcttttgataactcattagagaatatgaccgtttgttatgctttttataatagagatgttaaaagaaataaaattccttctgaactgccaaattatcattttgatacggagcatggtacagccatactgccaaggctcaaaatttgggaagatagagtcattcagctcacaaaaaatgttgaaaatgctaagagaaaatcaaaggttgcaaaagataaaaccgaaaaggatgctgcaataagacagcgacatctttggcaatttgaactagattattggtcaagaaaggttgatagatttaagattaatgaaataacttctggttttaagaatagtcaacttgtagatacgcagcttatttctaaatatgcatttcattatcttaaatcattctttaatagagttgatgttcaaaaaggaagtactacttctgaatttagaaagatatatcagattcaacctagtgatgaagttaaagatagaagcatgcattcacatcatgctattgatgcagctgtgcttacgcttattccctcggctgtaaaacgtgatagaattcttgaagaggcttatcgttataaagagaattatggtaagcaatactatgaaaaaccatatccttcattccattataatcatgtaaatgatataaaagaaaaggttctagtagatgctgtttcaaaaacgaaaatatttgatcaacaaagaaagattgtaaaaaaaaggggacgaattgtatatctgcgcgataacaatggtctgattctaaaagataatgatggaaccccaaaaccaatgattgctcaaggagatagtgtaagggggcaactgcatcttgattcattctatgggaaaattaaagttgcgaaacgtgatgaaagtggaaagcccattctggatggtggcaagtatgtgtttgaggagaaaaataatggctttagatttgttaagcgtaaattaattcaagacttgacaaaactggatgaagttgttgatccaaatttacgcaggttgatagaaatgcagttgaatgggagatcgttatcccaggcagttaatgaaggtatttggatgcttaatcataaaggagaacgggttcatagaataaggcatataagatgctttgccaatgacattgctgatcctttgcagataaaacgccaaacatatatttctaaaagaattccggtaaattttgataataatgaacacaaacagtattattgggcgaaaaatggtgaaaatgcactttatggtttttatcagactgatgataaaacaaaaagaggatttgaactgcttaatttaatgcaaatatcacagataagaagattaaatactgttgagaacgtctatgatttttttgctccaaataaagaggtaggtaaagggaaaaatagagcgatagtcccattatattctgttttgcaacctgggctgaaggttctcttttataaggaagatcaaagtgaacttaaaggattatcaattactgaattatctaaaaggctttattcaattcttgtactattcgataaagagattggtcgaataaagtttcagcatcatcttgaggctcgcaatgacaagcaattgcaagaagctttccctgataatatttatgggaaagcagggaaaaatggtttttcgacgtttagttgggattttgtatgtccaagattactattaagtcttcgtaattttgattttgttgtagaaggtcgtgattttgaaatgaagccagacgggagtattcgttttaagttttaaagttttcaatagaatttgaaataggtcatatatataataatatctacaacttgagaagcagcctctgaaagattttgtaatacgtaactagtagtcacggggtgactccaagtcaccccgtgactaccaaaagataaatgccatggaatttgaagtaggccatttataccacatctacaaccagggtaacaaccgccggaaggtgttctttgtgcgcagcaactatctcttttttctcaggaaaatcaagcaccaccttttaccatatgctgatatactggcgtggtgccttatgcccaatcacttccatattatggcgcatgtaaaccatgtgagcctttcggtgcccaatactgccggggtggctccgattcaccccggcagtaaagagagaaccttaaacgaatccattggcattatgctgcgctcctatactcgtgctatcaataaaaggtataatcgaagcggatcactgtttagagaagagaccaaggccatctgccttaccaagaacgacaagctatcggcagcatggttcacctcattgggtattaccaacctgaatgttgattcccctgaattccaataccctaatcaatgctttcgatacattctgtcaaatcccatgaaggctggtttggcgaagtcggcggtcgactgggagttctcctcctatgccgatgtagttggccaacgggatgggctactgataagtagagaaagaatcaaggagtttgggttaaccctgtaaattagtgtcggggtgactccaagtcccccgacactaaactaaaactaaagcctaatgattaaacgaaccctttattttagaaatcctgccaagttaagcttgcacaaccgacagctgctggctgaggtacatgagatcgatcaggagcgacggacggtaaccgttgcggtagaagatgtgggggtggtgattctcgactcaccgcagctcaccgtaacgcagccgttgctggaggctttgctcgaaaataatgcggcagtaattacctgtggtagtaatcacatgccccatgggctgctcctgccacttgagggcaacaccctgcagcaggagcggttcgacgaccagttggcagcgaccttgcccctaaaaaagcagctatggcagcaaacggtagtcgctaaaatatctaatcaaaagcggcttcttgacagccaaggcttcgataccgaacccatgaaccattggatccgcagcgtaaagagtggcgatcccgataatatggagggacgtgctgctgcctactactggaaaacgcttttttcacgcgacaacgtggatgcctttgtccgaggtcgatatgaggatgaacccaacaacctacttaactatggctacgccgttttacgtgctgtggtggctcgtagtttggtagcctccggattgcttccgacgttgggtatacaccatgccaaccggtacaacgccttttgccttgctgacgatattatggaaccataccgtccctttgtggatagagtggtggtggagattgttaggtcgggcgagagttatgccgaacttacccgtgagcttaaggccaagttgttggttataccagcgctcgacgtaaatattgaagggaaaagcagcccgttaatggttgctatgcagcgcaccactgcatccctcgctggctgctttgccggttcaatccgccgcatattatatccaattcttgagtagcgttaatcgtttatcggagtatagagttatgtgggtgctggtgctattcgatcttccaaccgaaaccaagaagcagcgaaagcaggctgctcagtttcggaaggaattggtgcaggacggattcaccatgtttcagttttctatttacacccgctgctgccccagtagggaaaatgctgatgtgcatataaaaagagcgaagttggcgctgccaaccgatggttacgtgggcatactgtgcataaccgacaagcagtttggcaccatggagttgttctactctgccaaacccatggaggcgcaacctgggccacagcagttggaacttttctaaggtttcctattccttgcaaagtcagggtgtgactcattggtggcaagtcagggggtgacttttatctccgatttatagtcaccccctgactgttcagacaaaaaaagccggcactgtggccgactttatacctatggatgcctgtttttttctttgagcaaacctctttaactaccacataactaatatttaagccctaggtatgttgtgataggtatgtcaaagatacaatctgaaagcaattcacaacactacgacgttacgcttagcatactgtccggttgtgataggtatgtcaaagatacaatctgaaagcaattcacaactatttggcaaacgttatccaatgggtaaatgttgtgataggtatgtcaaagatacaatctgaaagcaattcacaacnnnnnnnnnnnnnnnnnnnnnnnnnnnnnnnnnnnnnnnnnnnnnnnnnnnnnnnnnnnnnnnnnnnnnnnnnnnnnnnnnnnnnnnnnnnnnnnnnnnnnnnnnnnnnnnnnnnnnnnnnnnnnnnnnnnnnnnnnnnnnnnnnnnnnnnnnnnnnnnnnnnnnnnnnnnnnnnnnnnnnnnnnnnnnnnnnnntctgaaagcaattcacaacatatcggcttggtatgtgcctcaatggtgagttgtgataggtatgtcaaagatacaatctgaaagcaattcacaacggtaatgctgtggctgttgggtccggtgagttgtgataggtatgtcaaagatacaatctgaaagcaattcacaactccgagtttgtatataagtgcattggtaagttgtgataggtatgtcaaagatacaatctgaaagcaattcacaacaatcgtggcaattaaaaacaaaagcctacggttgtgataggtatgtcaaagatacaatctgaaagcaattcacaacatcatccactcgcggtcgtgttcgaggccggttgtgataggtatgtcaaagatacaatctgaaagcaattcacaacattagccataatattatttagactcaaatagttgtgataggtatgtcaaagatacaatctgaaagcaattcacaacaaaccttttaatggtattgtagggtggtgggttgtgataggtatgtcaaagatacaatctgaaagcaattcacaactatagatgaagggaacattctatcttcatgttgtgataggtatgtcaaagatacaatctgaaagcaattcacaacatgcggcttgcagccgataaaaaagccaacgttgtgataggtatgtcaaagatacaatctgaaagcaattcacaactaaaccgttaccttttcggtagttgataacgttgtgataggtatgtcaaagatacaatctgaaagcaattcacaactattggctgttgtttgtgctgtatctgctagttgtgataggtatgtcaaagatacaatctgaaagcaattcacaactaacgattatggtttacaagagaatatggggttgtgataggtatgtcaaagatacaatctgaaagcaattcacaacnnnnnnnnnnnnnnnnnnnnnnnnnnnnnnnnnnnnnnnnnnnnnnnnnnnnnnnnnnnnnnnnnnnnnnnnnnnnnnnnnnnnnnnnnnnnnnnnnnnnnnnnnnnnnnnnnnnnnnnnnnnnnnnnnnnnnnnnnnnnnnnnnnnnnnnnnnnnnnnnnnnnnnnnnnnnnnnnnnnnnnnnnnnnnnnnatctgaaagcaattcacaactccgtattcttttctgagaaaaaaacattgggttgtgataggtatgtcaaagatacaatctgaaagcaattcacaacttgaatcggcgaaggtccgagatgccaacagttgtgataggtatgtcaaagatacaatctgaaagcaattcacaacaacaaccgaaaagatcgatttgtaaaggcggttgtgataggtatgtcaaagatacaatctgaaagcaattcacaacataatggccagcacataggtggttatcttggttgtgataggtatgtcaaagatacaatctgaaagcaattcacaactggttgctcattaagctatcgttcccaggcgttgtgataggtatgtcaaagatacaatctgaaagcaattcacaactaaaatccgctcggcatatactgcagccttgttgtgataggtatgtcaaagatacaatctgaaagcaattcacaaccacgcctcctattctattcgtaattgccttgttgtgataggtatgtcaaagatacaatctgaaagcaattcacaactttcatgcgcttaacccatcggaggtaatcgttgtgataggtatgtcaaagatacaatctgaaagcaattcacaaccaaacagcggttcatcgttgctacgaatatgttgtgataggtatgtcaaagatacaatctgaaagcaattcacaaccctgggcgaataatgccttttaaaaaatcagttgtgataggtatgtcaaagatacaatctgaaagcaattcacaacattgggtttataagatggaagaaggtggtcgttgtgataggtatgtcaaagatacaatctgaaagcaattcacaacacaaaacgggcgcgatgccaatcttccattgttgtgataggtatgtcaannnnnnnnnnnnnnnnnnnnnnnnnnnnnnnnnnnnnnnnnnnnnnnnnnnnnnnnnnnnnnnnnnnnnnnnnnnnnnnnnnnnnnnnnnnnnnnnnnnnnngttgtgataggtatgtcaaagatacaatctgaaagcaattcacaactatttacgtgatgctactgtcactaatgttgttgtgataggtatgtcaaagatacaatctgaaagcaattcacaacacaaaatgtgttcttaaactcagtttcttggttgtgataggtatgtcaaagatacaatctgaaagcaattcacaactactccgtatgaactcagcatggccgctttgttgtgataggtatgtcaaagatacaatctgaaagcaattcacaactggctcttggctggtggcaataatctcaatgttgtgataggtatgtcaaagatacaatctgaaagcaattcacaacatttgggttatgcttaaaaacggtaaatacgttgtgataggtatgtcaaagatacaatctgaaagcaattcacaacgagagtgcacagccgctggccgacgatgaggttgtgataggtatgtcaaagatacaatctgaaagcaattcacaacacgcggtcttggctggcgcggcggcgggcggttgtgataggtatgtcaaagatacaatctgaaagcaattcacaactcactttcaaaaggaaaattgcagagaatcgttgtgataggtatgtca

SEQ ID NO: 4028 - DNA, 23267 bp, synthetic construct
  source 1..23267: mol_type = other DNA
  misc_feature 1..23267: note = Synthetic
gcgcggtttaattcaccattcatataaacggcaacaccgcaagagtcataaccgcgatactcaagacgtttaagaccttctaccaaaataggggtaatatcgcgttgcgctacagcacctacaattccacacatgagcttatctccaaaaaagtaatttcgctattttgctataaaatgcttgaaattaaaaatcaaaattgtatgaaaatatttataattattttattgaatagttttgtttaaaatataataaattattaggtaatttttgaaattaaatttcaaatcctgtgtttgattgttcatatttactgagagaaagcggggtgaggatggtgttattagatgatttagataaacggattttgaacgtcttacaagaggatgcctctatcagtaatcaagccttggctgaaaaagtcttttcttcgcctcctacctgcttacgccgtgttaagcgattggaaaaaacggggattattcaaaaacgcgtcaccttgttagatgcccaagcactaggaagcgatttaactgcgattgttgagatcaatctaacccaacaatcggccgaagtgtttgatgcctttgaagccttagttgtgtcagaaagctctgtaaaacaatgctaccgtgtcacgagtgggcctgactttattgtgattttacaagtaccagatatgaatgcttatcatgaattagtgggtaagttatttacggcaacgaaccacgtcagaaatgtacggacctttttctctacgtatcgtagtaagtttgataccacagtcacgctagcgtaggtggttgtggttaatcgctgttagtctaggggagccacagtgctcagtcggcgttgcagtacagagcgggctgtgcgaaggctcagacgtttcaacaccagtttgtaaaacgttttgcaggcatcaagcattgactcggccttggtgctgcaacccatgcgcaattacgctgtttcttaggcagaggtgggcgaaggctttgcagggctttgtttgcgtgtgtgtgcgggcagtgtgatgcatactaggcacacgaaaataagggcaacgccgatccaacccatcttggggagtcgctcgcccacaatgacggctgcaagtgcggctgcgacaactggctccagtaaggtgatggtggtcgctgtgctggcctggatccgtgccagaccataaccaaaacagaggtagcctaggaacatcggcaccagcgccatgtagatgcctaccgtggcgttgttccaagagtcgagaaatggtgcgccagtggtgaatagcactggcatcaatagcagcccaccgataccgaaaatggatcccatggcggcacgggcgggaatcttgcattgcatcaggcgacgagcgacccaggaatacagcgcataagttaggccagccagtagacctagggccacgccgagtgagatcgaaggcgccgcactaagtgtactgtgtccactgctttccgcaaggcagagtaatagcatccctagtagaccgagcatggctccgatgacccatcggatactgatgcgtaagccatccataaacatttcaatgatggccgacagcagtggtgcagtgccgatagataccacggtgcccaccgtcacaccggcgaggcgcatcgaaccgtaaaaggccaagggatagattgcgacggccaatgcacccaatagtagccaacgccattgtgaatgcaaggcacgggcatggcgggcgatggtgcggatggctatactcgcttgtagcaaaccgccgacacccatggccgccgcgccgatcgcagccgcaccaacttccggcgcgaaggtggcagaaacgccggtcgtaccccatagtatgacggctagtatgacacaagcgaccccgaggaaatgctcattcactgaggtgttcatagggtttccaatagcgaagctgcgatgcgcttggactggatgacgcaatcgctattgccttctagcccggcgcggacgatgccaccttctagcaagaaggctaggtgacgggcaagctgtgtgacgcgctccccatcggcgggcagcaattcggtcaagtgcttgtgtaagagtgcctctacttcttctttatggcttcgtacgatctctcggccgacatccccagctgggaactcagcggctgcgttgagtaacccgcaaccgcgaaaaccgcgctcataagcatgttcggcgtgatcggcataggcatcgaatatagccagcacccgttcagctggcccttgggcctggcgcacacggactttgtacagagagagccattcggcatggcgaaactgcaggtattgcgtcacaagatcggctttagaggcaaagttgttgtaaagacttttcttggctacaccagctcgtttgacgatggcgtctatacccgtggctacgatgccattgttgtagaacaggagggcggcggcatgcagcagccggtcgtgagcgctttctttctgagggttggtaggaggtgtcataggcttattccaataaaaagtaggtagaccattatacctacttttggcgggaggtagtgagttgtgtgtattctgtattcataggatacaggggaggggtagcgatggaaagagtagcgaggcgtgttagtggtatgtgacggttggctgtagataacgtatcagggtgaggttctgacttagcatcgagaacttcagtagtttaagattaacttgtggcgcagttgttctgcatgattgagcccgtcgacttgtcaatcatccaatgatagtgtcggtgtcatcatgcaggattaaactggacaatggattgctcaacggagcatggttattggtgtcgttttgttagtcatcgtcactgtaatatgtgtttttagtgaattcagtaataccctttgctaaggcttcagcctctatttcttttgtgataaatacaggcttctcatcagggtatcggggtgcaaattcaccctgagcttcttttttcatgaattcgattaaacgcttgggtgcaggtcgatcattttgtttgatgtatctcatggtagaactccttggaataactaaattgtaatagaaaattctgtattgaggttggtttaatttgggggtacaagtctaaaccatgagtttaaagctggaaatacttaagtaattagtgttgcaaagcactcagccgatggagcgattagacttatagagcgactatgcgattttagtaatggaatgccctagtttattagagcttgttgtaatgccattatttaaggacaaggtgtgttttgatttattttagttttgtaaatgaataagggcacacttctagtgcgcccttcatatgttgcacctttatgcttattagcaaccagtacacaaatcctaatatgtattagaaactatagtatctaccagtttatttattttgtcaaccgatgcggttgaaggagtgaatatgttagagcagatagttgaaattaatagtgatcaaaggcatttgtcagtatatcgaggttttcttgttgtcaaagacactgaaacgaaagaagaagtagggcgagttccacttgatgatatagctgctgttattggtaatgcacatggtctcagttatagcaataatctcttggtagaattagcgaaacgaggcagtccttttgtcttatgtgggtctaatcatttgccagttggttttctatggtctttagatgctaattatgagcaatcaagaagaatcgctgcgcagattcaggcaaaaaagccaaaatctaaacagctttgggcggatttggtacgttccaaaatcactcagcaaagttgtgtcttagaggcttttggtattaactctacaccacttcggtatttaattaagcaggtaaaaagtggcgactctacaaatgtcgaagcacaagcagctcgccgatactgggaactcttgtttgataagaactttaggcgaaaccaaagccaacctggagtcaatggtttattaaattacggttacaccgttttaagagctgctacagcaagagcggtagtggctgcaggactacatcctagtattggcttgcatcaccataatgcttcgaatgccctgtgtttagttgatgatctgatggagccttttagaccttttattgactatcaggtaaaagtgctgcaccaagaggggcatgaagaagtagacaagttaacaaagcgtcaattagcttccgttatatatcgggacattgaaacgagtgatggattatcaccattaatgaacagtttgcatagattatctgtctccttggcacaagtatttcttgagcaaagaaaagggttagagctaccgaaggagatgaccatgattaactatgctgctttttaaaggttaaaatcatgttttcaggatatagatttatgtggctacttgttatgttcgatctaccggtgctttcaaaggctgaaaggaaagaggccagtgagtttcggatgtctcttttagatgaaggctttcacatggttcaatttagcgtgtatgctagatgttgtacaagcccaaagcaaattgatacctattgtaagaggattgaaggcgcacttcccgctggtggtgaagtgcagatattgcaattcaccgacaaacaatatgcgaatatcatcacttattatggaaaaaagaaacagccagcaaaaaaaatacctgatcagttcagtttgttctgatatttttgctgttttttatatgaaaaaccccagtaagttgtatttaaatcaaaggcttactggggttctagtttaacatattaggatttgtgcactgactggaactagagcgtcttgctgatgcgacccaagcaaagtttaacatattaggatttgtgcactgactggaaccaggtacgtctttattgattaaaaacgcagagtttaacatattaggatttgtgcactgactggaacctgataatatcgctcaaacttcgggtctacagtttaacatattaggatttgtgcactgactggaaccacttgcaatcgctgctgttgcggccgtgaagtttaacatattaggatttgtgcactgactggaaccagcctcaatatctaagccatcaaactgatagtttaacatattaggatttgtgcactgactggaacaatccagttcaaccactgtggcaccagtttagtttaacatattaggatttgtgcactgactggaaccagtattgcggggcggctaggacaggtcgcagtttaacatattaggatttgtgcactgactggaacgagggtagatttgtatcgctgaggtttgaaagtttaacatattaggatttgtgcactgactggaacgatttttattacgagcatgggaagtagctaagtttaacatattaggatttgtgcactgactggaacccgatggtggtgttgagcaaatccggcacagtttaacatattaggatttgtgcactgactggaacctcaaagagttgattaagtcaagctcttctagtttaacatattaggatttgtgcactgactggaacccaatatgcgagcaggcctcatgccgagaagtttaacatattaggatttgtgcactgactggaaccgccggtagtttttcaaacaatccacaagcagtttaacatattaggatttgtgcactgactggaaccgctacagggttgatccagtttattgatagagtttaacatattaggatttgtgcactgactggaactgcagtggaactcataacgctagagtggcaagtttaacatattaggatttgtgcactgactggaactcaatcctgggtgtccactcaatagaaaaaagtttaacatattaggatttgtgcactgactggaacttggagaattaacaatgtggttcaaaaatcagtttaacatattaggatttgtgcactgactggaacgaaacggggcttagggttcaggagatatgccagtttaacatattaggatttgtgcactgactggaaccttatgcaagcgacatcaaaagtgagaaaaagtttaacatattaggatttgtgcactgactggaactgccttaaatcatgaaatcgcaaatcaataagtttaacatattaggatttgtgcactgactggaacaccggtggccagctacgcgctaatgatgcaagtttaacatattaggatttgtgcactgactggaacgcaaggcgtgaggtggcttcatgccttaaaagtttaacatattaggatttgtgcactgactggaaccagcggccttttcatcggcccatgccggcaagtttaacatattaggatttgtgcactgactggaaccggaagccattaatccagtcgtcgaaggtaagtttaacatattaggatttgtgcactgactggaacagttcaacgataagcaaagaggcaaagagcagtttaacatattaggatttgtgcactgactggaacaaaggaacgagggtagttccgaaacgcaagagtttaacatattaggatttgtgcactgactggaacgcattaactttaattcagaatcgttaataaagtttaacatattaggatttgtgcactgactggaacacgttaagcgaccctttcggtggctcattaagtttaacatattaggatttgtgcactgactggaaccgtggaaaccacatccacaatggcatcagcagtttaacatattaggatttgtgcactgactggaacttaaatgaaagtgcaacgttgtttagacgcagtttaacatattaggatttgtgcactgactggaacttctttcttctaaaggcacgtagcccggctagtttaacatattaggatttgtgcactgactggaacccagtgcttagttttgatgttaacgccccaaagtttaacatattaggatttgtgcactgactggaaccgacatcccagttcttataaagcaggatgcagtttaacatattaggatttgtgcactgactggaacaacatagcaatttctccacaattgacttaaagtttaacatattaggatttgtgcactgactggaacaaaaagcgcaagcagaacagatgcaagcgcagtttaacatattaggatttgtgcactgactggaacgcaccgcgcattgtcgcgtattaaaaagcgagtttaacatattaggatttgtgcactgactggaacctggtcgtactgcttcgcagtttctagtgcagtttaacatattaggatttgtgcactgactggaacgcaatgccgcgagcttcgttgatgattgttagtttaacatattaggatttgtgcactgactggaactttttaaagcatctcgatctattttcatcaagtttaacatattaggatttgtgcactgactggaaccgtaacgactccgcccactcaagtggtgataagtttaacatattaggatttgtgcactgactggaacttttcttcctcggtcatacccacacccccaagtttaacatattaggatttgtgcactgactggaaccagtggtgacaactagggctgtcaccagtgagtttaacatattaggatttgtgcactgactggaactgcctttaaacgcacttccgaccgtatcgagtttaacatattaggatttgtgcactgactggaacgaaaaattaaatacattacagtgtatacacagtttaacatattaggatttgtgcactgactggaacacccgcccctttgcggcagcgctacgccagagtttaacatattaggatttgtgcactgactggaaccgcatctggtcgccagttttcttcgcgctaagtttaacatattaggatttgtgcactgactggaaccctatcaatcttgttaaagagatttgattaagtttaacatattaggatttgtgcactgactggaactcattgctgagatactcaatagcgatatcgagtttaacatattaggatttgtgcactgactggaactaactggcctatctaacgcaattggctcttagtttaacatattaggatttgtgcactgactggaacctgataatatcgctcaaacttcgggtctacagtttaacatattaggatttgtgcactgactggaactggtttgggcaacagcgtaaatgttggcaaagtttaacatattaggatttgtgcactgactggaacatcactagtacgttccttttttactaattgagtttaacatattaggatttgtgcactgactggaaccttctcatcaattgatttgaaattaccttagtttaacatattaggatttgtgcactgactggaacagccccggcggttttccgtgcgcccggctcagtttaacatattaggatttgtgcactgactggaacccatgttgacgttttgccgaaacgcttaacagtttaacatattaggatttgtgcactgactggaacgtattgttctagcttctccatcgctcattaagtttaacatattaggatttgtgcactgactggaaccctacatgcaaaataagcccaataattaagagtttaacatattaggatttgtgcactgactggaacctgaactcgatatcactgcgcaatttgccgagtttaacatattaggatttgtgcactgactggaactgttttaatgcgtccctcgatgtaaacaagagtttaacatattaggatttgtgcactgactggaacaaagatgacataaaagaaaaagaagaagaaaagtttaacatattaggatttgtgcactgactggaactaaatcgttcgaggaggtcaaaacctatttagtttaacatattaggatttgtgcactgactggaacaaagatgacataaaagaaaaagaagaagaaaagtttaacatattaggatttgtgcactgactggaactcttgaagctgtcttgatagctcatctaaaagtttaacatattaggatttgtgcactgactggaacaggatttacaatagtgtttttttggattcgagtttaacatattaggatttgtgcactgactggaacgtaaagaaggcacaggtaattggatattaaagtttaacatattaggatttgtgcactgactggaactggaggacgcggcttgagttatcgattggtagtttaacatattaggatttgtgcactgactggaacttaaaagggggtggtaaatgagtaaagtaggagtttaacatattaggatttgtgcactgactggaacaatgaactcacgttgtaatttagcggcttcagtttaacatattaggatttgtgcactgactggaacgcctgcgggcattggcagacctgatagttaagtttaacatattaggatttgtgcactgactggaaccgatattaaagtagggtcggacaaggccgcagtttaacacattaggatttgtgcactgactggaaccagcgatgcgatattgcttcggcgtgtactagtttaacacattaggatttgtgcactgactggaaccagttgctgtgtctagctcaccttgcaaccagtttaacacattaggatttgtgcactgactggaactcggcgattggtcgcagcaaagcaactaatagtttaacacattaggatttgtgcactgactggaactaagctgcctctacgacagatatgcttgcgattataacactttggcactctcacagcattggtaaaaatccgttcgagctgtcttttggttaatgcaattagcatggtaaacaataaagatggaagtaatatctgttgtctggtaattggctgtccatcgtttgatagtaggttctaaagtcatgttgtactccatgtgttagagcaactttaacatgtacagttattctctgggtcataatacttagaaattaaactgcaaagcaggtttaatttattatgtgaatgtactaatatttaaatataaacattctattaatatgatatatatgtcgcagcttgctcagtataaaaggtggattcattatgcctaaagaatttgacccattaaaacctgctaagtacaggttagctcttgatatcggttctaagtcaataggttttgccattatttttttaaaagaagatgttaataaactattaaagccttacgctattgttcgatctggtgtgcgaatttttggggatggtaggacaccagcagcacctggccaacttggttcctctttagcagctgaaaggcgtgttaaacgctcaatcagaaggcaatacgctcgtaaaagaaagagattacaaagattgttgcgtaacttaaaagagcttgggttcttccctgatgatagtaagctttgcaaaagttttgaagacttgaatccatatgagctacgccataagggcttaactaaagagttaaaacctcatgagtttggtaggcttttaatgcatatggcaaagaaccgaggttttcagtcaaatagaaaagtagatcttctggcagataatattgatagtcaggcgaaagcagaaactagtgccatgaagagtgcaattgcaactttgcaatcaagactaaacggggaatttgaaaccttaggggcttatttatacgagcgatttaaaaaaggcgaaacgattaaatctagtaagactcaaaaagggcaaaaagcagaatatgagttcagtattagccgtcgaatggtaaaacaagagttcgacaggctgtgggctgcccaagagcaatttaatccagagctatttaatgagcaagcaaagaatacgctaaaagacacgatattcttccaaagaaacctactgccccaaaaagtaggtaaatgtacttttttgccagagcatgaaagggcctctaaagccttgccaagtagtcagtattttagaattatttcggaactgaacaagataagctttacggatgctgagggtttgatattgcctatttccttagagcaaagaaataagcttttaaaatcactgcgcattaagcagaaattgagttttgataggatcagaacagagttaaatttagacagtacggttttaattaacttagagcatgcgagtaaagatagtattgagggcgataaaactggttatttactaagcaaaaaggagtattttggccctgcctggcgtgatttatcgttagagacacaggatgcgatcgttacggcactcttaactcatgagaatgaggcagagttggtgcaaaagttagtggatgatttcaatattgctcatgatgtagctaaagccttggctaatgctcgtttagagtctcaatatatgcgtttaagtaaagaggcaattgagcgattgattccagagctagaaaaaggtgtcgactctcaagatggttataaggtgcctgttaagtatcatgaagcaacagaggctgcaggctttggtcatcatagtgctctacaggagaattgggcggattttccaactttagacttgaagcaactgcatagcgatgataatgataagtatattgttgccgaactacccttaccatattacggcaaggtcattacaaggcaagtggcttttggtacaggggatgtgaatgatccagttgaaaagcgttttggcaaaattgctaatcccacagtacatatttgcttaaatcaagtccgtgtgcttttggatgagattattgctaaatatggctatccctatgaggtaaatattgagctggctagggagttaaagcagaatcatgaacaacgccagagatcaattaaacagcaagctgcgaataaaaaagagaatgaagaaataagaagggaaataaaacaggcatacaaggttgaaaaagctaggattattactgatagtgagattagcagagcggatattgaaaaatggcgtctatggcgtagatctaaaagtaaattatgcgtgtattctggcaaaaagatctgtgaaacgatgattcttaataatgaggtagaggtggatcatattctgccacgctctagaactggagataatagctatcagaataaggtcttggttttaaataaagctaatcgcattaaatccaatagaacaccttgggaggctaaagagttgttcgaggctcagggttggtcttatgaggatatattaaatcgcatgcgtgcgctagataaacatcagctattccgttttgcggaaaattcgatggatatttgggataaaaactaccgtagttttgaagctcgtgctctaaatgatacgcgttacatttcacgagtggtcaaagattatttaaaggtcgtttgtcataaggatagaatcgtcgtcagtaatggggctcataccgcactcataagaagagaatttggactgaatgatttgttaggtaagaaaggagagaaaaatagagatgatcatcgtcatcatgctattgatgcgtgtgtgattggtgcattggatcgctctatgttacgcaaactacaaatagctatggaggtagcagaaaagcaaaatagtgctagaaattttgttggtctacaagagccatggtttaacttttcaactcaagtaagaagatcgataggacaaatttatgtcagtcataaacctaatcataattatgagggtgaaatttttgaggcatcgatctatggcttgagattgattagtgataagaggactgaaaaatatgttggtatcaaaagaaacccagaaacaggaaagacagataagcctaaaaagagtgtggtagttatcagtgatccaaagacacaaaatcgttatggcttaaggcataaatttcactcggagggcctgccaaagaaatattacgggctatctagtagtagtgtcttttgtcttgaaatttatcgcgatgaaaaaggtaattggcaagcttatacaatccctagatatgaggcttatcgtatagttaaaagacgaggagtaaacgctctttacgacaataaaagaagcaattttgagggtagaccactggtgatgagactaatgcgagatgattgtatcgcttttgagaagaatggtgtcaaggaagtctaccgcatacagaaaattaatggattaaagaaaaatataacgctaacgcgccattttgatgcaaatgttgatgaccgctatagacgaatgcttaaagcccaaaaagcggagaaggcgggggaggattttgatagtgaagatctttgcgatgatttggtgttttcaagcttcggagccagctccttatattcaaataaagctcgcaaagtcaccattagccctatgggagtgctaagagatcctggttttaaaggttaaatgttgtccgctttttgctttatatacattgaatcagaactgatagagcacaaaccaaagccccgataaataattaactcattatgatcggggctcattaagcgttacatatttaaatcatcgaatatatcagcagcaagacattggtttagattaaaagaaaaagcgcctgcttaggcgctttaaatttaattgactgagaagcccaaatattcaggtagccatagcgcaatagacgggaagaacatcacgagcaatagggcgcagaacatcgtcaacataaagagcatggcccatccaaaggtatgttctaagcgaatatttgagatcttggtagtgaccattaagttcactgctacaggcggcgtgaactgcccaatcgcaatattcatcgctagcaaaatgccgaaccagacgggattccattcaaaatgattgattaatgggattaagactggggtcagaattaggtaaatcgaaatcgcatcaagtagcattccggcaaagagcactaaaatcataatgaggaataatagtactaagccattatcagacaagctcaagatgatatccgctaggtgtgtaaaagtcccaagcgtggtgcctgaccaggcaaaaatgcctgctaaggcgatgattaacagcacgataccagagagttttgccgcttcgttaaacatctcaagtaagccacgccaggtgagttgtcgatacacaaacgcacctaaaaacaaaccataacttaccgctacaacggctgcctcagtcggtgtgaagagcccagagcgtaaaccgcctaagataatgacgggcgcaaataaggcaggtaaggccttgataaagctttgtttaaaaggtggtctttcttctgttttgctactctcccaaccgcgaagtcgagccaaaatataactcggcaccaacagcgcaataccagctaatacacccggaatcaaaccagcggcaaacagtgcgcgtaagtctagccctggcatcatcaccgaatacaaaattaaagcaatggatggtgggattaaaatagccgtagaagccgcagccgcaatcattgatgcggagaaagggcgcggatagcccgctttggtcatgctaggtaacatcaccattgcgacagccgctgcatccgcagggcccgagccgctcatgccacccattattaagcaaacgatgactgctaccagggttaggccgccaggacgttgtccaatgatcgattgagcaaaggtaactaagctagccgccacccctgcgcgctcaaaaattaagcccgttaaaataaaaagtggaatagcaattaaagggtatttagcgatactattataggtattggtgccgagtgttgctagcatatcgggtgataagcccatcacaatacctatcgcaccacctataccaagtgcataggcaaccggcataccgattagcatcgctagcaaaaaggaaagtaacatccataagtcagcactcatgatacattctcctctgtgccaagccgcattctagccatccaattttgggtggttctcagcataatcactgctgataaaattggcatccaaatcaaatatatccaggtgggatagccaaggccaggtgaaagggactcataaatgtattcttcccatgttaagacgccactataccaagcaactaaactcaggacgacgacagtgccaagccattgtagagtgtataaaaggcgcctaccgctagcgcctaaacgctgttccaggaaggtgatacggatatggtcattagaacgagctgctacagcagctccagcaaaggccagtaccaccattaggaataccgaatactcttcggtaaaggcaaaagaaatatccgtggcatagcggactaagacattggctaaactgatgatacaaatcgcagccagtgcaatgattgctatccacgattcaatacgtatttttttcgcttttgacataatagctagtaaacaatgtaaaacaaaaggcgcagctaataatagactgcgccatcatcagttaacataagattaacgttctgaaattgctttttgagccgtttcaacaagttctgcgccaatgcgcttggtccatttgtcgtacacgctttgtgtcgcttcaacaaaggattgatgctgctcttgactaagttcagtcacttcaacaccacgctcgcgaatgtcatttaaggtagcttctagttcagtgcgtgacttctcgataccccattggccagcatcataggctgcctgcttgagcagggcctgatcttcttcggcgatggtcttccatacacgctcactcacgccaaaaattaatgggtcattcatgtaatgccagagtgtaaggtatttctgactggctctatcggcacgagctgctgaaaatacggataaggggttttcttgaacatcgactgctccggtcgttagggcaggtaaggcatcggcccaactcatttgcgtaggattagcaccgagggcgttaaacgtatctaagaagaggggtgaacccacaacccgaatctttaatccgcgtaaatcctcaggagcagtgatagtatgctttgaattagagatttcacggaagccattttcaccccaggctaaaggaacaaccccacgcttggcgatggcgtcaaagaccattttacctgcttcaccctgtgtaattgcatcaaccgctgcattgtcaggcattaaaaatggcagtgaaaataagttaacttcgggcacctgtggtgaccagttaatggtggagcctaaagccatatcaatcaaaccactacgcaaggcggagaattctttggtctggtcacccgaaaccaattgagcatttgggtagaccttaagcttaatacgtccctctgaacgctcttcgactagctccgcccatttctcagctgtttgaccccatggataggcattgcccagcaccgttgatactgagtattcctttacctcttgcgcaaaggcgcttgcacagagcatcgaggacatggcaagcgatgctagactgattgatagacgttgtttaaaattcatgagctcctccaaaaataagaatttaaatttactttttattttgacctaaaagtaaatgaagatgtgataaaagtgcccatttagaattaatttataaaattgcttgattaggaatgcgttatgtattaaaacaactttccaaaagcaaaactccttgtcgaaccatctcaacaagggggtaatattctaaatcgtcttctttttatggagtgaaatgacttatgtcttctttaagttagggcattgacgctaagaccagtcgaatgtctttgttcacagtgtcccaaacaatcgcttgatcgatattgtagtatgcatggacgtcagtgcctaataattctgatagctcgttttttaatcttgacatcatgaagagagtgactcctctgtctgcttagatcaaaatgtcaatatcacactatctttagtatcttcatttcgagaagcagattgcttggagcgtgaaactgcattgctgtttttttgtttagcagtaagcgtatttattacggtataaattaacaataaaagctttaatgcgaaatataccgtgatttataccgttcggttaattgttttctgcgcatgacaaattcttttaaatttaacaaataccgaggcttataaagattgcggatgaaatttaaaatgtaacgccttgaaaaccttaaaaacagtttcccattgaggcttactctttccattgattactttatataaactctctcgatttaagccagattctcttgctatttcgctaactccatgttttttaatgagaaagccaagggcttcgataaatgtatttggatcgtcatcagacaagcattcttctaaaaacagttgaatgtcttcttgggtttccatgtaatcaaaggggttgaaatcttttaatttttcgctcatttcaattttccaaagattttaaaatttgtttagcattttcaatatcttttctttgtgttcctttatgaccaccacaaagtaaaataattacttgttgctgatgtatcgtgtaatagaccctatagcctttaccaataaatattcgcatttcatatagacgttcagacagttgttttgagtctccaaaattcccattaataaaacgaataaaacgaataatacgtatattaattgctttgactgcttgtttatctttcaaggtgcttagccatttgtcaaaaacatcagttcttttaatttgagacttttgcataaaagcagttaaataccggatttctgttctacttggaaattttttgattttttgatttttttggaaattttcgacaaatttcaccccgcttttatcgataaatgcctgttttttaggcatttatctgcctaattctgccttttaggcaaaattaggcgcaactatcctaagcttattggcagcttttaaacaattgatgcaaatcgctttcaaaagcgactgcgcatgcaccttgacgagactaaaatagcttgcccgcttatgtttgaatttacggtgcagcgtgccgaaactttgctcaattacatagcgagtcttagataaacgcttgttgcgttctatctgctcacgtgtcaacactgaaccgcgatgcgccttttgcataatgccatcttctaagccgagcgcttgtaatcgctttcgattctttgcgctgctatagcccttatccgcttctactctcgtgccctgttccaaatcattaacgagtggttcaagttgattaacctcatgcacattagcgggcgtggtattaagcttttcaatatagccctcaccatccgaacgagcatgtagcttaaagcctaaatggaagtcagcccccttttttgtccaacgtgcatccttatcagtgcttggtgcagactcatgatactcaccgtcctcaagctgctcaattgccttcattttcttacgacctgccgtttgaataatcgtcgcatcaaccactgccgtttgcgccttggctacttttagacccttctcgcttaactgctgattgataagcactaacagcttatccaataaaccctcctcagccaaccaattgcggtaacggcatagggtactgtgatcgggaacgtccatatcatcaaaaccgcaaaaaatcgtaaaatcaatgcgagtcaccaaactatgctcaagctccggatcggagaggctatgccattgacccaataggactgccttaaacatggcgagcacgggataactcggacgaccttgttgagtcgtcaatcgacgctgcttttgtgaattgaggtagcgttcaatcggtcgccaatcaatcacttgatctaacttaagtaacggaaaacggtcgaggtgtttggcaatacgggctttggcggtttgttgaaagaaactactcatgggactgaagtaagaatgcaaggaaataagccatattttaggaagtttgaggggttattgcaaaggtctcaatttgatatttcattacgcacattgtagcctataggctacataaagaaaacaaaatttaatccatttatccacaatttttgtgagtaaaagtacatttaactaaatttaaatctaatatatgactactgaaaattcgtagaaatacataccaataggttgttttatgtctgcttgagcaagatattcactaaatacctaaaactcctcatttaggctcatacatatacccatttctccacttgcttgatgtgcattggtcggtatttttctttttgctgtacggggctacgctgaatcaggcgtgaagtaactttattgcctatttgatggcggttattttttctttttttgtgaaggcacgcttcacttttagagagagcaagtaagcgtcgctacattatccttcgtgtcctttatgctcgtcttaagctttgttttgggtaactttgcagacgaagtagggatctagagcctttgcttactctagtactttggtgatctcccctcaaaaccgtagtgatttaaggtagaattttctataaaggaaattcgatgcgtaaatcaagatataccgatagtcaaattttagtgattcttaagcaggcagaggccggtacgccgctgcctgcgctttgtcgtgagcacggcatgagcagtgccaccttctataaatggcgtgccaaatatggtggcatggacacctccatgattgcccgtcttaaggagcttgaggcggagaataaacgcctcaagaagatgtatgccgaagaacgcctgaaggcagaaatcatcaaggaggcgatggaaaaaaagtggtagcgccatctcggcgtaaagagatggcgcaaaaggctgtccagtatcgtggtgtcagcatccgcttagcttgccaagccttcggcatcagtcaaagttgctactattaccaagccaaagggcgtgaggagaatgagctcatcgccgattggctgttaaaactagctgctgagcagaagacgtggggctttggtctttgctttctctatcttcgcaacgttaagggtttcaaatggaatcacaagcgagtccatcgcatctatcgggagttgcaactcaacctgcgcatcaagccgcgccgtcgcataaaacgagatcgtccggacactttaggaacagccacaggcattaaccaagtctggtcgattgactttatgcacgatacactctctaacgggcgcaccattcgtttgctgaccgtggtggatgattttaaccgtgaaggcttaactatcgaggtggactactctctaccctctgagcgcgttacacgcgctctggagcaggtaatggagtggcgaggacagcctgcttgcatacgcatggataacgggcctgaactcattagcaatcacatggtgtgttgggcgaaggagaagcaaataacgtttttagatatccagcccggtaagccacaacaaaatgcgtatgtggagaggtatagtcgaaccgttcgttatgattggctggggcaacatctctacgacgatttggaagaggtgcagcaggaagccacgcgttggctctggacttacaataatgaacgcccacatatgggcattggtggcattaccccacaacaaaagttagaacgattttttaatactgtttctacctaaaattgctactaaaaatgggggtactgtcaggctacccgagcgatatatgagagcctcctttaatgccgcctcaacggctttagcatcacccttagggctaagtgaccaacccaagagttcgcgagtatggcagtccatgacaagagttagagcgcaccaaccgttgtgtgagccacaccatactcggcacgtatccgtcgaccaacgcacctcaggtgctgacgtcaccgaggtcttgttctgtacccgtggtctcgcaccgctagcccgttgcagaatctgtcaacccttaagctgaaagatacgctcaatggtgttcttgttctcacccaacgcccaagcaacccttcggtaaccggcgtgggaaaacgcattaatgaaccgtttaacacgcgcagcaaggtgctcgttcaccttgggtgccgacttaactgctcggtagtaaaaactacgacgaaacacgcttgactgatggtcacctgatccccttcttgcgccatctcgtctagaagtctttgcaactgccggggtttgatgcgagatgacgctgtagcttttttataaacttaatctccagcatcgcctcaccatacgcctctctgggctcacgtatttgcgcttcgtattgctcggtaacagccttaggcttggcacgtaacgagttctccaagccggcctttgcatcctctagccattgctcaatatctcgttgcaaaagatcatattgtcttgaggtctctgccactgtaatctgcccagcaaagatctgcatgagcaattcagatttgcgcttggcggtccaacgtttgatagtaggttctaaagtcatgttgtaccccatgtgttagagcaactttaacatgtgcagttattctctggatcactatagaaacggtcatggaagtatatcgggtccatccctagcagttatcttacgaagctacttgtggtatgcggaagtaagaagtaggttgaattttaatttaaactttaattatttattaggcctgttatggccgatactgatcaagtaaggatcgacaaaggagtcattgggaaaattacgtaattagttaagaagtggctgttttgaaaatgtcactttttgataaattgttaatttattttgaccaacaccatttgaacgatgttggcgaaattaaatacgccgagataacaaaacatatgtataagctgttgttatctaatacagattgattttcttttataacatccccagcccctcaaaaaggacccgataagcatccgcttttttctctaaagccaatggataagcacgagaggaggagggtaagcggtataagtttagctctctgctctcaaataatgttctgctcggttcaccaattttcggtttgtccgtgtttggtggcagtaatgacattagcgtcgtcgtcgctaactcaccggtcgtcatgatggtgaggcattgaggcagttgcgctagtaatttactcaggttaagcggttcaacaatctgtaatgacttatcagcagcattgccagccaatcggatgacttgatgggcggtatcactgatggcaatgcctttattgtatagaaaatctcggagtagctcttcattaaaagacttgccatccgcttcaagaaaatagttcttatcctcaaaaaatatcagcccaaaaattcgccacatatcattttgcaaattcggataataaaaatccattttccagcgatgacgtggtggtggaaaggaacccaacatcaataaggtggcatgtggtggtgcaaaaggtggtaggggatgagtttctatgggttgcatagggggtaaatcatgacatttgattgaagcaaatgtcattgtaaagaaatgaggactttttgtaggtgtttggtgtgatgtttagttatatcgtgactacatatactaagagcttaaccttaagttgttgtgtggtgagttagggaaaaagccggatgtaccatttaaaggtacttttattgttcgaattagtccagcgcttcatcggcatgccgccatagcctctaatttttccttaaatgcatttattggcgaagcaatcaaagaaaagttagagcgtgaacaagataaagtcatcgcttgaacttcgggcaaattggcttggctaagaggtgtttattgatgctttttgttatcgttagataacattttaagctttaagttgttagtcgagtattacaattttaggatggcttttaactatgctttagactagactttattttcaatttaaatttaataatctacaaaatggagactcaattgaaaaagttatctgcttttgttttatgcacaagcttcctagtatctcatgctgcttttgctcaagataaacccacggtacagttgctggcaacgggtggaaccattgccatgaaaatcgaccctgaaaaaaatgcacccgtacctgcaatttctggtgaggatttattagcgatagtgccagaggttggtgagtacgcaacgattgaagttaataatctatccaatgtgccttcagattatatggacccaccacgctgggtaggtctgactaaggcagttgaggaggcgctatcacgaccagaagtatcaggtgtaatcgtttctcatggtacggatactcttgaggagactgctttttggctagatatcaccgtagactcagaaaagccaatcgtgttgattggggcgcagcgtaatgcatcgtcatctgactttgatggtccacgtaatttgagacctttgcaataacccctcaaatttcctaaaatatagcttgttttcttgcattcttactttagtcctatgagtagtttctttcaacaaaccgccaaagc

SEQ ID NO: 4029 - DNA, 23366 bp, synthetic construct
  misc_feature 1..23366: note = Synthetic
  source 1..23366: mol_type = other DNA
tatttttaaaaataaattcagaaataatataagaaaacatcattttaataatataaattttattattatgtttaattttaatttgattatttatttcaaataaatttacatttacatgattttcaaaattttctttatcggaagttacttttacgtctttatttttaccctcaattattgattgtaagtacaattcagaagagcataataatactctgaagtctttttctaaatctgaatcaatttttttactataatcaacaaaaattaactctatgctctcaattttttttatatttaaactaacaataggaaaaatctttataataaatgtttcaaataaattataaatttcttcaaaattaagaaaaaaatctttattttttgaaacttgattaaaaatttttgatttaatatcatttaatatcatgcaaagttcatctttattactagcagagaactttccacaaaaaaacccaaaaaatcccaaaaaatcatttaataaaaaatcaccaggaacaaaaattctattattatttatttgctctgaatccataaatttcctaacttactgttaagtttaaattttatttaaacaataaaaaaatcactcaatttattatttaagcaatttacatgccaaaacataatttttataacattttataattattaattattaaatttaaaaaataaaatttttttattttttactctttaaaaagaaaattaatgaaataaattttgaaattataaattaatgaaaatatttttgattaaaatattagcaaaacaaaaaagccggtttcttaaaattaagaaaccggcttttctacgcgaatagattagcagaatctatttgctttccctatgaacagtatgtttacggcaaaatttgcagtatttttttagttcaagctttttagtagacgcttttttattttttgtggttgaataaaggttattacctgagcaagaaaccttgccatctccactacaaataagtttaataatatcgcgcatttaataactcctaattctctttttatgcagacgcaaaaaaacgcagtcgggcagaccgtacaaacaaaaacatttttttgcaagcggtttcttaaaatatatgttagttaaaaatactttgaggaaaatacgaaaccacattcgtcacaaaggccatttcgtcatgacttttcttttaccgctagaaactttaaaagaacttatagaaaacgatcttcttggtgaagatactctttctcaagcttctctacaagttattaatcctattaatgaaatcaataaagcctaccattaccctcttaaagctggaggcaaaagaattcgtcctctattagcgcttttaacagcaggagccctatctggacgccagggaattgaaacagctcgcccctctgccctatctctcgaaaaaattcatacttattctttggtacacgatgacctcccttgtatggataacgacgacttgcgcagaggaatgccgacaactcacaagatttatggagaagcaaaagcacttcttgttggggatgcattattaacagaagcatttgcagccatcgcaaaaaccccattaccccctttgcagcataaaatatcacttgcacactttataacggatttggctgaagcttctgggactaaaggcatgatacttgggcaatggctggatatatctttgagcggtatgcatgacttaacatgggaacaacttgaagttattcataaaaataaaactgggatgctacttggtgctagcctttctttaggatttttggctggtttggcatgttatgagaacagccatattccttgtaattggaaaatgttgcacagtaacataaaagaatcgggtgttttaattggactctcctttcaaatcatcgacgacattctagacagcacccaaacagagcaacaactcggaaaaactgcaggaaaagacctcactcagcaaaaacaaaccgcggtaagactattaggaatcacaaaatccagagcacttgctaaaacttatacggaacatgcaataagtttattacatgatgcgctcaaccattgtcagcaagataatttagcattagaaacttctcattataaaaacttattgtttgatattattaatcatctacttttgcgtgaatattaaaatcgttacatttctttcagtgaatgcaaattcttcatcctataattaaaaaaatttacttaaaatgtatttaatacttctttaaacttgattgcttattaatttaaaaggcaagattatgaaaagtaagattagttttttatattttattttatttttatttttaattacctcatgtttaacacctaaaaaaagaccaaaaaaagtaacagaaccccaaactcgagctgaagtcaaagatgatgttaaagatgaagttaaagacgaggttaaatctgatgttaaaaatgaactcagtaaatcagatgttaaaattcaggaaagtcttaatttgattgaaagcgttaaggtagaaacaaataataaatttaatagtcttgaaactcaaaacaaggatcatgaaatacgactttttgaattagaaaatgcaataaaaaaattaaatgcacaaacgaatgacctaagccaagacaatttcatgacaaaaaaatcaatcgccatcctaaaaaacgacatcaatagcttaaatgagatactcattacaaacaaaagagatattgatattataaaaagaggtcttcgttctggtgtatatgatgattttgatttactagaaaaaaaacctccaggaagccttggggttacaatgcttcctgatttaaattctggtagagacggctatagcgaaaagacaaattctttgcaatcagtgaacatgcaacccataacaacaatgccaaacgaaaaagacgggaacccccaacaaatgctcacgagcgctgaaaaaaagatgaaagatgcccaatattcagaagcgcttaatactttaagtttggtcaaaaagaattttccaaactttcaagacgatgggagagtctctattctctctagtgaagcatggctaaggcttggacaatacaataatgttctccaagaactccaaagtttttaccaaaaaaatcccaatagtccaaaccttgcacatgcaaaacttttagaaggactttcttttgagatgttgaatagcaaggctaaagcagcacaactctaccaagaagtcatctctctttcgccgcaaagtatgcttgcccaaaacgcgcgcgaagccatgttacgtatgagagattctaaatagttatggtgttcttattatataagtaactctaaatacaagtaaatttaaagtaaatcaccaattaaatttataaacatttaaaattattataatttcaaagaaaaaaccgagaatgattcacttaaaatataaaaagaaattatttttgtgttgcagtatagtataaggcgtgctattaatcacgctaggaaacctaatggggtaacccaaaaatgatgtcgttcgggtattatttttgcctgcctaaattaaatatttctttccttttgaactcttgcctttagcattatcctttctattttttcctttcactttccctcctcagagggacgacgcagccgccgagaaccgaacaaaccgacggctagtattttaaaaaatagttttgactatgttggctttggcacaccggttttttcaaaaatctcttctttagcaaattttctcagcttcccaactgatgtatcaattttttcaatatttctattaattgtcgagaccatatctccaaagttttcgtgatcaaaagccgggtccatgtaccgacgagactgtgtatcctcactcagttcttctaaaaatccttttgcaacaaaaagcgcattattcacatcatgaatcaattcacgcaaatgaaggcttaccatgttaacaatgacttcaggagtttgttcttgtgacataagagatagacccctaataactagcaacttctctacaactgttaaattttattgtaaattctttgcttgtgaaatgaaagacgcaatggcatgagtcactaacctgacacatttaccagaagctccccctccctctgaccaaagtccgttgggtttatcgcaccacatgtaggtgtcaatatgattccaatttgtttgagtaataaatttttttaaaaagagagctgcggtaatagatccagcaaatcccgacgaaccactattttgcaaatcagaaatactagactctaaataagattcatagtctgtaggtaaaggcattggccaaacccaatctcctgtttcgatacctgactgaaataataattgcgtcgtagactgatcgttgccaaataaagaatcaatcattgtcccgagcgacacccgagccgcgcctgtcagggttgcaaaatcgataagccaattgggtttttcatcgcaagccaaacaaagcgtatcagccaaaatcaatcgcccttcggcatctgtattgtctatttcaacttgtaacccattttttgctttgtacacgtcacctggacgcattgcgttaccagagatcatgttttcagcaagcggtagccaacaggtgagttttaatggcaactgcattctcgcacatgctaaaaaaacccccaatgccgcagccgatccgcccatgtcttttttcatgattttcataccagaaggtggttttatgtcgtatccacccgaatcaaatgtgatccccttaccaaccaaactcacatgtgatatttcagcgcaattatgatttgaacaataagaaagcttaatcaaacgcggtaaaatttgacttcctttgcccactgcacaaattaaaccgcattcttcttgctgcaatttattaaaattcataatttcaatttgaatatggtttggattttctgcctgttcacactcatatttaaccaatgatcgaataaaaacttcgtaagtttctggatttaaaatattagcaggcatatttacaaatgttcttgtataacacattgcatcgctaagagcataggctcgctgcaaaattgcctgagtaaaaaaaggctcttgcaaaccaattaaaatattatttaacttgttagactttttaaaaactttgttagaaattgatttttgtaataaaccaattagaaactcgtgctgttcaccctctagcaaaagttttaaatcatcagaaaaagagagagtaaaatttaaagaattatcaaatttacttgccaaagattgcaaagcgtgtgccaaaatggctccggtatgactggctatatgggctttacctggcttttcaaaaccaattttttttggctcatctttaggtgctataaaaataaactgcttaccacttggatccgttggatataaattttttggctttagttcaccaacaataacgaatggagaaacaagtgttgcagaattatttaaaaaaaactcctcggtgacgatataaacagaaaaatgattaggtaacgtgttacttttaattttattaaaatcttctgttgtataggttttaaaagtaaagtttggcgctaaaaaccaaccagaaaaaaaattcatcttgctatcccactgtttaaacttaataaagtattacgcaaaacaagactcgattctcctttttttctttttgcaatcagcaaatacttttgcatagaagctttttttgctgctaaaaattgcgcgtaaaagttactagaagcaaattgaaaagagcttgagttgtaatgcgttatcaccttacacaaatcgcgcgaacctgtttcatcgattgcgcgcaacataccgttaacaccatgattatatgctgttaatgttagtggccaattttgaattttatcaaaatcactttttaaaattttcattgcaacttttgtagagacgactggatctgttctcttgttaacagctctttctccctcaaacattttcatagtacctggcataatttgccacaaacccattgcaccaacttttgaaccagcgagtgaattgtaactactctcaacatgcggcaatagagccaattctaaaggcaaaccactttgctttacgataggaaaaacagatggcagataattgatgctacgttgaatacccgcttcaaattgtgttttgagtcctgtttgaattcgcaaattgtccatagcctcaaataaatatttttgcgttaattcattttttttaaataattttgcaacacgcaactcttcagaagtccatttgtaagaaggttgatgaagttttcgcgatatactgtataaaattttgtaatattttgctttgtgtctttcaaccaattctgtacgttgggatttattggttggcaaagtcaatattgcataaatacgagataaatttcttttatcatgcaaaaatgcttcgtgattatcaatttcagtatacactctctcccaaaacctgacattatttttcagacaacttaaatatggaaatgcctctaagttaccacttggtattttagtttctgtaattttattataattgtttgcattatctcgcatgacacgattacgaccattagaatggtctttatcaatggaagaagaaaaatctttagcaatatcttgcatatcaaaattttcagattttatattactctctcttgttaatttatgattattttctgtttctttatttttaaaacgagctgtgttgttagaatctggtttatgattaataattggattataataaagaactggagtttttcctgcttggggaggcaaatcgattttaagatctaaacactgcaattctgaaatacaaaacccttgaaaaataaacagacaagaatgaattattgtgctaaaattaaattgcaaatctttactaaacataataaatcctcagtgaaaaggcttctaagccagccataagcaaaatactgcacttagaaagaggtaatatgtgtcgcatatttaagtggattttcccagtaattcttattttatttttattagtcattctggaatttgcactaaaagcatttcatattcctgattatattattcctttgccaacacaagttgtaaatgtcattttaactgactgggaaattatttttcaaaatttacaagttacgattattgaatggctactcggcatttttcttgctattttgactggctttacaatctccttgatttcttttaaatctcaaaaaatacactcatttttagcaccacttcttgttatctcgcaaagcgtaccttacttggtatttacaccaattttaatgatttggctaggacttgggattgctccaaaagttgtattggttgttttaacatgttcgtttcctatttctcttgttctcatgcaagacctaatttctgcaaaaaatgaatacaaacttatagttgacatgtttcgacttaaagaatcaaaagcgctttaccatatatatttaccgtacgcactgcctggtttttttaatgcactaaaaataagcaccagttactcttttggctcagcggttcttgctgaattaatgggcagtgaaagtgggcttggaatttatttactaagagcccaagcaacattttgcactgataaagttattgcagtagtggtaataattgtaattattagtattacaagcgtaacattgattgaattacttagaaaaaaaataattttttggaatacttttaaaaaataggttcataattcaatgattaaaattaatgttaaaaattatacttataacaataaaatagccgttttaaaaaatattaacattgcgctacagcaaggatcgataacctgtttaataggaccttctggttgtggaaaatctacttttctgcgccttttaatgggaatggaatgtggtgctgatggttttattaaattccaaaaaaacactttagagttttcaaattggaatagttctcaaactttatttactatggtaccgcaaataccccatttgttaccttggaaaaatattatagaaaatatcattttagcaattcccaaagaaaaagtagcaagagaaaaaacctctgcatttgatattgcatttgaagcacttaagatagtacaattagagactcactttaaaaaatatccttttgaaattagtcttggcatggcgcaacgtgtttctttagcgagatctcttgttatggatgcacaggctattttacttgatgaaccctttgcttcgcttgatgcttatacccgtttaatattacaaaattggttaaaacaaaaaatcgcagaagccaataaatatgcaatattggtaacccacgacatgcacgaagcctttaatatatcacaagaaattcatgtactctctggctaccctgctgaaattgcaaaaacctacagtgagccagataaaaatttatttgtgcaatatgaaaacgaaattttaaccttattaggtggtgattttatttcataaattattaaaacaaaaaaataaataaaaaaacataataattcaaacaatatactgaattatttataaaaagataacgatttaattttacctacttattgacgatattctttactaacagaacgatgtttaaaaggatatttttaaatgaaatatttattgcatatttttattattttattcattttttcatgtgcaaaaaataaagaaaatttaaccagcgaaaatcttagaaaaccagaaaatgataaccatgaaaacaagagcaatttcaataaacagcagaaaaatatttactttggcaaaaacggttctgtatctttaaatacagaaacagacgaatatgttattacaagcattccagaaaatctcccagacatttctattcaactcccatttagccttatttttgatagtcagttaactgattctgtttataatactaaaagttctctatttcctgcaaataaatattctttatttaaaatcccagaaataattccttttgataaagaactttctgttgaaagcagaccaggaattggcaaatacgttactctacaaatttctggaaatattggcaataaaaaaaatatctcttattatatttgttacaaaacagaaaattacaaacatgcaaaatttaattttgctattcaagaaactgatgatttttactcatacccaatatgtgaaaaatatgaaaaattaattaacaatagtattgttactccactcaatattgcggcaggggattatatgtttttaaacgttttaatgtttagagcgtatgcaaaaggggagtgctatccgggtgttgaaaattgcaaaatatactttaaaactgatataaagtattatttatctttatcatcaatttgatttatttaaaatcattttataatatgaatttttttttatttgtaaaattaaggtaggatattttctaatgaattctaaaaaaacaaaattagaatcagttgtaaaagtttcaagcaagggacaaattgtcattccaaaaaaatggcgaaacgcagttaatatttgcgagggcgaaaagcttattataaaagtaagagaagatcatgttattgaattgattcctttaaaaaaatcaattgatcatctttttaatttttttgaaaaatcttatgaaaacaataaaaaagatgacgagaaattgctgcttgaattttttaagaaaaagtaatttacgataattatgataaaaattaaattttctatagtttttaaattttaaaaacaaaaaaatttatcgtttttttgatataaaattaaaattttggttgcttgactaatttttttgtaataatttgttttatgcaaaataaaccttgcaaaaagctaaaaaaatgggagcccaaaagctccctaattagcattaaatgctttcgagcttatctcttactaaaacaagcagagaataagacttctgatatgatataaaacttttactttagtataacaaaattgtcaacaccaaaaggaactctctcatgctgcaaacagaaaccacaaaaaaaacaactgcaaataatacgctagacactaacaattatacactaggcatcgacatgggggttgcaagcattggatatgctatcattgatgaatcctctaaaaaaataattcatatgggatcacgttgttttccttctcctgcaaccaataccgacaacaatgcagcgacaagacgccttgcccgggcacaacgccgaaacacagcgcgcaaagtgatgcggcgacataaactttttacttatttacaaaaacattctttattacctccctttactcaaacacaattagaaatgctccatgcgcccataccaacagaattttgcaccgttgcttctaaaagacgcgaaatggttagaaggtatgcacaattaagaaatcaaattatgacaagcctcgatgcaaccctttttaaagagtggttaaattttttagagcaccgccctcattatgcaaaaacttatttaaaaaaacttccaaatatttttatatactttttaagatctattgcacttgacgaacaaattgatagatattctttaggccgtattatttatttttttggtcaaagaaaaggttttttaagcaaccgtaaaaatttagcaaaagaattagtagatgagaaaaaaaataaaattagctcagcagttaatagtcttgcaggccacatacaagaaaccaaatgtcgaacattgggggaatatttggccaaatatgtagatatcaacaaagaaacaattagaaaaagatacacagcaagatcaatgtatacccatgaatacaatttaattatcagttctcaaaatagtttagtaaataaaataaaaaatgaatttgatgacaatagtgtttttgacacaatttacaaaatattattttatcaaagaccattaaaatctgtaaaaaaattaattggaggctgtgagttagaagaagttttatgtggtaaaaaaaacattaaaagagcaaaaaaatgtttattaacctcgcaagaatttagaatttggcaaagtataaataacttaaaaattgtctcaacgtcaaatgacccatcggaaagagaattaaaacctcatgaaaaaaatagtatttttgatatttgccaaaaaaaggctgaagtgagtttagttacattagctaaagatttaaaacttaaaaacgaaaaatttaaaaatgatatgtattttaataaaaataagaaaaaaagtgaagataaaaatgctccaacagaaagaagaattataggaaataaaaccttatctaaaattgcgagtgcttataaaaaaatatttgaattaagcaaattagaacaagaaaaaataataaatgcaattataagttttgataactcagaaattttaaaaaagtattttatagaaaaaaaatctattccagaattagaggcacaaaaactcgccaatgtttctttagaagatggttacttaaactatagcagcaaagcaatcaaaaaacttttaccacatatgcaaaatggcaaaatgttacacgaggctataaaattagctggttataccaactctaaaaacaataaaattaacgaccttttacctgcttatgtcacaataaacaaatatggcaataaccctgctgtgctgcgatctctttcgcagttgcgccttgttgtgaatgcaattatcaaaaaatatggcaaacctaaaataataagggttgagcttgcccgagatcttaaattatcgaatcaagaaaaaagtaaaatttttaaacaaaacaacgcaaataaattagaaaataaaaaaattactacagaactcaacgaaaaaaaaattaatgtctctgcttctaacatagaaaaatacaaactttggcaagaatgcaactaccaatgcccttattcaggaaattgtataggacgtgatgatttatttggagacaacccaatatttgatgttgaacacattataccactgagtagaagttgtgatgactcttttgccaataaaacactttgtcgaaatgatataaatcgtaacaaaaaacaaaattacactccatttgaggctttttcaatcacagatcctgatgaatacgaaaaaattcttatgcgtgttgaaaaatttaattctccatttaaatacaaaaaactatttcgctttaaagcacaaaatattgatacagaatttagcgccagaatgctcaatgacacacggtatgcttcaaaacttgcaacgcaatatcttgggttactttatggtggaattgttgatagcgaaggcagccagcgtgttagggtttcgtcgggtcaggtaaccgcaattttaagaaaaaactggaaactcaataagctgctttcgcaagaaaataccaaaaccagacttgaccacagacaccatgccattgatgcgttggtgattgcgctcaccaacgaaagtgcaataaaattgattaataaatcagcatctcgtggcgaatttaagtacgaaaacagattttcaaaaattgaaataatttggcctgatttattgcagcaaacccaaaaacatcttaataaaatgctaatatctttttatatttctcctaaaattaatgcgcttctccatgaagagacaatattaagcaaaaaaaatgagaatttttattatagaaaaaatattaatgaaattaaaagctatataaataatacagaaaaatatgataaatttgttttagatccagctttaacaaatataattaaaaataaatacaacgaaaatatttcaaataaacccaaaaatacaaaaaatgcagaaacagaaaatacagaaaaaaaggttatttttgatcaaaccaaaattgacactctcccttatttaactgttaaaaactcttcaaacaaaacaagcccatttgccaaagaagcaaatgataaaatttatgttaaatcatttcgtaataaaactaattacaaagaaacttctgtgctcgaaattggtacaggaactcaaaaaagatatgttgcaaaaaattctaaccatcatatttctgttttttcaactaacacaaaagatgggaatgattttttaattagtacatatcttgatgtttttaatagaaaaaaagcgggacaaagcattatattaaaaaaacaccctagtgatccagaggcaaagtttttattttatttaaaaaaatctgatatttttgaaatagaagaaaatggagtcaaacaatattatataatcataggttttgaagcagataatagaataaaatactctcacatatatgatgctcaaaaaaaacctactagaaaaagcatcaataatttattaaaaatgaaatttaaaaaacttaaaatttcgcctttaggagaaattttacagtaagcagtttattttatgtattgtagggaataagacttctgatatgattgtaacgctctcccttaaaaacccaatttggctggaacttgcagggaataagacttctgatatgatgaagcctgactttgaaaacgtttggtggtagctggaacttgcagggaataagacttctgatatgatccgccggtgcttgtggtgtatcagtcatgagctggaacttgcagggaataagacttctgatatgattaattgaatgcccatagcatacttgccaaagctggaacttgcagggaataagacttctgatatgattactagattttcttttaatgagataagatagctggaacttgcagggaataagacttctgatatgatagacccgtcaataacttactaattattgacgggatttttttatttttagagctaaaaaaggagtatttcgggtagtggttcttctgttttttctttgttttttccaaaaaatactttttgcttaccaaattgcctgtctgtcaccagcaacagcctaacctgcccagatggcggtaatcgttcttcaataaatttttgagtacttatacttgcatcttcgctcggaaagtaaattgcatacacagagtactgcaacatactaaatccttttgatatgagtaattttctaaattttgcatagtcttttctttgttttttagttttggttggcaagtcaaataaagcaaacaaccacacagcagaatacgctccagaaatttttaccaaactcataatgttattttcttaatgtaatttattaaaatattattttattaaattcggaagaaataagcttacttgtcctgtaacaaatgccttgctcaaagattgcgctgacaaggtaataatatcctgcagctggcgctcttcttgatcaacagtaaattttttatataatactgcaatcagcctttgtttaatgtcttgcgttaatttattttcagtaaagttttctgcttctacaattaaaaaaacctctcggtcaataataggacgaaatggttccattaaatcatctgccaaacaaaaaggattgtatttccctttatgaaatacaccaattgatgggtttaatccgcaagcacacaaactcctcgctaccacagctctaagcacggcatacccataatttaaaaacatattttcattttctgctgtaatatctcttttaaattgtttatttttacaaatatttttccagtatataattgctgcttgcgcttctaaattaccctcgtcaccactttttacttttttacacaaatctaaaagcccaaaatgctcttctcttctgtttaaaagtaaatagccttgagcttcaatttttttagcaataatttttttccaaagttgctttttaaaaggaagggttgcaagaatttgtttagaaaaacgctgcgtttgcaccgagtgtgccaccaaaggtaacagcatcccaataggcatatgtttggtatcacagcaaacaaatatacacccgtattctgctaattttgctaatacagcgtgcgtataatttaccgctggcgacgagacaataagcgcagagatttctgcaaacgggactgtaactttattactggattctatgaccaaaagctcactaaaagaagaaagccttacattttgtatagaaatatcaataattctcttaatcattacaattaatgggaaatttttttaataaaatgcgaggaaatacttttaacatttgcctcatcaaacacgtcgcaggccaattgaaaatcatcaatatctaaaaaacctttttcattgagcacgtctttaagcttatgaaacgaatccaccaacatagcattttgatccaatagaccgtccatttcggctcttagcttgcacacctcgccacctattcttgtaatgctatctaaaatttgctctatttgtttgaccaagtttgaattgaaactgtgatcataagcaatattagtcaaagtgtccaaatcaagagcgtagccatctaaattttcgtctgcaaactcatcaaataattcttgaggggtgttagacatttcacttccttccacttagcgtctacattgtgctctatttcagatctttctacttgtcggaagggaataaattgaaataagaggaaagaattggttgtctgtctctaaaattggcgcagctccacaatgtatgttaaatgtctgttggtttttagctgtttttattttgtttgaaaggataaattctgaatcatgttaaatattctcaagtctctctttggaacgaaaaacgatcgagaattgcgtaaaattgcacctattctaacaaaaataaacttactcgaatctcatttagaaaagctgacagattctgagcttaaagccaaaacagatgagtttaaaacacgtcataaaagcggtgaaagcattgatagccttttgccagaggcttttgctgtagtcagagaggccagtaaacgtagcttaggaaaaagacattttgatgtgcagttaattggcggctatgttttacatcaaggcaaaattgccgaaatgcgcaccggcgaaggaaaaactcttaccgctacggcaccagtttacctcaacgcgttatcaggaaaaaacgttcatgttgtcacagtcaacgagtatcttgcctctacgcaatctgaagaaatgggaaaattatatagtttcttaggactaactactggctgcattttttctggaatgtctgatgaagaacgccaaaaagcctatgcctgtgatgttacctacgcaaccaacaatgaacttggttttgattacttaagagataatatgaaagttcgtttagaagactttgtgcaacgcgggcatcattttgccattgttgacgaagtggattctattttaattgatgaagcacgtaccccactgattattagtggcccatccgatacctcatcagacaagtatcttgttgccaataatgcggtgagaggattgcgcaaagaactcgattacactgttgacgaaaaatcacgttcctgtgcattaaccgaagccggcattgcaaaagttgaaaaacgcctcaatatcgaaaatctttttgatccagaaaataacgagttggtgcatgcttgcaacaatgcgttacgagcgcttgtcttatttagacgtgatgatcactatattgtacaacaaggtcaaattattattgtcgatgaatttacaggccgcttaatgcaaggcagacgcttctctgatggcctgcaccaagccttagaagccaaagaaaatgtaccaattcaaccagaaaaccaaacccttgcccaagtcacattacaaaactactttcgtatgtatgacaagctatcaggtatgacaggaacagcagatactgaagccgtagaatttcataacatttataaactcaacgttgtggtcattccaaccaaccgcccgatggttcgtaaagatcatgatgatgtgttatttgtaaaacaatctgttaaatttacagccgttgccgatgaaattgagcgcgttcataaaacaggacagcctattttggttggtacagtgagtattgaaaaaagcgaacagttatcaaaactgctcaacgagaaaaaaatcccgcatcaagtattaaacgcaaaacaccacgaacaagaagctttaatcattgcgcaagcaggacaaaaaggcaaagtgaccctttctaccaacatggcagggcgcggtacagatattattcttggcgcaggagttgcagaacttggcggactttacgtcattggtaccgaacgccacgaaagccgtcgtattgacaatcagttgcgtggacgttctggacgccaaggcgatcctggtgctagcaagtttttcttatcatgggaagatgagctcatgcgccgctttaataataaagccaaccaatttattatggaacgctttgttggtgacgaagccattcatgatccaaggctcacaaaagtcattagcaaagtgcaaaaacgggttgaaggatttaactacgatattagaaaacaacttctccaatatgatgatgtgttaaatcaacaacgcaaaaccatttatgcagcgcgcatgagaattttacgcaaagaaaatgtaaaagacattttaacaggcgaacctgttataaagtttgcccatacaatatgtgatgactttataccgccatctggcttgccaggagaaatggtcacaattgactttaaaaacttggaacgcgtattgtttagaaattttaataaagctatcccattttcaaatacagaaagagctaaaaacgaactcactcgcgaagaattttatcagcttattacgcaaaaactcattcaagagtacgaagaaaaagaaaaactgtttggcactgagcaaatgcgcgatattgaacgctgggtcatgctgcaaacaattgactcgtggtggaaagatcatttattaaatatcgatcacttaaaagatggtattggcttacgtggttatgcacaaaaagatccgctgcaagaatataaaaatgaagcttttgaattatttataagacttattgctgctataaagcaagatactctgcaaatgatttatagagtacagcctaatttagctgaaaaatttgtagcagaggcgcgtgaagaagctgaaaaaaaatcaaaaaatgagcttaaaaattcgaacttaaaacacgatgatcccaaacgcttaatgcaacctactacttaatatctaaaaaaaatttattattttaaatacttttaaaattttgtttttaccagaaacgaacgtaaagtcccgacttctaaagtcgggcgatttatgataaatttaagtataaaacactctttgactcccttttgatttaccactctgtaaaaactgaatcaattctttactatttaaggcatttgttaaattttttttaattaatgattcattcggataattaatattagtttttgtaaaatctaaaaaaccaaaactcaaatcacttgtttgatatttgagttgggaagtattcaaagtaaatgacattgtaaaacaaatattattttctaacttaactttagagctattgcttttatttaaaatttgataattttcaaataaatgaatgcaaataaataaatattcatgtgatttggttttttctataaataaatatttcattgaaaaatctaatttaatataataattagaggccatatatgagtctaaaaaaatctctaaattaaatatttcattttgattacaaaaatccatacaaaaatttataaatattgcatcgcaattctgagttacagattcaagattcgattttagtgcatcattatgaattaacactctattttgatttgattcaaaagttttataatttgcaatattttttaaagagttaaactcttcaaaatttttgttgcaacttttagaaataattttttggttataaacaactattttcctcttccaatctgtgaaagttgctaaagtattttttttgagaccacaaaaaaataggtccgcaatttttgcaacaccattagtaatagtaatacttttgtaataaatgtaatattgcattaggacgctattttttgaaagttgtttaattataccagaataaatatacgaaatggtttcaacacttttaaagttattatccgaattcttattattataaaagtcgagcacaaattgatgtattttaaaatcatccgcaaaaataacaaattcatttatttttttttgcgcaaattttgtatccttataaatatattcaattaaataaaatatccagtaacttttatttttcaaaatgtattttttattcaaaaataatttattaaaatccaatagtttaattaaaaattgagaaacaaaaattctcttatcgtaaaactttgaagacgaatttgttacaaagttttcacataaagatttatcagatttttcttgctgatttaatagtaaagcctttttagtattaagaaataataaatattttttacaactttcgattataatattttcatagaaatattgcgttgtaagagattgaatttcaaattttaatgactttatttttattttaaatgaacagtaatttcctccgtaattattaatcagacgttgaaacatttttctaaagttagatatgttacgaatagaaaactgctcaatccctttatttggataataaaatactaaatgaggctcattaaaccttgcatataaaaaaattccatatattttttttgaatttgaaacttcttgaatataataaaaataagaataatctaaatttttataaattgaaaaacattctatatcttgttctaattttctcaaaaaaggggcttcatgctgagtatgacaatgagtcgatacaattcgcaaatttctatcctgcacaacagaataaataagcgaggttgatcttaataaaaaatcgttaattttatcttcaccaaacaatacatctgcatcgttttcttctaaaaaattttcgagcgtcgcaggatttaattctacaaaatttgttagttcttttttttgtcctgtaatattataaagcgtataaagatcttttagatttgcggcggtattattatatttgtcatattttttttgaatttctcttgcttcattttcataccttaatcgttcttcatttgacattgcatctaagtttggctccgatgtatcaaaatggtatgttttttcaaattcaatacgcctacggttgatactatcaactttcttttgaattttactaggaacatagctattgttcattatactaaaacgttgttcttggatatgctcagaataagatgcaaagcttgaattgttttctttataataaagatcaaactctaaaagatcaccatttttttgaaaatcttctttaataaatttaagaaataaagtaacagataaaaaatcattacaaaattttaaattatttgttgctaaactatcagaacggtttgatttttcattattttccataataattaaaaactctccataacaaattatttataagtaaattataaataatttgttaatatatacaatttaattataaattaaaagcaaattttaattttaatattaaaatcgcaaaaaaaactaatataaacaatgttatttttacaattaaattatattatttaattgtataacttttattcataattatttaaatttcagtatattaatcaattttttcagtattaaaaataagaactatttttgagagtttagataatattgagcaattacagtaaaacatcttgggtgttttttgagcttgaaatataatgattttttattttacagctatctgttattgaaaattctagatcataaactaaattttttatatttaagtttatccaacgaaatttttctgcttttacggtttcgatcgaaacatttaataaataaatcaaatttctcattgtatatgaagacttacactcaaaaagagtgtttttatctgaatctaaagaaatattaaactttatatcatatttacttaatgtatttttaaaatagtagttaattacatacattaattctttaattttaattggtttaaattttttgtttgatttattaattttaaaaaataatttaattaatttactagttttatgctttgaaataatttttttagacacttttccttcagccaaaacatattttttataacaagggttattctttattacgtttaatcttctcaattcgagtttttgaacaattcgattggccaagtattgcaaatataaaatttgactctcagataaatgattgatcttgttatccataatacataaggacccaattgtattaccttcatttgtaattaacgggaccgcagcataaaaacggatataagaactcctaaaaacaaaagagttttttattaaatttttatcgcataacgtatcgtttacaataactggagtatcatgaacaaaattaaaacattgaaaatcaattttattttttacaaattgattgtctaatccaacaacagactttactatcaaagaatcatgactaacaaaacttataaacgaaatcggacaattaaaagtttttgctgccaaaaaggtaaattcagaatattcattttcaggaaaatattcgttaatattataactatgcaaaaattgctttatattattatctattgttgaacaaatatttttatcctcaaaaaaaaatctttttttaactatcattacttaattccctaaaaaatgtttaattgatttcaaatatctattttttagtaaactttaagaaaaaaactaaattttagcattcgcacattttaataaaatttaattagatattataacaatgcatgaaatataaaatagtttatacttaaaacaacacgtaaatccatacacatttaatatattaacaatttgaaaaaaaatatgcaaggaaataacctttatttaaataaaaaacaaatacaataaccatttatgaagcaataaaaaatcaaatttattaaaatataaattttaatttttataatttttaaaattatagttaattaaatagatcaaaaaaaattctcaattatcaataaaattgtaaaaaacaataaataatttttctgttccaaaacaagtattcgtaaatactagaaaatatttctttgagaaaacattttatctaatattctataattcataatagaatttataattttttcatcaattcctatttctggaaataacaaattaaaagaattaacaaggttaattatcttttcttgtcctcgtaaagaacaactgttaaaatcaacattattttgtaaaaaattcattgcattaaatttatcgacttcttgccccaattctttacctcctaaactcatgattcgaagaaaatgtcttgaaaaataagatagattaccatttttaaaaatattattgagttgctgtacaaaaggatcttttaagtcaacttctggttggtaaggttctgcccaaacttgtaaacaaaatctatccagtaatggtccactaattttttgtaaatattttcgactttctctgggatgacaacgacaagcctttttatttgaaaataaaaaaccacaagcgcaaggatttgttgtcgcacacaattgaaaatttgcgggatagcgaatatttccaccagcacgagataaaaatacctgctttgcatcaagtggttcccttaacgactctaaacttgacgaagagaactctgccaactcatctaaaaacaacactccgcaatgcgccaaagacacttctcctggctttaagctactgcctccaataagagcagcaggagttgccgaatggtgaggacaacgcaacggtcttgcaacatcttcaacaacagagtgaataagtttaatatcaagtttttctctttctgttaatggattcaataattttaaaattttttgcaatgcaaaacttttgccaacaccaggctctcctgcaatcaaaatatgatgttgtccaacagatgcaacaagtaatgctacacaaattctaggattttttaacaaaattgtgattatactttctacttcttttactctttctaaaaactcagtttcagaattattatttatttcatcttcaatttgtgaatccattttatctctattagataaatttatttttagtaattcaggattttttatttcttttcgactattataccaatcttttaaattataaaaaaactcaattttatgctgtatcgacaaacttaaatattcttttgcagacacaggtaagcacaaacttggatatatttctgaatttaataaaattgattggtaaattaatggattttgtagttcctttagttcgcctgataaagaaagctcacccgctaaatattgtttttctgggaaaaacaatggtgcactattttgattctcttgatgcaacgcataaattattgaa

SEQ ID NO: 4030 - DNA, 24155 bp, synthetic construct
  misc_feature 1..24155: note = Synthetic
  source 1..24155: mol_type = other DNA
ttcgggtttatcagtgtcgagacaaaagggatgccctgccgggtcgatcattgttcttgaagttttgtagtattgttcgcttgcaagttttgctccagattctatcgcaaattgtacagcttcttccagattatccacataaaagtccaaatgtagcatttgcccttgttttccttcttgccaaggccagacaggagtagtatagttttctacttcctgaaaagctatcaccataccggagggagatgttatagctgcccaaccatttgcatgaggatgcgtgcactcccagtttaagattttgctataaaacttggacataactccagcatcggcacaatcgataacaatgtttacttttttgattggggctttggttttcatgttgcagaattaatgaattatatgtttgtgttccaccaaataatatcttatttaatttctgaataagaatggagcgaaaaggctatcttttattgatgtattcttcgctccatcttgaatgacaaaggttatcttatttctttattgtaaatcgatgtacagttttgctcttgaacgtttctccgggtctgagtattacactcggatactccggtttgttgatactatccggaaaatgttgagtttcgaagcataccgctgcacgcatcggatagcggtgtccgtgttttccttcaaaatttcctgtcatccagttacctgtatatatctgaacactcggttcggtagtcgaaatattcatttgaattcctgatttcggagaaaaacattctactgctaaggccaattcaccctcttttttatctaataccattgtatggtcgtagcctttcccgaaatgtaactgttcgaagtcgtcctcaattcgttctccgatagtatgaggagtagtgaagtcgaacggagttccttttacaggttcagcttttccgtaagggatagcagtatcgtccgttgggagatagctagaggcatgcatgaccagaatgtgatcgtttatagtagggtctccttcgcccgaaagattgaaatatgaatgatttgtaagattcaaaattgttgccttgtctgttgtggcctcgtagtctatatcaaacgaattgtcatcggtcaatttatagatcatttttacattcagattaccaggaaatctctcttctccgtctttggatagatatgtcagctccagagtttgatgatccgtttgttttgcatcccataccacagcattaaaacctttaagcccaccatgtaggttatttggcccattgtttattgccaattcgtaggttgtgccatcgagcgtaaattttcctttggcaatgcggtttcctgttcgtccgcatacagctccaaagtatggctcttcagaattgagatattcgtttagattattatgtccgagaacgacatcggtgagttggacgtttttatcaggtacggataaggaaactatttttgctccgtaattaatgacggttgcttccaatccattcttgttggataatacgtacatttttacatctttaccatctactttcccggagaagtttgttggattcaattttgatttggttaattctgtttgcatgatatttttttaagttatacgagcttttttataaatgataaacacaaatataaggctatttttaacaaaaaatatttttcttcccctgaatgtggatctaaacatatctaaaaaataaaattgctatacttatatgtcgaacctgtatagtcattggttgggcgaatcttgtgattttattatgttatagataacggctgcgagagttgagactagtcttagtctgatggaagtgtttcaaagtcttaaattaagcaataaaccaaaacaaatggagttttaatagtgtttattctttaattgcaaagaagtatttattaaaaaagataaaaatactactgtaagatgtatttattttgtttctttgcagcgaatttgggtgctttgtactcattcactaaatactacttatttgtctttgtacaatatgtctgataagcatcagtataaaacgatatcactatttactacaggggtcattactacgattagtataactcttgttctttttcttttgggtttgacttttttggtaggatttaccgctaaaggcataggttcgtatctgaaagagaatatgggtatatcgatagagcttgcaggaaatgtagatgatgcttctatcacgaagatacagaaaaacttgaatgtaaatccgtatgttaagtctgtcgtgtatatcagcaaagatgaggcgaaaaaacaactggtagaagatcttggtcgtgatccggaagaggtgttaggatataatcctgctcatgcctatttcgatgtgtttataaagtctgactatgtaaatccagacagtataaaaaaagtagaagcaagtcttaaggttcaaaatctgaaaggagctcagatagtaaataatatcgtttataatgaaagtgatattataaatgcaaactctaagctttctttaattggaactatattggctatactggctgtgatacttgtgctcatatcctttacactgatacgaagcattattcagctgaatatatattcaaagagatttttgataaatacaatgcgattggtgggtgcgacaaactcttttatcagatggccttttatgtggcgtatgataattagtggtgttgttgctgctatcttggcgaatttagctattacgggagtaatatattatattacaagcataattcctgatatgctgtctattgtgaaaatgtacgaattgttgattgtatatgggcttgtccttatctttggcatacttatagcggcttttgccacagcattttcggtgaataggtatttaagaatgactacaaataaactttatcacgtttaaaacatatggataagaaagattttgcttttggcaagctaaattacatcatttgtgctgtgtcggttgtaattattatagttgggtttatcctgatgacagggccatcttccagcatcgaaggcggatttgaaccggacatctttagtgccaagagaatcgttgtggctccaatggtgtgtcttgcagggttcttgctgatgattgtcggaatactgtatcctcgtcgtcgtaagagtttagctgaagagaacaaagagcacaactgattaattacaaaactaataaataacgatgagtatttttgaggcaattataattgctattgtagaagggcttaccgagtttcttccagtatcgtcaaccgggcatatgattattgctcaaagtcttttaggaatcgaaagtagcgaatttgtaaaggctttcactgttattatacaatttggtgctattttgtctgtgattgttttatactggaaccgcttttttcgctttagaaatgatagattaagagcggattttaaaaatatattcagctatttgttttataaattagagttctattggaagttgttgatcggttttgttccggctgcttttttaggattgatctttagtgataaaatagatgaattgctcgaaagtgtaacagttgtagctatcatgttggtgcttggcggtattctgatgctgtttgtagacaaatggtttaacaagccgaaagaagactcacaagaaataacatataagaatgcgtttataattggtttttttcaatgtatagctatgattcccggagtgtctcgttctatggctactatcgtaggggggatgagtcagggcttgagtagaaaaaatgcagcagaattttccttcttccttgcagttcctacaatggctgctgctaccggatggaaagtgtataagctgataaaagcacccaatggaggagtatttgattttgatttcagcatattactggataatatgactgtgcttataataggaaatgtagtagcgtttatcgtagcgctgttggctattaaattctttataggatttgtaaccaagtatggatttaaattttttggctggtatagaattgtagttggaggaattattcttatccttatgctggcaggacacgaattaacagtataatggattttatatcaggagaggtcttatatattgataagccactaaattggacatcattcacccttgtgcgcaaattgagaaacaaattatgccgcaagctgggtattaagaaattaaaagtcggtcatgccggcactctagacccattggctacgggtgttatgattgtttgtacagggaaaaagacaaagttgatagaatcgtttcaatatcagactaaagaatatattgcaacgatcaagcttggagaaacaactccttcatttgatttggaaacagcagtagatggcgtcttccccgtagaacatataacgcaggagctggtagaggctaaacttaaagattttattggagaaatagagcaagtgccgccaacatattctgcctgtaaggtggatggaaaaagggcatacgaatttgcgagagaaggacaggacgtagagttgaaaccaaagttgttggttatagacgaaatcgagcttctcgactattcctttcccgaaataagagttagagtggtatgtagtaagggtacctacatcagagctttggctcgagatattggagttgcgttaggctcaggtgcacatcttaccgcactggagcgaacacgaataggagaggttactcttgatcagtgtattgagggaagccagatagaagaatttgtggacgcactaattattgataaataataaatttagataaagaaacatgaaactttctcaattcagatttgatcttccagaggaattgatcgccactcatccgtcaaagaacagggatgagtcacgcttgttggttgtcaaccgtaaaaccggggatattgaacacaaaagttttaaggatattattgactatttcgacgataaagatgtttttgttttcaacgatacgaaagtctttcctgcccgtttatatggaaataaggaaaagaccggagctacaatagaggtattcttgctgcgtgagttaaacgaggaattccatttgtgggatgtacttgttgatcctgcgcgtaaaatacgtataggaaataaattgtattttggtgacgatgactcaatggttgccgaagttatagataatacaacttcgcgtggacgtacgcttcgttttttgtacgatggtccatccgaagagttcagaaaagcactttatgctcttggtgaaactccaatccctaaatacctgaacagaggtgaagaacccgaagataaggatcgctatcagactatattcgctaaaaacgaaggtgctgtcgtagctcctgctgccggacttcactttagccgtgagttaatgaaacgcttagaaattaaaggtgttcattttgcatatataactttgcactcgggcttgggtaattatagagatattgacgtagaagatcttacaaagcataaaatggactcggagcaattgcttattactcaggaagcgacagatatcgtcaacaaagcaaaagatgaaggtcgtagagtgtgtgctgttggaacttcggtgatgagggctgtcgaaacaatagtgagtacagatggttacctgaaaacaaatgaagggtggacaaataagtttattttccctccgtatgattttggtatagccgactctatggttactaattttcatttgcctcagtctacattattaatgatgactgcagcatttggcgggtatgaccgtataatggatatatatgaaatcgctgtaaaggaaaaatataaattcggaacttacggggatgcaatgcttatcatttgatgatactcgaaaaagaaaaaaagcataatgtttatctgggacttggctccaacttgggagaccgaggagaaaacctggataatgcaatagattatatagaagagcggattggcgaggtgatcgccacttccgctttttatattaccgagcctgtcggctttgagtctgctaatcagttcttgaatgctgcatgcagagtggagactaaacttactcctattgaagtattacaggctactcaatggatcgaaaaagagatggggagagatgttaagtctcagggcgaaagatatactgatcggattatagatattgatgtcttgttatacgaagatgtaattctggattctgctgatttgaaattaccgcaccctcatattcacgaaaggtcttttgttttatttcctctagctgagattgcaggggaatacatgcatccgattcttcataagacaatcaatcaattaaaggatgccatagtgccaccgacttccatagcgtaataagggatagtattattttattgaaaatatataaatcagcagttttattgtaagctgctgattttctttttttatgatttccttataaattatgactgaaatcaaaactcacctgatggctgtctattgctcatttgctgaatgagagaaaaatgcagggaaggtaaccgtactctcattatggtatctgtctgaagctgttactgtatagtaatacccaaaatcgccctctttgattgtaaaagcatagctatttgttcgtagacctgttgataatatattacctgcattgttggtgtctacgggttctttgtctgatacatacacggtatatgtgtaatctccatctgctgttggcggattccatttaatgtttagcttgttgtctttgtctttaaagacttgcaaatcagttggggaattgggcgcaatgttgtttagccatgtcaatggcggtagcttcgccggagtagggtagtaggtgtgtatagagtctaaaactccttttagattgctgagaacattcgctgttctgaaatatgctgctccggggatctttttatcccgaatgtattgcatctggttcgtaatatcttgtagcggccactttaattcatccatctgataaacacccagtcccggagcaataagccttccgttactatttgcaatccagtcgttaaggaacggataaaaataatgatcacggtaatacatcattgggaaaagtaggtcgtgttttccgcttttcagccaatgtcctgcatcctgaaatactgtttcataagctgtccagccatcattgggtgaaacctccggcagaactttgtatcttcctaaaggagagctactcacttgtacccatttttttagagcctttaccgtatcgtatgcttcactgatcagcttgtttatattttccctacgccaatcgtatagattcatcccgtttccatattttcggtaggtatcgtcatctggaaatttgcgggagttactcggatagcggatataatcgaaatgaatgccatctacatcataattctgaacgatctccttcactatagatactatcagattgcgagtttcgggcattccgggatcgagataccatctttctcctatagccttgtaatatgaaggcttgttttgtactactgtggcttttcttcgcctgcctttgcctgtatatcgcactgtggctttatccataggataggctataacccatgcatgacattccatccctcttttgtggcattcttctacagcgaaggccaacgggtcgaaattgtcatcatgattgaaatatgagctgagaggttctatcttggagcgataaaaaacatatccttgagctcttgcctgaaagaggactgtgttgaaattcgcttcctgtaatttatccagaattttttttaattgttctttctgagccttgacgctagtatgctgggcaggccagtcgagaccccagtttgttgttagccaaacggcacgtatttcggtagcaggagcttgagaaaatatatatataggaagtagtaaaagtagaaataagaggtggaacggtttcatatttataatccgctaaagtttacattgttgaataaaagcgatggaatgcgccaagaggaagtctcacggggatcgtttcctgcttctgtaagactatcccaaagagacagcatatttccggttatgttcatttctcccaatggagttgaaatctttccgttttcgatcaagaagccctctatgccaaacgaaaaatctccggtagtagggttgctgttgcctccgttgaagttggtaacccatattcctttttgcacagatgataaaatggtatcgaaacctctttctcccaaagacatttgaagaatagacggggaagatatggtagggactactcccattttcagagaattgtatgtgtctatgaaataattttgcagtatacctttctctataatcgttctatcctttgtttctacaccttcaccatcaaaccatcgggcaccaaaggagcgttttatatgaggtgtatcgtaaagggtaaagatatcagccgttatcttttttcccattttgttcaataggaaagaatttttctgttgaagtgctgttccgtacattgcactcataagtggagataatatgcgcgacgaagtagtattgtctaacaacatgtcatacttgcccgattttatcttttgttgtccgatcttgcgtaatgctctgttgaatgcaatttttgctatcccactttttttcagatcttcccaatatacagcactgtcgtaccagaaggattcggcacgagcgtcaccatccgtttttagcgatacttctaccatcaggttgaacgctgagtctacacattcggcttcaaatccattgctggcaatcatatattctgctcctacgccatcatcgtatgccgaggtgacagagattatacgattgtcgctgccatgtatttcgtctacagactgctttataagatttaacttctcacttgttggaatggactcaaagcttccgtcacagaggtctaaatcagtttcgtctcctctgaaatatctttgcgtgtcgggcagttggcgaaaagggtcttccgataaatatttagtagacgtgatgccttcttttataaaagactctaatcctgccttttctattcgattggtggaaaatgagccgtatctgccatctataaataattctatatagagtttgttttcactgctttggtgaagtttatctaattgagtgtttctgtattcgaaagagttgttgtttgccgttattactgaaacccgagctccttggcatccattagccagagccagttccatagaccattgggcaatatctttgtgttgtttacttatcatatctttgttgttgtggatgcaaaaatacacagatttagtgtaaaaaagagaaaaagttagaatagaaactttctagctgtacgaattaacgttctctaactaagctgttgtaattcaaagtctggacaatgtttctggagaaaagattctgatttaatttcttaaagcttagtcaagttgcagaggagtgtatagtgtgtacttgtaaatagagattgaggggtacttattatagcatatcaaacgctacagcaatcattttttcatatataatagaaaaagcgacaccgaagtgccgctcttgatgttttcacaacggaataatcattattgtaatttatttctaaatatcacaaaaaatatttttattcagaaaattcatggaattgttaaaaataattatctttaaggactcattatcagattgtagagtgaaatctgattttgttaaattacaaaagtttataatctaaaataatgtgtttgatataaccttttaaacacaaatataatacttatggaaaagtgattaaattcagacacaaatgaaaaaaaagtatcagttgacattagtaaatagaaatgttgaaaaagaaaaaccaacattgagacttgaaataagtagaaaatcccacggagtacgcgggattaagaatttcttcggcttatagccttgttgtgaaaagtctttcactcttgtatcttatggctcaaagttataaaatattttaattcaaaccaaataaaagttgacaatatgggcaaaattttaggtgttgatttgggtacaaattctataggtttaacactaagagaagatgatatcttttcttggtatggtgtttatacttttaaaaaaggtgttggtcaaggaaagtctggtgagttttcatatgctgctgaacgtagaaaacatcgttcttctcgccgattgtacaacgctcgtcgatatcgaaaatgggaaaccatgaaaacgttgattgaatttggattttgcccactggagaaagaatatttggaaagatgggtgcatttcgatacaacaaaagacgaagtcggtaaatcaataggacggatttttcccagaaatgacaacaatttcaataattggataaaattggattttaacggcgatggtattcctgaatttacaagtccttaccagctaagaaggcttttgatagcggaaaagctagatttatcgattcctgaaaaccgttacaaggttggacgtgcattataccatattgcccaaagacgtggttttagaagtagccgaaaaagtggtgctaatgataaaatagctgtttacaaaggtagtaacgaaaccaaaacaatcgggagaaatgaatacgagaatttgattactaaacataaaactttaggggcagcttttggttatctggaagagaaaggtataagagttcggaatagatatacccttcgttccgattaccaagacgaagtgagtaaaattgttgaatttcagaaaattgaagatgtattgttttctgaaaaaattgaaaaagccatattttaccaacgtccattacgttctcaaaaaggattagtaggaaaatgcacattagaaccaagtaaatcacgctgccctattagtcaccctaaatttgaggaatatcgtgcgtggtcatttataaataatataaaatttcgtaacgaagaaacttcagaatttgagccgctttctttagaattgaaaaaacaactttatcaagaaaaattcttttttaaaagtaaaagagagtttaagtttttagaaattagaaaatttattcaacaaaatatcggttgcaatctggtgttgaattatagtcctaagatggataatatttctataccgagttgttatgtgtctgcaagattgaaagcgatatttggtgaagattggcagcattttgaaaagaaaatcgagcaaaaaaataagaacggtgaaaataaagtaataacatatagaatagaagatatttggcacattttattttcgtttgagcatgaggataattttatagaatttttagataataaactttgtttaagcgaaaatcaaattaaggaaatgattaaattatttaatgatttccctattggatatgctaatttgagtttgaaagcaattaataatattttaccctttttgcgtgaagggcatatttataccgaagctgttatcttggcaaaaattcctgaaattttaggtgaagaattctccgaaaataaggtagatatcattaaggctattgagaacgaaataagtaataatagatatgagaaaactattactacgattgcgaacaatcttatttttaaatattatgcactagattatgaagatagatttggttggaaagatattacttataaactcaaggatagtgattttaacgatgttgaaatcgcaacaaaaggacattttggtgaaaaatcgtgggagaaattaaacgaagataaacaacaaaatattttagcagaagttgtcaaaaaatatcaagcgttttttgccgatgataaaagaaagcatattgaaccactacatttggtaaaccaaatcaaagagtttttatctgcaaatttcaatattgaaaaaaaagtattagagaaaatctatcatccgtcacaaattgacatttacgctagtaaagaggatcaacgattgttagcaagccccaaatctgctgcatttaaaaacccgatggcttataaaaccttgtataagttacgggatgttattaattacttgatagaaacaaaccgtatagataatgaaacacgcatagtagttgaaattgcgagagatttaaacgatgcgaataaacgttgggcaatagaaacctatcagcgaagaagagaaactgaaaatttagaatttgcggcagcaattacagaattgataaatgataatgatttttcaggtgttgctgatccaaacagtgatgatgatattgataaatttaggctttgggcagaacagattgaaaactacggagaagtctctaaagaagttgtagcaattaataaagataaatccatatccaataaagatatacagaagtatcgcttatggaaagaacaaaattgcacttgtatgtacactgggaaaattatcaatctaaccgatttatttgatcaaaataaggttgattttgaacacactatcccaagaagtaagtcgtttgataattctttagctaatttgacggtttgctatgctgactacaaccgaaatgtcaagaaaaataaaatacctgttgaattgccaaattacgaaagtgaaggacttagctactctgctataaaaccacgattagaggcttgggagaagagaatagactccctgaaagatagaattgaaacacaaaataaaaattctaaattagctatcgataaggagaaaaaagatgatgccattcgccaaagacatttgttacaaatggaatgcgattattggaaaaataaattagaccgatttattcgcacagaagttccgcaaggttttatcaacagtcaattaaccgatacacaaattattacaaaatatgcttttcattatttaaaaactgtgtttcgtaaagtagatgtgataaaaggtgcaaatacagctgattttcggaaaatctatgggattcaaacgaaatttgaaaaaaaagatagaagccaatattttcatcacgctattgatgccgctgtcttgacattgattccccctgcgaaaaatagagaggagattttgaaaagagcatacgaatttgaagagaaaccggaaaacaaaaacaagcaatatcacgagaagcctttttcggcatttaatcattttatgcttgaagaaatccaaaaaaatattctaatcaacaatcttgcagagaaagaccaaacactcacgcctggaaaaaagataatccgtaaaagagggagagtaatgtggatcgacaaagaaaaacggatacccaaaattgcacagggcgattctattcgaggcgaattacatttacaaacatattatgggaaaataaagattgcagcaaaagacaaaaaaggaacattgttacgagatgaaaaaggtaaaattatttacaatcaaatagatggaatagatgaagtgtggatggttctgagaattttggtaactgatagtaaatttaatgctgataatattattgataatgccttgcgaaaatatgtaaaagaacaacttaaagaaaaaaaagttacagaattagtcgattttaatggtaatataattaggcatattagatgtcgtgttaaatcaggaaaaggttttatgaatccacaaaatgttacaatagttaaggaacaaacctacaaatcctcaaagaattataagagctatatttatgcagattcgggtgagaactatatatttgggctttatgaaaatatatatggcagagatgtaatttcagtcaacaaattcgaagcagcaaaatttatcagcaaactgaattttgtcgacaaatctgatttatttaagatgaaagaacctgtttttataaaaaaaacagaagcaaagttgattcatatttttgaaattggacagaaagtgattttttataaatcctcgaaaaatgaaatcaaagacttatatgaaacagataaaatagaaatttctaaaagattatattttataaaacgcttacaccaagcatctgtcggaaatatacaacttcaacatcatttggaagcaagaacggatgatgagttatcaaaaaagtttccaaaagagatgttcaattcagcggggaaagatggattttcaaaatatcaagaagattttgtagcaccacgacttctttttaagcccacaaattctaattttattatagaaggtaaagattttgaaatgaaattagatggaactatagcgtttaaattttaatcctatgataaaaaagacactttactttggcaatcctgcgtatttgagtatgcgtaacaatcagttggtaataaaactacccgaagttgaaaaaagcgagaccttacccgataccttcaaaaaagcaaacgaaaccctctttcccattgaagacttgggagtagttatactcgaccataaacaaataacgctaacacatgggcttatcgaaaaactgttggataacaatactgctctcttgacttgcgatagtagccgcatgcccgtagggctgatgctcccattatgtggaaacaaaacacaaagtgaaagatttaactcgcagattaacgcttctgaccctttaaagaaaaacttatggcagcaaaccataaaagcgaaaataactaatcaggcagaagtattgaagaagtttaggtcttgtaatatccgtaatatgatacactgggcaggagaagtaaaaagtggcgatcctgataactttgaaggacgtgctgctgcttactattggaaagaggcttttcctcagattgagaattttactagaggcagagaagagaatcctcctaataatctgttaaattacggatatgctattcttcgtgcagttattgcccgctctttagtagcaagtggtttattaccaacgttaggtatacatcaccacaaccgttacaatgcttattgcttagcggacgatataatggaaccatatcgcccatttgtagatgaattagttttctcgatagttgatagtggagaggattataccgaattaacgacttcgttaaaaagcaaactgctacaaataccaacaatagatgtgatgatggggaaacaaaaaagccccttaatgattgctgtaggtcagacaactgcatccttaaaccaatgtttcgaagggaaactacgtaaaattaaatatcccgaattattataatccgtcggtaatatggaccaagaccgattaaatcaataccgtattatgtgggttctagtattatttgatttgcctaccgagacgaagaaggatagaaaagtatacgctgattttaggaaaaacttgcagcgagacggatttaccatgttccaattttcgacttatttacgacattgtatgagtgttgagaatgcgaatgtacatattaaacgagtgaaaaactttcttcctgcaaaaggacatgtgggaatactctgtattacagataagcaatttggaatgatggaactgttttatggcaaaagtcccgaatcaaagaaaacaggagcgcagcaacttgaattattttagaaaataaaaatcccgatcaaagtcgggatttttatttgaaatacattgatttttttaatgctaatgatgtttgcaatgtattgaaatacatatacttgttgtgtggtatgatgtatttcaatgaactaagatacaattttgaaagcaaatcacaactattaactctttcctcaaaaattcactatcgatgtatttcaatgaactaagatacaattttgaaagcaaatcacaaccatcaaggaagtctttaactacagttgctgatgtatttcaatgaactaagatacaattttgaaagcaaatcacaactatagtggtctgcttttcttatttctatagatgtatttcaatgaactaagatacaattttgaaagcaaatcacaacttagaacctcatatgaataaattttcaacagatgtatttcaatgaactaagatacaattttgaaagcaaatcacaactaataaaaaataatacatatattataaaaagatgtatttcaatgaactaagatacaattttgaaagcaaatcacaacttcctgacccccgctatcctaacgagggtgtgatgtatttcaatgaactaagatacaattttgaaagcaaatcacaaccccttaaaccaaatgaattaacgaccgttggatgtatttcaatgaactaagatacaattttgaaagcaaatcacaacctgaagtgttgcagacatctggttcaaatagatgtatttcaatgaactaagatacaattttgaaagcaaatcacaacatcgccatattagttttattagcagacgatgatgtatttcaatgaactaagatacaattttgaaagcaaatcacaacgcagaagattgagaaccagcaccaatagcgatgtatttcaatgaactaagatacaattttgaaagcaaatcacaactatgtttttggttcatctttataagttaatgatgtatttcaatgaactaagatacaattttgaaagcaaatcacaactaaaattggaacaccatatttaggaagcaagatgtatttcaatgaactaagatacaattttgaaagcaaatcacaactacttgactgatataaaaatattccttacgatgtatttcaatgaactaagatacaattttgaaagcaaatcacaactatgtgtcccgaaagccagcacttggtcatggatgtatttcaatgaactaagatacaattttgaaagcaaatcacaacatggtaatggttcgtcttctgctggtaatgcgatgtatttcaatgaactaagatacaattttgaaagcaaatcacaacacatcggacttgtaccattttttaaagatagatgtatttcaatgaactaagatacaattttgaaagcaaatcacaacgcggtcgtttgctgtttgttactgatttccgatgtatttcaatgaactaagatacaattttgaaagcaaatcacaacatgtgtcccgaaagccagcacttggtcatggatgtatttcaatgaactaagatacaattttgaaagcaaatcacaactgtcattatccagttattttgtaggagctggatgtatttcaatgaactaagatacaattttgaaagcaaatcacaacattatgtcgatatttaattcaatcccggctgatgtatttcaatgaactaagatacaattttgaaagcaaatcacaacaaagactcttcaactttactaaataagtatgatgtatttcaatgaactaagatacaattttgaaagcaaatcacaacatacttgactgatataaaaatattccttacgatgtatttcaatgaactaagatacaattttgaaagcaaatcacaacatgtatcccgaaaacctgcccttggttatgatgtatttcaatgaactaagatacaattttgaaagcaaatcacaactattgatcctagatatcctggtgaaggtgtgatgtatttcaatgaactaagatacaattttgaaagcaaatcacaacaccgtcgtagttataagatttctcgtggaggatgtatttcaatgaactaagatacaattttgaaagcaaatcacaacagatgaaccaaaaacctatgttaaagaacagatgtatttcaatgaactaagatacaattttgaaagcaaatcacaacatgtggaataagcagaatgattataataggatgtatttcaatgaactaagatacaattttgaaagcaaatcacaacatatactttctcgcacaactggagagatgtgatgtatttcaatgaactaagatacaattttgaaagcaaatcacaacagggtgaagctgattttcagactgctgatagatgtatttcaatgaactaagatacaattttgaaagcaaatcacaacagttgttcaaccgtaaaaaaaagaaataggatgtatttcaatgaactaagatacaattttgaaagcaaatcacaactttctttcatgtcgattgtaccccaaaattgatgtatttcaatgaactaagatacaattttgaaagcaaatcacaaccagtggaacgataagtgaatctaccatttggatgtatttcaatgaactaagatacaattttgaaagcaaatcacaacctactcttgttcgagaagttattccaggtggatgtatttcaatgaactaagatacaattttgaaagcaaatcacaacctatccccgcgcctaaggcgaaacgaagtagatgtatttcaatgaactaagatacaattttgaaagcaaatcacaactaaagttgaatatgttctttaacataagttgatgtatttcaatgaactaagatacaattttgaaagcaaatcacaacatgtttcccgaaaacccgcccttggacattgatgtatttcaatgaactaagatacaattttgaaagcaaatcacaacatttggtttaggggataaatcgtcaagattgatgtatttcaatgaactaagatacaattttgaaagcaaatcacaactgactttctacctcatgaaaaagaaactattgatgtatttcaatgaactaagatacaattttgaaagcaaatcacaacaccattgttgaatatacttttgctggaatagatgtatttcaatgaactaagatacaattttgaaagcaaatcacaaccagcggaacgataagtgaatctaccatttcgatgtatttcaatgaactaagatacaattttgaaagcaaatcacaactggatctgagttttttaaacataacactaagatgtatttcaatgaactaagatacaattttgaaagcaaatcacaactatctttcagaagctttacttctttgtcggatgtatttcaatgaactaagatacaattttgaaagcaaatcacaaccgggaacctgaacagtattacccatagagggatgtatttcaatgaactaagatacaattttgaatgcaatttgcaattgatggctcaagatatattaagcagatagtcttgtcgctaacttaatagtacattgttagtatgcgagtactctattgaaaaatgtatctattcccaagcgcgtattgacgataatttgtaatgttcttattgtccgtaaatagcagacgctatagtagtagttctttatataccgatctcgacttctatagcacattgtctatagcaaatcggtttacagaagcatataatccttcagcttgatgcgaagtatttttaaagattttgttatgcgatattccaccgtttttatagatattccgaggtttatagcgatctctgcatttgtattttctccaaacctgctcatttcaaagacttctttatatttttcaggcaattctttaatagcggactgtattttgattgccagttcttctaccatgtaataatcggggtcttcgaattgctcttttaatttttcatataatattgcatgtactctttttctatattgctcattcctgattgcattaaaagtgcgatttttggcagcaacgaacagatacgatttaagggacgtttcgacagccagatatttccttttctcccatatatgcaacatgagatcttgaactaattcttcagcctcaacgtcagagataaattgtgaaacatattcacaaagaggtgaatagaacttaataaacatttctttataagccctagtatccccttctaaaattccgtttagaagcaattgttcatccataatatttaaggtgcgggcaaaggtaattttttcatcaataataagtatataaaactttcaagaaaagtagggccattaaaattaataaaaaaattgatttgtagtttagggtggtgcacaatatatgtgtcgtatatatagaaacatgtagtgaatagacttatagaaaaatggaattaaacgaaaaatcatatattgagataccagatgagtcgttgctccttagatatattaccggagaagtaacgcaagaggagaatttattggtcaaagaatggagcgggaaagatactgcaaatgaagagctccttattcagctggcacgtatgtattatgctcaaagaacacaacagcggattaagaatcgtgatactgaagccgcatttcgaatcgtaaataataaaatcaagaaaaaaggaaggcgtttattcctccagcaggttggcgtagcagcatctttgattataggtattctgggtataggttctttcttctttcaatatctaggcttgcgcgagagcttccttccgtctatgattacagtagaatcgaatgataactcccgtactcgtctggtgttacccgatggaaccgaagtttgtcttaattcgggaagcagcatcacatatccgtctcattataccgatggtgaacgaaatgttactctctcaggtgaagcatatttcaaagtgactcataatgagaagaaaccctttgttgtgagtgctctggataagaagtataaagttaaggtgctcggaacagagttcaatatgcaggcgtatagagatgacaatgttattcagacaacacttatagccggaagtgttcaggtcgatattcaggggaggaacacgaagacggttttgttgccttcgcaaaaagcaatctactccctacataataacgaattggaggtagtaagtgctaatacggatagagagacagactggatgtatagccgtttggtattcaaaaaaacacctatgccggaggtactggcgcgattgtcccgtttctataaagtagagttcgatgtgagaaataaaatcatagatacttatacatttaccggaaccttcgaagacagacctttgtatcaggtgttggattatatgaagatatcatcacaaatagattataatataacttatcagaaagatgaagaagggactaaatctgtcgtggtattgagacgatagaacgaaaagaaaacaactcggatatctttcaaaatcaactaaccttaaaatttaacagcctatgaaaaaataaccagaagaaatctaataaaaaaacacggaaacatgttaccagcatatttccgtgctaaaaaacaaatctgaaaaacaatttattttttacttaaagcataacaaaaatatgagaaaaatccatcatctccaacaaccttggagatattgtaaccgtttcctcgagttacacaaaattcctcttactatgaaattatcgttgacattacttattctgtcaattaatgtctcttttgcagcccattcgtatgctcaacaagtaacattatcccttgacatccaaaacaagaaagtcgttgatgttttggacgaaatcgaaaaacagtcggaatttcgattttactacaataataaactggtcgatgtagatcgtacggtatctgtaaaagtgaagaagaaagccgtgttttctattctggacgaattgttttcaaattacaatgtagagtacaaagtaattgataaagatattatccttactgaaaaaaacaagggtgaaaataagacccgcgaagcacatcagcagcaaatggatataacgggtatagttacagatgcaaacggagaagtattacccggggtaagtgttgtcgtgaaaaatactacattcggtacaattaccgacacagatggcaagtataccataaatattcccgacagaaatgctgttctgatctattcgatgataggttttctgaaatatgaagagcctgtgggtaatagaaggtctataaatatatcactgaaagaagaaatccgcgaaatggatgaggttgttgtgataggttacggaactgtaaaaagagccaatctgggaggagctgtcgctacagccgattcgaaagtattccagtcccgtcctatccaaaatgcagcctcagcactccaaggcgaggttccgggtcttactgtgatacgtacaagtggggcccccggaagtagtccggttttgcgtgtacgtgatatctcgtctgtcaatggaggagctccgttggtattgattgatggcgcagaaggagatttgggtacaataaaccctgccgatatcgagaatatatctgttctcaaagacgggacagcagctatctacggggcgcgtgctgctgacggggttgtactgattacaacaaaaaatgcgaacaggaaccaaaaattaaaggtaaccctcgatgcatattactcgataaagaaaccggcactgttgaaaaaacctgccaatctttatcagcatgctgctatggctcttgaaatcacagacggcagttttcctatagaatatacccaagatgaattacaactcattcttgagggcagcgataaagttattccagccggaacaacatggggacgctggggcaatgcatatccaaaattctacaaagaccagaattggaatgaacatattataggaaatggcaatattcagaattataatgtcagcttttccggagggggagataaatatacatatctcatttctttgggctaccagaaagaagagggactacctaaatttggaatagattcggacaagcgttattttgtgcgtgcaaaatctaatatagaaatagtaaaaaacctcaactatgaccttaatatatcctatgaggctagtgatagggattactcttccagtattagtcagggacagaatatatgggagttgatatacaaaactcgcagttgggcacctgtatacaatccggcaggaaatttctatactttcgaaggttttgacaatccggcacaagtattgcaagatggaggagagtctcgtcgaacagccggaagctttacgttcaacaaccaattgcgttggcaggttatagacgggctaaaccttgcagggcgtgctatagttcgcaagagcgatgcagatgagtatatcgtccagaagatgctttacagctacaattgggaaaatgtaaatcatcggacggcaagaaagcccaatagcgccgagcgtaattatgccaaaacgttgtctaaaaactttacattgtatggagaatacaaaaagacatttgctcaaaaacatgatataggtataatgttcggagggtctcatgaatctgccgactatgacaaattctgggcaaagcgtatcaatttcgatcagcaggaacagatgcctatcagcatgggtagccccgaagatcaggatgcagctagtgatggtaacgcatggaccattaactctttcttctcgaggcttaattatggattcgctaataagtattttatcgaagctacattacgtggggatggttgttctcgatttgcgccgggtgaacgttggggatatttcccgggagtaaatgcaacatggcgtataggtgaagaatcatttataaagccgctaaatgttttcgacgacctcaaattcagggcttcctacggaaaaatgggaaatcaatctaatataggcccttatgattttatcgaactaattaatatcaacagaaattattatccgttcggcaatggggcaaaaggtcagatggcgaatcagtcgaatctggtttctacttcccgtacatgggagactatcaggtctgtaaacatcggtacagatttcagttttctgaataacagactatacgggtctttcgactacttctggaaaaccaatgagaatatgttgatttccattacttatccttccattttggggattgcagctccttctacgaacagtggagaactgaaaatccacggttgggaaattatattaggatggagagaccagatcagtgatttcaaatattcggtaagagcgagtttaagtgatgctcagaatgaaatagccaaaagaatcgggaactctataataggatatggaaataataggacacctgtaggctatccaatggattcttatttcggatatgtatttgatggtattatccaaaatgaacaggaacttgccgaatacaagtctcgtttccataatagcggaaccgtacaggataaaaggatacaagtaggagatgccaagtataaagatctgaacggcgatggtaatctgactgaatatgctgatggcgatggcgaccttgtttatttagggaatactaatccacggtacaacttcggattcaatatcaatgctgaatataaaggcttcgacttaggtgcattctttcagggagtaggcaagcgcacgatgttcctcgaaggagatgccagtaaaccgtttaatgcaccatggtatcagtcg

SEQ ID NO: 4031 - DNA, 24143 bp, synthetic construct
  source 1..24143: mol_type = other DNA
  misc_feature 1..24143: note = Synthetic
cagcgttccaaaaaatcatccgcacaaaaagtttatgactgggttgttttagaggaaaaagcagaatcttttgtagggtatgatgtcctggaaactgaaacctatattacaagataccggaaaattgaaaataaagacggcgaattttatcagatcgtgctttccaaatcgccattttatcctgaaggtggcgggcaagtgggtgacaagggaattttaattccaagttataccgcaggttttgatatttcaaatccaagcgtttttgatattacagactgttcagaaatcatcgaagtgctggaaaccagaaaagaaaataatctgatcgtctctttaattaaagatttgccgaaagatgcaggtgcagttttttatgctaaagtaaacgaatcggaaagaagaaatacgcaggcgaatcattcggtgacgcatttgcttcacgaagcgctgcgcgaagttttaggaacacacgtggaacagaaaggatctttcgtaggtccggattatctgcgttttgatttttcccatttttctaaaatcagtgaagaagatttgaaagtggttgaagaaaaggtgaatgcaaaaatcaaagaaaatattgcccttcaggaattccgtgaaatcccaattacggaagccatggaaaaaggagcaatggcacttttcggtgagaaatacggcgataaagtaagaatgattcagttcggttcttccaaagaactgtgtgggggaacgcatgtgaaacatacgggagaaatcggtcattttaaaattcagaacgaaagttctactgcagccggaatccgcagaatagaagcgatttccggagatcagtctgcggcttatttcaggaatttggaaacccagctgaaagagatttcttctttattaaagtcaaaagagcttacgaaatcagtggagaaactgatcgaggaaaatacttctttaaaatctgaaatagaatctttgaaaaaagagaaagcaaaatctgaaacgtcgaactgggccaatgatttcgttcagaaagaagataaaaaattactggtgaagaaagtttctctggatgccggtagcgtgaaagatattgtgttccagttgaagaaagatgttgcgaattcagtgattatcgtcctttctgatgcggatgggaaaccgatgattaccgtaagcgtatcttcagatttagaagcaaaataccacgcgggaaatatcgtgaaagatttggctaaggagatccagggtggcggcggcggaaatccgggctttgcaacagcaggtggaaaaaacctggatggaattgaaaacgcttatcaaaaagcactcgctctgtaaaaaagcaacagaaattttaacataaaaatcccgaaaactttacaatcttcgggatttttgttgatgatgaggtcgtttatttgtttccgccacctcttgcaaccaatgcaatgataacgatcagtaccaatgcaccgactacccaaaccagtggattactcatccagtctccgcccatcgcgtcatttcctttgttcacatctacatccacttttaaatcggaagctttttcctgcgcttttaccaaaactacggcaaagtttgccatcactgccaatgcgaaaatctggatctttgagaataaattagtacgtgtcataattttaattttttaatgttaataaaattaacaattctaaaatcgtaccaaataaaaaaagctcttattttttccgggtgaaaatgaggatttaaaaccggtattccattaagtaatcatccattacataaccgtttccgatgtcaaaaataccttctgcaaataccgaaaatccttgcgattcataaattttttttgcaggattatctttgttgacgttcaggataattctcctgtctgaagtttctgcgactttttcttttaagaaattgatggcttttttgccgagaccttttcctttgaattcttctaaaagataaatgcggtggagtttggcagtgtctttttcataatgaaattcgaaaccgataaatccggcagcgctcccattatttaaaatgaagtaatagtgataatttggatttttgagctgatcagagatttcctgatgagaatacatttccttcaacatataatcgatctgatcttgcgggagaatgtttctgtaggctgcattccaggatttttcagccagttgctgaaaaagaggaatatctttttccgctgcttttataaattcaaccatgaggttttattttttaattaactcaattccagtaaggttatttcaggatcgatgccgactcttccgggataaccgatcacgccaaagccccggttgacataaagcgattttccattgctttcatataaatctgcccattttttataacggtactgcaccggagaccaacggacgtttttcagatcaagcccaaactgcatgccgtgggtgtgccccgaaagcgtgagctgtacattggaaggatgattttttacgatggcatcaaaatgcgtgggatcgtggctcatcaataatttcgcagcttcggcagggatcccataagacgctttatccaaatctccatattgtggaaaaggtttttcgccccagttttctacaccaagtacatacagtttttcgccgtttttctcaatgatccgatgctcatttctaagcatttcaaagccggcctgtttttgtaattcaattaaattgggaatgttctgtgctttttcggccgctgaattccaggtaccgtaatcgccgtaatcatgatttccgagaattgaaaacttgccgtctttcgactgtatgctttggaataagtccacaaaaggtttaaactcgctggcgtaattattgaccatatcgccggtaaacaggactaaatctggtttttgctcattaattaaatcgatggctttctgcagtttttcgggacggagaaaactgccggcgtggacatcggaaatctgcacgattttgtaaccgctgaaacttttcggcaaacccgctatctttaatttcacttttcttatcgaatgcctgtattttccaaaaacaatcccatccagaaataaacctgaaagcagtgctgcagttcctattccgacgatacttaaaaatttcctgcgttcgggaatgtgattttcggccgtgccaaataattgaacggtatatttaattccccgtccgaaatcttcgatcaaaagaaagaaaaccacaaaaagtttgggaagtaaaaaaactaaaaataccgaagcgacaatctgtacctgctgatgatcgcgttctgtacgtttgaaattaaggacttcataaatgaaaaataaatacaccaaaaccgtaatcacccaataagcaatccgaagggaattattgtttgtgacggttttaaaagcctgataaacataaaattcgagggcgaataaaattcctgtaattattaaaatatttctttgcatcattttttagatcaataaaaaagcacaaaatgtgttttgtgctcttctttattttgtgacttgttaattaaggaaaacggtaaacaatcgcgttgatgttcattccggctcctaccgaagtgaagacgatatttcctttttctttgaatgattgcccctccatttttcctttcctaattaaatcgaacatggttggtattgtagccacagaagagtttcctagatattgaatcgtcattggcgaaaccgcgtgatcgtaatctgttctgccgtagagtttaaacaagcgggagatcatggcataatccattttggcatttgcctggtgaattaagattttatcgatatcgtcgatggttaaatttgctttgtcaatggtttctttaatcgcatcaggaacatttttcaaggcatattcgtagatttttctaccgtgcattctgatgtataaaggtctgcggtcttcatctttttttaaggaaggtgcattttcgagatagtttaattccggtccgttatcacaaatggttgaatcggcaatgattcccacggtttcatcgtcggttgcctgtacaacgaccgctccggccccatcggcaaaaatcattttgttgcggtcaaatgcgtcggttacccggcttagggtttcagatcctaccaccaatattaattttgcttttttagctttaataagcgtatctgccaaaatcatggcttctacccaaccggggcagccaaaaatcatgtcgtaatttacggttcttctgtttttaatgttgagtttgtttttcactctggaagacatcgaaggcatgaagttggtcattccgttttggtcaacttcaccaaaattactggcgtaaataatatagtctaaatcttcctggtctatttttgcgtccgcgatggcttcttttgccgcgcggtatcccaaatcagagttaaattcgtcttcttccaggtaacatcgggtttcaatttcggtgatttctacaaatttttgaatgacttcttcattaggtttgtcgattttctcaccttcgtcggtgtaaaaaacagagtccatgaagtattctttaccgattaccttagtaggaatgtaacttcctgatccgattatgattgtattgggcatataatgatatgaaaaatttagggcaaatttaagaattattattgtaccgtagtaaaacaaaattattattaaatttgcaaaagttttttcaccacaatattttatatgaaaatcagtgcatctaccaaaggtttaattatttcagtcattactgtattggtcgccttcgggatttataatttctttttagcgaaaaaaaattattacctggtggataatcccaccgaaaatactttttattttactattaataacgggaaagaaaacattatttcggcagggcagaaagtgcatgttgatttaaagaaaggcaaaaacgagattaaagtttttgacggtcaaaaaaaattgctgtatgattcaggttttgtggtgaataaaaaccgcggcctgctgaatatcgctcaccgggattattatatcaacgaacagttttatggctatggattaaataaggattctttgatcgcggcgagaaaacaaaccaatatcgacgggaaattatatctgaatgctcccgttcattttaataaattatataccgatgctttttattacaatatcgacgaaaagtacgatggagtagtaaaaaacatccagaaagtagaatccagaacaaaaattttccggaaagaagattttttgaattattataaagaatattatcaatttaaataagacaccttgaaccaagttaccccttacaataccgaagccggcaagaaaaaagaagtcgaagatatgttcgacaatatcgcaccgaaatacgatctgctgaatcatgtgctctctatgaaaattgatgttttatggagaaataccctggtgaagtggatgaatgctgatcagccgaaagaggttttggatgtggccaccggaaccggagatttagcaatcgccgtacaaaaaggaaccggtgcaaaaatgattggtttggatctttcgcagcaaatgctgaacgtagggatagaaaaaatcaggaagattaatttgaccgaacaaatcgaaatgatcaaaggagatgcagaaaatcttccttttgaaagcaataaatttgatgcggtttccgttgcatttggagtgcgtaatttcgagaatttagaaaaagggctttcagaattgaaaagggtagtgaaagagggaaagagcgtttatattctggagttttccaaagtagaaggttttttagctccattttatatgttttattttaaaaatatcttacctcaaatcggtaaattggtttcaaaagataaccgcgcatatacctacttgccggattctgtaaatgcttttccttttggagaaaaaatgaaaaccattttattaaatgttggatttcgaaaagtagaatacaaaaaactaagtttaggaatcgcaaccatttataaggccaccaaataataatatgttgaaaaacttttttaaaacgagcatcgttgctgccttttgttttgcaacatttagcaatgcacagttgttccggaccaaagacaggatggatcatctggaaggatttgatgagcagaaattcagttatggattttacctcgctgccaataatttcgattacaaactggttcttgatcctaagttcgggatggatgggcaaaagaatttggtacagaccaaatctgcctatagtttcggtgctggtttaatcgggaagttaagattaagcgattattttgatttaagaatcgaaccgggtctgcagttcgtggaacgcgaaatttatttcgacacacagtccaacgatcagtttgcggcagggactccggccaaccaaccttttgcgccgagagttttaacggatgctgataaattaagaactgtaaaatcaacttacgtagatattcctctgttaatagaggttcacggtgaccgttggtataattcccgaccttatgccgccaccggggtcaactggatgatgaatctgcaatccaacagcaaggcagaagacgacaatcagcaggggattttccgtaccacggggagtaatctggcctggtcggcagaagtgggaattcagttttatttcagcaggtttaaactgacgccgggcttcaggggaacctttatgatcaataatgaatctgtggcagataatgccgaaacgccgccctactggtcatcagcaatctcgagtgcgaaaaccagagcgttcatgtttgtattgaaatttgaataaaaaagggatggttttttaataacagggagaaggttctaagactttctcttttttatttcgcaatttctaaaattagtactcaataagttatactttcaaattaattttttatatttttgctacagagttagaataaattaacctggagaaatgctcaaagatttagaaaataatttttcgcttttagaaaagaagattttggcggtaaaaaaaaattacgagaatcttaacgaaaaatatatcgaattaaatcaggagcatgaagagctgaagatgaaatacgaagaggaaagaaaaagaaaccaggttttagcagaagaacaaaaagatataaaactttattcagcaatatcaggaaatccggatcataaccgattgatgaagaaccatatcaaccggttgatcaaagaagtggattattgtattgcggaacttcaaaacagtggattgtaatggatgtaagaagaataaccatcaccattgccggcagaagttatccgctgaatgtaccctccgccgaagaagaaactttgcgcaaagtcgggaaacagattgaagcaatgattaaagattttgaacagaattttgacgttagagataaacaggatgctttggcgatgtgttgcttaaaattaggaaccaacgctgaagtggcacagatcaacaacgataaaaatataaaagattccacggagcggttgatgaatatcaatcaatttttggaagagttggaaaagtagatttttctttttcactcaacaactgcctacaatagttctaacacattacaggtaaactcaacgcaaaactattaccgaacgaaagtttatttaatggcgtgccgacatgctcggattacagaaaataaaaaacagttcaaatcgtgttgattaggagtttactctaaatccgtgaactgttgtaggtttttttttaacccataatcaaggtcgaaaaggttttaaattgaaatgattttgaatctaacggcttgatttttaacaaacttaatattaaactaaacatatatgacaacaatcaccattattattatcggtattgtttgcttggttgtaggagcggtaattggaatggttttttccaaaagtgctcttaacacaaaagcgaaattcatcgtagaagatgcaaagaaaaacgccgagaaccttatagaaaaagccaccgtacaggcagaatccattaagaaagaaaagcattttcaggccaaggaaaaattcatggaactgaaatcgcaacatgacgcagacattcagtcaagagaaagaaaaatgcaggattctgaaaaaagaatcaaagacaaagagcagaaacttaatgatgaattaagcaaaacaggcaaactggagaaagacctcgaccgtcaaattgctgattacagtaaaaaacacgaaattctcgaaagaaaacagcaggaactggatgcggttacggcacagaaagtagaaatcctggaaagaatctccggatattctgccgaagatgcgaagaacgaactggtagaagctttgaaagcagaagccaaaacaagagcgcaggcacatgttcagaacatcatggcggaagcgcaactcaacgctaaacaggaagctaagaaaatcgttattcagaccattcagagaatcggtacagaacaggccatcgaaaattcggtttctgtattcaatatcgaatctgacgaagttaaaggaagaattattggtcgagaaggaagaaatatccgtgctttagaagcggctacaggagttgagatcatcgttgatgatacgccggaagctattttgctttcatgcttcgatccggtaagaagagagatcgcaagactgtctcttcaccgattggttaccgacggtagaattcacccggcaagaattgaagaagtagtagacaaaaccaaaagacagatcgaggaagaaatcatcgaagtgggtaaaagaaccgtcatcgatttgggagttcacggacttcaccctgaactggtaaaaatcgtgggtagaatgaagttccgttcttcttatggacagaacttattgcagcactcgagagaagttgcgaatatcgccggaacaatggcggcagaattaggccttaacgttaagttagcgaaaagagccggtttgcttcacgatatcggaaaagttccggaacaggaatcagaattgccacacgcccttttgggaatgcagtgggcagagaaatacggtgagaatccggaagttgtcaacgccatcggggctcaccacgatgaggttgaaatgaccaccttattatcgccgatcattcaggtggccgatgcgatttccggagctagaccaggcgcaagaagacaggttttagaatcttatatacaaagactaaaagacctggaagcagcagctctaagtttcgacggtgtttcaagtgcttatgcaatccaggcgggtagagaacttcgggtaatggtagaaagcggaaaagtgaatgatgaccaatcggcacagctttcttatgatatctcagagaaaattcaaaacgaattaacgtatccgggacaggttcgggtaacggtaatccgtgaaaccagagcggtgaatattgcgagataaaatttcgtattaatgatatataaaactcctttcagtgatgaaaggagtttttttgtgattaaaatagtaatgaaaaataatctatttgccaatttttctttttgccgaaaaggtcattgtttgcctaaaaaaaaggcccgaaatcaggtttttaggaagtgtctttctaatctttagaaggctgagtttttacaaatttgttttggagagaggggctgctaaatgttttagcgtattaatttccatgtggtagtaaaatattcagacaaaaaaatgccccgaagatagtcgaggcgctaaatgttttcacaacggaataatccttattgtgaattgctttcaaaattattgagacaaatgtataaaaattatttattgccctattacggatttccataattttctcttaattctttttattatattagggaattgaaaaaaataactatgaaaaaagcaatgcttccggtaaatttggaaatcgtcttatcatcaataaaaaatcccacggagtacgcaggattgagtttttcttcggcttatagccttgttgtgaattgtctttcagttgcaaatatataaaaaataattaaaacgaaacaaaaatgaataaaattttaggtgttgatttaggtaccaattcaattgggcttacattaagagtcggtgatgtgttttcatggtatgaagtatacacttttaaaaaaggggttggagaagggaaatccggcgaatattcatttgcagccgagagaacaaaacatcgttcttcaaggaggctttacaatgcaagaagatataggaagtggaaaactcttaaagttttaattgaaaataattattgtccattatctatagaaaatttaaataaatggaaacattatgaaaaaggcttaggaagaatttttcctgtaaatgatgaattatttcaaaactggattaagttggactttgataatgatgggattccggattttacaagcccatatcaattgagaagattattaatcaccgaaaaattaaatttatcacttcctcaaaataaatataaagttggtagagcattatatcatattgcgcagagaagaggttttaaaagtagcaggaaaagtggagctaatgaaaaaactgcagtttataaaggaagtactgaaaccaagactatcggaagaaatgaatatgaaaatttaattattgagaatggaagcttaggagctgcttttgcgtttttagaagataacggaatacgggttagaaacagatatactttaaggtctgattatcaaattgaagctaagaaaattttagaatttcaaaacattgacaatcttcagtttcgtgaagatattgaaaaagcaatattttttcaacgccctttgcgctcccaaaaaggcttggtggggaagtgtactttagaacctaataaagcccgttgtccaatcagccattacaaatttgaggagtatagagcgtggtcttttattaataatataaaatttaaaaacaaagaaacgaatcaatttgaatcaataccgctagagcttagacaaaaattatacaacgaaaaattcttctacaaaagtaagagagattttcagtttagtgatgttagaaaatttattaaggaaaatggtggtaaagaatgggaacttaattattcggccaaaatggatgaaatttctattccgagttgttttgtttcagcaaggttaaaatctgtgtttggagaaaattggcaggactataaaaaatcaattaaaaaaatcgataagaaagggaaggagtatgatgtaaattatactattgaagatatttggcatattatgttttcctatgaagatgaagaggtttttgaagagttcctcgtgagtacattagaattagatgaaaaggaagttaaagaattagtgactatatttaatcagtttcctattggttatgccaatttaagtttaaaagcaataaacaatattttgccttttttaaaacaaggaattatctattccgaatcagtaattctagcaaaaataccggaaattatcggcaaggaattatttgaacacaataaagaagaaatcttagaagcattgcggcaagaagttgaaaacgtacgagaagaaaaaacaattgtcaacattgctaataatttgatttttaagtattatgcattggattgggatgaaagatttgcttggaaagatgtaagttataaactagatagttctgatttgaaggaggttgaaaaagcaactatagaacatttcggagataaaacctggcagaaactggatgaaggctccagaaaaaagatattatcagaagtaacaattaaatatcaagacttttttgcttcgtcaaaaagggagcatatcaaaccacctcatttggtaaatagaatttgtgcatttctaaagcgtgcgttgggtgtttcagaagaaaaattgagcaaaatttatcatccctcacaaatcgatatttatcctaaaaaagaaggacaaaaatatttgttaagcccgaaaacagcagctttcaaaaatccgatggcttacaaaacattgtataagttgcgcgatgttattaattatttaattgagattggaaaaattgatgaagaaaccagaatcgttgtagaaattgcaagagatttgaacgatagcaacaaacgctgggcaatagaaaaatatcaaagagaccgggaagctgaaaaccgagaatttgctaatgcaatatcagagttaattaatgatccggaattcaagggaaatgcagatcctgcaagtaaaaaagacaacgaaaaattcagattatggattgaacaaactgacaatttagaagaagttctgaaagaaattcaggtaattgataaaaataaaaatctatctgtttctcaaaaagacattcaaaaataccgtttatggaaagaacaaaattgcacttgtttttacaccggaaagatgattagattgacagatttgtttgataaaaacataatcgattttgagcatactattcccagaagtaaatcttttgacaattcattagctaatctaacggtttgctatgcagattataatagaaatattaaaaagaatcaaatgccaactgaattgcctaattatgaagaagaatcaaatgggtattcggcaataaaaccacatttgtatttgtgggaaaagaaagtagaagatctgttcaagcagattgatttttggaaattcaaatccaaagttgcaatagataaaatggcaaaagatgaagctattcgtcaaaaacatattcgtataatgcaatatgattattggaaaagcaaattagatagatttacaagaacagaaattccgcaaggatttgtcaatagccaattaaccgatacacagattattacaaaatatgcttttcattatttgaaaaccgtttttactaaagtagatgttattaaaggctcaaatactgccgaatttagaaaaatatatgagattcaaccaaaagatgaggtaaaggatagaagcaagcattctcatcacgcaattgatgctgctgttttaactcttattccttctgccaaaaaacgagaagaaatactgaaaaagtcttatggatttgaagaaaaatattttgataaacaataccacgaaaaaccatttcttggatttaatatttcgatgattgatgagataagaaataacatacttatcaacaatatggccgacaaagaccaagttttaactccaggaaaaaagattgtaagaaaaagaggaaaagttgtttggattgatcaaaaaaataaaattcctaaagttgcacaaggagattctgtgaggggcgaattacatcttcaaacctattatggaaaaattaaaattgcggcaaaagataacaatggttcattattaagagacgaatcaggtaatgtaatctataatcaaacagatggaaaagatgaggtttggatggttttgagaaaacctattgataaagtaaattttggttcagatataattgttgattttcatttagcagaatatctcaataaacaaattttagatggcgtaaaacaactagaattacaggattttcaaggaaaaattttaagacatctacgatgtagagttaaagcggctcgtggatttatgaatccggacaatgtaactgttgtaaaagaacatgtttataaatcttcaaaagattacaaaaattatatttatgcagattccggcgagaattatatgtttgggttatatgaaaatgaaaaaggagaaaaaaatataatttcaattaataaatttgaagcttcaaagtttgttagtgccttaggaattcctgaaaataaagaagaagtatttaaacagaaagaacctgttttaataaaaactaaggaagctattctaattcaccttttcaaaagtggacaaaaagtaattttctataattcattggaagaattagaggatattaaaaaaactcctgaagaaatttcaaaaagactatattttattaaaaggctacaccaagcttcagtaggaaatatgctttttcaacaccatttagaagcgcgtacagatgaagaattaataaaagattttccaaaagagatatttaaatcagctggtaaggatggtttttcaaaatatcaaacagattttatagctccaagaattttgtttaagccaactacccctaattttatcattgaaggtaaagattttgaaatgaaattagatggaaccataaattttaatttccgatgatcacccgctccatttacatcggcaattccgcatacctcaagctcaaagacgagcagatgtacattctttgtccggaaaccaaagaagtgaaaggcaaagttccggtggaagatttggggcttttgatgctggatcactttcaaattacgatttcccatcagctcattcagaaaatgatgggaaataatgtggtcatcatcagttgtgatgcgcaccatttgccgcacggcatcatgttgccgttgtacggtcattcgcaacattcagaccgggtgaaagatcagctggaagccagtgaaccgctgaaaaaacaactttggaagcaaaccgtagaatgcaaaattgaaaaccaaaaggaagttttaatccgtttaggaaattatcatgaacccatgaccggttatcaaaacaatgtcaaaagcggtgatattaccaatatggaaggcattgcagcacaacattactggaaatacctcatcagtttagattttctgcggcagcgttttggcgagtccccgaacccgttttttaatttcggatatgcggttttgcgcagtattgtagcccgtgcgattgtagaaacggggctgcttccggtgttagggatttttcataaaaacaagtacaatccttattgcttagcagatgatttaatggaaccttaccgcccttttgtagattggctggtgatgaattggcttacgaaaaaccctgattcagaagagttgaccaaagagtttaaagcgcatctcctgcaaattgcaaccaaagatgtgttgatcgatggcaagagaaggccgctgaaggtggctgttaaaacaactgcaagctccctttataagtgttatactggagaaaagcggttgatagattatccggaattaatatgaatgccgagaggtttaatgcctaccgaattatgtgggttttagttttatacgatttaccgaccgaaaccaaagccaatatgaaagacgcgaaccgctttcgtaaaggtttgttggatgatggatttgcactgtttcagttttcgatgtatatgaggcattgtccgagtcgggaaaatgctgaggtacatattaaaagggtgaagtttatacttcctaaagcaggcaaagtggccattatgtgcattaccgataagcagtttggtgatattgagatcttttttgccagaaataaagaagaaccgccgccaatgtaccaacagctcgaattattctgatttattcatatagaaaaataacataaaaaattgactttcagttatttatatttattttttttcgtaacttattggtagctagcttaataatttataatgaaaaaaatactccacaaacatttctgaccatcaatggcaattggtttaatatcattagagcaaatgggcaaatgtggaaaatttcgatcttcttctttccaaattgcggaaaaaaatcagattaaagagaaaccaaaacacggagccagatttagaaatgatggacagccagcgtgtaaaatgggaaaaaaccgttctttaagtattttcatggtttgatcatgacagaagttgcggtagaaattatgaaatcgtaatggcaacctctgaaaatagggtcaaattatccgcgataaaatttttattaaataaaatttaaacaggctcttattatactcttcatattttatagtaacctttggaaaattcaccgcggtgaaaataataaaacaccgcggtgatttttcgaaaagaccgcggtgtttattaattttaggttttaaaaaataaatagatatgcctgcaaaaatttattaccaccaagaagacggttccttccggatcggaaatgaaagaactgtattgtgccaccctagtgaaaaaccgggaagtgacctccacgaaatcgctgaggccctgtccgaaaacagcaccctgaacccagtagactgctacggggtgatggtaggcatggccgcgcagattgcaaaacacctgcaggagggaaatgttgtgaacattgaatttctaggtactttcaggatcagggccaaatccaccgcggtggaatctccggaactggtcaccgaaaaaacgattggtaaaccctcggtcaacttccgcccctctgtcctgatgaaacagcggatttccaaaacacagttcgtccctaaaaaatagattatttcccaataactgcctgtttgatattcccagttttacaggaaaagagaaatgctgccactaattccgttaaaaagttttgcagcgggctgacgcattgtgcaaaagaagtgggtgtcgcaaaaactaacattaaaaaatagctttatcattttagtatcttgattttttttggacttctactttcgattttaaaatccaggaaagaataacaggctaaaataaaactttagcaaggaggaatacttcactttttaaatgctataaaaacaaataatctactgaaaatcagcagattattatttgaggttgttcctcgtcacgaagataatgaaatttgaaagcaattcacaaccattaaatgtttcttcaacttgttttccgtgttgttcctcgtcacgaagataatgaaatttgaaagcaattcacaactcgatgaacttctgtaatttgaaaaattcagttgttcctcgtcacgaagataatgaaatttgaaagcaattcacaactaattgccgagaacttcccattcataacttgttgttcctcgtcacgaagataatgaaatttgaaagcaattcacaacttctgttgattatttgtttttcgctcaggagttgttcctcgtcacgaagataatgaaatttgaaagcaattcacaactatacacaggttggagcatattcctcagatgttgttcctcgtcacgaagataatgaaatttgaaagcaattcacaacataatattaataacggaagatatatgacaggttgttcctcgtcacgaagataatgaaatttgaaagcaattcacaaccagtaggtgcaattgaaccacgccgtagctgttgttcctcgtcacgaagataatgaaatttgaaagcaattcacaaccatcggcatttagtgataaccgttggaatcgttgttcctcgtcacgaagataatgaaatttgaaagcaattcacaacacttaatccaccataacaccgacggtaatagttgttcctcgtcacgaagataatgaaatttgaaagcaattcacaaccgttgtattcgttgctttcaactgggaaaagttgttcctcgtcacgaagataatgaaatttgaaagcaattcacaacttactttcttcttccgtgtaaaggtcttgcgttgttcctcgtcacgaagataatgaaatttgaaagcaattcacaactaggtgaaatagttcgaattaaaattgatggttgttcctcgtcacgaagataatgaaatttgaaagcaattcacaacttaagcacggcacagaggaaaatgagggtagttgttcctcgtcacgaagataatgaaatttgaaagcaattcacaacagttgtccgatggttccgattcctgcgagggttgttcctcgtcacgaagataatgaaatttgaaagcaattcacaacaatgggggtaatattgttagaatagcaggagttgttcctcgtcacgaagataatgaaatttgaaagcaattcacaactttaccctatttacgactggacaacggagggttgttcctcgtcacgaagataatgaaatttgaaagcaattcacaacttactgaaagtggcagtggattttatgagtgttgttcctcgtcacgaagataatgaaatttgaaagcaattcacaacattgatacggcaattaagctatcaaaagaagttgttcctcgtcacgaagataatgaaatttgaaagcaattcacaactctgccgtgttggtcaaagtgatgttaatcgttgttcctcgtcacgaagataatgaaatttgaaagcaattcacaacttttttgattatcttttaatttgataatacgttgttcctcgtcacgaagataatgaaatttgaaagcaattcacaactgagccgttttggttgtgttgggatcacgagttgttcctcgtcacgaagataatgaaatttgaaagcaattcacaactttggtttcttacggaatttggctcggtgagttgttcctcgtcacgaagataatgaaatttgaaagcaattcacaaccgggaaagtgaaactgagttagatgtcaaggttgttcctcgtcacgaagataatgaaatttgaaagcaattcacaactatttcgtttaaacagataatggtagatgggttgttcctcgtcacgaagataatgaaatttgaaagcaattcacaaccactcaattaaagttaaatcgcgtttcattgttgttcctcgtcacgaagataatgaaatttgaaagcaattcacaacgccgtggttgcctgcatcgtgggagtatttgttgttcctcgtcacgaagataatgaaatttgaaagcaattcacaacatgaaacgttaatttaattcaaaagtaaaagttgtgactaatcacgaagataataattttgaaagcaattcacaactattttcgctgtcataatcatttggctgatgttgtgactaatcacgaagataataattttgaaagcaattcacaacgagggatgggcttgcttcagttgggaattggttgtgactaatcacgaagataataattttgaaagcaattcacaacatcgataacaatcagatctacatggtcgatgttgtgactaatcacgaagataataattttgaaagcaattcacaactggaaaccactttcactaaaatattaccgagttgtgactaatcacgaagataataattttgaaagcaattcacaactcgaatagcatctttagcatcctcgaagttgttgtgactaatcacgaagatgataattttgaaagcaattcacaacagatccagtcctttccaaactaaataatatgttgtgactaatcacgaagataatgaaatttgaaagcaattcacaacgaaaacgaaaaagttgtttcttcgatgtaagttgttccatttatgatggaaagttaacttattcgggacacgttgggagataaccgttaaaattattttatagaaaactcctttcaatctggtgttgaaaggagttttttattgtagtaaattcaaattctaaattttgtttttctacaagtcaatcattaaaaaattcccctgcatatcgaactctaaatcaacgccattcagaagatcggctttgattatgtttttatcggattttttctccagacttttgatttttatgtctttgtaatttttgttaacgtattcttttattttggtaggaattagaatgtcgggaacgccattattatctttgatgcctttccaattcccgtcattgtcgaattctatttccacaccattatttaattgaacctcgtactgtttacccttggcattagtttttgtttcatgctttgaaatcgcaataccggcataatgttcatttaaaaaagtttttacttgtggtggaagattctgatcgacgttgtttgcttctgggttaggcgttacgacttctgtttttgaagcagttgtattgttctcagcggggttttgtaaaactactttcttttcacatgatgtaaaaacgaaagtgcccatcaatagtgacagtgttgctaatttcaaatttttcataatcaaggaattttggttagaaataaaattaaggtcttatttttaattgaagtaaaacgtgaacaaattaagtaccgttccaatattcattttaaaatgtttttacagcaaacgttaaatttacatgaaaggcttcatctcatcttcaatctttttacggagatccatcagttttatcgcgtatttttccatttgcttgtcctgttctgtggttgggacgaatttcgggacttctacagaattaccttcatcatcaaccgcgacgaaaacgataatacagtgcgttttcttttcgaaatctttccttttgatgtttcttgaaaaaacattgatggcaatatgcatactggtttttccggtgtaaataacttcggcttccacttttacgatatgtccgatttttatgggagaataaaaccggattccgcccacataaaccgtaacgcaataactggaggaccaggaactcgcacaggcgtaacctgcctggtcaatccatttcattacacttccgccgtgaacattcccgccataatttacatcgctgggttctgagataaactgaaaaactgttttggtatgcatttgtttgattatttgaacaaagcaaatatccgttttaattttttattaatgaaaaatagcaagattggcttttataaaaaaatagatttcaattttcacttcagttcttggactgtttttattttaaaaaaagtccactgagaatttcagtggactggtgtgaataataacgttcttcaccaaaacaatagtaaagatgagcggcagtgcgctatgattttaaagtgtattttttatctttccaaaattctcttcactgcttcttttaccgcagcggcgtcgattttgtatttcttcatcagttctgccggtgtggcagattctccgaaagtgtcatttacggctacaaattcctgaattgtcggtctttttctggacaacattccggcaacggattctcctaaaccgccgatgtagttgtgttcttcagcagtgacgattcttcctgttttttctacagatttcaagataatctcttcgtctaaaggtttgatcgtgtgaatattaatgacttcacaggaaattccttctttttccagttcatctgcagccaacaaggattcccaaaccaaatgtccggttgctacgatggtcacgtcggttccttcctgaagcataattccttttccgatttcaaacggcatatcttccggaataaatacgggaacaaccggtcgtccgaatcgtaaataaaccggtccgtcgaaatctgcgatggctaaagttgctgctttggtctggttgtaatcgcaagtgttgatcacggtcattcccggaagcattttcatcattccgatatcttctaaaacctggtgcgttgcgccatcttcacccaaagttaatcctgcgtgggaagcacagatttttacatttttgttggaataagcaatggactgacgaatctggtcatacactctggaagttgaaaagttcgcaaaagttccggtaaacggaatttttccgttgatggttaaaccggctgcgatgcccatcatgttggcttctgcaatcccgacctggaaaaaacgttccggtgctttttcaatgaatttctccattttcaaagagccgataaggtcggcgcaaagtgcgacgacatttgggtttttatctgccaattctgccagtccggcaccgaatccgcttcttgtatcttttttttctgtataggtatatttcatgatttacttttttgatttcttgaattttaataaaggaattttctaaggataactgatctgcagcccggcctgaacggagctcttttttatggcagtctgagcgggagcgaaggtggccataaaaaaagcgggagtggaggacggaaatgtctgcccaaatcaaattaataatcagccggagcttctaaatacaattgtttaaatgcagtatccaattgctcgtcacttggcgcttttccgtgccatgcgtgcgttcccatcatgaaatctacaccatgtcccatttcagtatgcagcagaatacaaaccggtttccctttgccggtctccgattttgctttttcaagaattgcgatgacggcttccagatcgttaccgtttttttcgttcagaacggtccatccgaaagcttccatttttgcgtgtaaatctcctaaatctaaaacatcttcggtatcgccatcgatctgtctaccgttatagtcgatggtggtgatgatattgtctactttttttgcggccgcatacatgaatgcttcccagttctggccttcctgcaattcgccgtcgccctgtaaaacatacaccaaactgtcgtcaccgtctaattttttagctaaagcagcaccgaccgctacggaaaggccttggcccaaagaacctgaagcgattctgattccgggaagtccgtcgtgtgtggttggatgcccctgtagtctggttcccagttttctgaaagtcgccagttctgccaccgggaaaaaatcgaatcttgctaaagtggagtagaagacgggtgaaatgtgtccgttggaaaggaagaacagatcttcgttttttccttccatggtgaaaggggatttgtagttcattactttcccgtacagtgcggtgaagtattcggtgcaacccaaacttccgccggggtgcccggaatttacagcgtgaaccattctcaaaatgtctcttctaatttgtgtggtaagagatttcagctcttcaatcgatttactcattatatagatttatttgcaggcgaatttacaaatttttgattggttttggaaatgaaaattccgggtttatggcccggatgatattttagtaattttcaaaagtggtatgcagttgttcccggtaattataaattccatcaagagaatttaaaaggattttttctcccaagtctttcccattgtgaaataattcaatgtatttatttgaagaattaaaatgtaacctcgctaatggttttcggttattatcatctaaaaggattccaaaataggattgggtatctctgaatgcgattctttcggcagcgattttttctcttaaaatggcttttacaatttgaaaaccttcaagttcttcgtcggtggtgatgtatttaggaatttcattgtttaagtctattggattctctattgcagggattttatcttttgcaatattttcattaatgtttaaagctgattttaaccgtaaactgatagaatcatttatagaattactgactgcttttttagtgtattctctaaaggtaaccattctggaggcggtcaaaggcttgtcaaaaaacttattaactaacagtttcacaaattcatctgatgcttctgcaacttccttttcgaattcttttcttattgctttaatgtattttaaagcttctgcagaatcaagaatgctttctaaattataatcagttttggtaaattttcctaaaattttaactgaagaatccttgatgtcatttagatttaaagtgaaaaatggcttttcatccataatatttggctgctctaaatcggtgtagaaattataaatatgtccgttcgttaaaacgccgaatcttgctttggcaacatgataataccgatgaagttgtgagttgtgtgcatctgcgttttctttccaatgtttgcactcaataattagaattgggtgatcattattcttaatgacatagtccactttttctcctttctttgttccaatgtcacaaatgaattctggaataacttcagtagggttaaagatatcgtagcctaaaatctgaataaaaggtaaaacgaaagcgttttttgttgcttcttccgtattaatttgatcttttaaagaatctacccgttcatacaattgctgtagttttatttttaaatccatcattttatttggtatttaaaacaaatatagcaaaagaaatgtatattttttattatttcattataaaatgtctatttcttccgaatcagccataatccaaaaaacgtgatcaatccattaataatcaacagctccaaaccgattttgaaatcgccgaaaaagctttcctggtatttgtcaatcaaaaatgaaataacgggagcggcgacacaaacgtaaggaacccatttgtcgataactttaaacttagtgaagattccgaaagcgaagagtcctaacagcggcccataagtgaaaccagccattttcagaatcaaa

SEQ ID NO: 4032 - DNA, 24131 bp, synthetic construct
  source 1..24131: mol_type = other DNA
  misc_feature 1..24131: note = Synthetic
aagagcttgtcaatgagggttatttgcccgctgccatcgtcaattatattgcgttattggggtggtcgcccaaaaccgagaaagaaattttttcgatggatgagttaattgcctcattttcaataggaggcatcaacaaaagtccggctgttttcgattatcaaaaattggattgggtcaatagcgaacatatcaaatcgctgtcttttgaacagttttcaacagtagcattcccattttccaacgtaaaaggcactcggttggaacataaatgggatgaaatagccgcgcttctgcaatcgagaatacacaagttttcccaaattccggaggcacttcactttttctacaaagtagaaccgtttgatacagaactatttataaacaaaaaaaataaatcaaccattgaatcatccattgagataatcaatgacacgctggaacaaatccaacaacttgacaattgggaacaagaaacaatcgccaatctttgcaatgatattgcgcttggcaaagaaataaaattaggacaattgatgtggtccttgcgaattgcactatccggcttgtccattacaccgggcggggcgagcgaaatcatgagcattattggaaaagaagaaacgataaagcgattaggtgctgcggtggcatcaatgttgggcggcagagcggtgtagagcaggggattgcgggtcatgtccccaatgaaaaaaaaaattaccccatttatacttcataattcataaatatttactacttttgcgctttgaaaaaataaaaaatacataagatataatgaaaaagaaatctattttggcggttatcgccctgctctcggcttcgggagcgtatgcaggagttaatgagcgaggcatcgacctctatcgtgccgaattgtatgatgcggcaaaaattgcgtttctctcgcagtccggtggctcgcctgccgagcaagccgaacgctattactatttaggtcaaacctattacgagttgcaacaaaccgactccgccgctttctactatgcacaatccatcgccacagacccgacgtacccctttggacacatcggtgaaggcaaattggcattagccggcggcgacgcaaaaggtgcagaagatttgttcaaaaaagcaaacggtttggcacgaaaagacccgtctgtgcagaccacaatcgcggaaacgtacatcgactttgacaaaacagccgaagccgaaaccgcattggcgaaagcacgcaaggcagacaaaaaatatcccggactgtatgtggctgagggggatgcgattgccaaagccggcgatgcgagcaaagtgggcgcggctgccgggcagtatgaacaagccctctattttgaccccaacaacaaaattgcgcttttgaaactggcgcgcatctacaagtcggtcaatcccaatgaatcgctgggctatctggataaattggtcgctattgaccccgaatacatccctgcgtatgccctgattggcgatgtcaaccgcagtctgggcaaatatccaaaggctatggaggcttatcaaaaatttatcaacattccgggcgtacctattttgcaacgcgaacgctacgcacagattttgtatttctccgaccagttcgacaaatccatcgaagaaatcaatttggtgctcgctattgcccccgacaatgtggtgatgcaccgtttgcgggcttggaacaactataaattggctaattatccggaggctttggagcagatgacccaatttttgaaaactacgccggaagaccagcacatttttctggattattcgacgcatggcaatatcttgataaaaagcaagcaaccggaagcggcggttgctgcctttcaaaaagcaatcgaattggctgccgacaaagataaagcaaacacttacaaagacttagccgatgcgtatgaacgaaataaaaattatccggcggctatcgaacagtataaaaacttttttgccattgaaaaaaatccaacagtattggatttttattactacggctctgcaatccgctctgcagcagcaaaatactatgatggttcgggcgatgaagatgagttcaaagcattcatcgccgatggagaaaaggcttttgcaaaagtgattgaattgtcgccacaatcgtatttgggctatttgagccatgcccaattgctcgcgttagtggacgcgcgcacgcaggcaaagaaggagtcggtggtatgggtagcaaaacccgcttatgaaaaggctttggaggtgatgctggcaaacaacgatggcggcaagcgcaacagtagcatcatcgaagcctatcattacataggtagccacttccttttggcggaagacaaagaaaatgtgacggtatatatgaagaaaattctggagatagacccgaatgacgcgcgtgcaaagcaagttttggatgtgtggaaaatcaagtattgagaaaaaattataatgatgaaaaagaaaatgatttttgcggtggcgttaagcctctctgttgcaacgagttcttgggcttgcaccaatctgattgtgggcaaaaaagcctctgtggatggctctactatggtcacttattcggcggattcgtattcgcattttgggtcgcttgaccattgggctcctgccaagtatgaaaaaggtgcgctgctggacgtgtacgagtgggattcccacaaatatctggggaaaattgcgcaggtggcggaaacttacaatgtggtcggcaacatgaacgaacaccagttgtgcattggcgaaacaaccttcaccggtcgcgaagaattaaaagactccacaggcataatcgactatggcagtttgatttacatcgccttgcaacgtgccaaaactgcccgcgaagccatcaccgtgatgactaatctggtagcaaaatatggctattacagcacgggcgaatcgttttccatcgttgataagaacgaggcgtggatattggaaatgattggcaaaggcgttggcaacaaaggggctgtgtgggtggctgtgcgcattccggacgactgcatcgcggcacatgccaaccaatcgcgcatccaacaattcccgctcaaagacaaggagaactgcatttattccaaagatgtgatttcgtttgcgaagtccaaaggctattacacgggtgccgacaaagatttcagttttgcaaaggcttacaacccaatggattggggcggattgcgcttttgcgaagcccgcgtgtggagctttttcaaccatttcaccgacaacggcgacaaatggacaccttatatattaggtgaaacgccggagccgatgccgctctatgtgaagcccaatcgcctcgtgagcgcgaaagacttgatgacacagatgcgcgaccactacgaaggcacgatttttgaccccacaaaagacctcgctgccggtccgtaccattcgccgtaccgcttcagcccgctgactttcaaagtggacggcaaaacatacgcttgggaacgcccgacttcgacgcagcaaaccgctttcacgtttgtggggcaaatgcgctccaacctccccgatgaagtgggtggcgtgctctggtttggcgtggatgatgcccgatttacggtttacacgcccatgtacggctctattcgcgaggtgccggaatgttatgccaacggttattgcgattttaacactttttcatggaagtccgccttttgggtacaccaatgggttgcaaattatgcgtattcgcgctataatcaagtgattacggatatttttccggtacaggaacgcatcgaaaattcgttttttgaacagcaatccaagctcgaagccaccgccattgaacaattggcaaccaatcgcaatgccgctctcaataccctgacagcctattccggcaaggtcgcgcaagacactcacgagcaatggaagcatctgggcgagtttctaatcgtgaaatatatggacggagcagtcaaaaaagaggtggacggcaagctaatcaccaacaaatatggcggcacacagtaccctaaccgccccgcaatggacgaaaacttcttgcgcgaagtggtgaaacagaccggcacatggctcgaagaaaaacctataaaacattaaaacttgcctccggcggttaaataaacataaatgtttggtggagtagaatatgtttcgtaactttgcatcataaaacttaaatataaacattaaagaaaggagaacaagatgaaaacaatgaaatggagtatgcttgtgatgatgctgtttgcttcgctctcgatgggagcgcagaacagtgcttttgatgatgacatctacggcggtgcagcccccaaaaagaaggttgtggtgcaaaaaacaacggtgtacactccggcaccggcagcacgaacggtcgtaacaacaacatcatcctctttcatggatgacgacgaatacaatcgccgttacgccaccgcagaagacaacaacgacaccgtggaggaaaatgtggacggcgcattgaccgaacgcatcgtgaagtttcacgaccccaccaaagtggtgattgtggctgacgacatcgacgttgtgtatgtggatggcggctactcgttctcgccgtattacaggtacgacccgtactactacggttacagttcgtggtaccgaccatattatggctggtcgttgggctggtatagcccgtggtacggcagctattggggtggctactatggcggttattggggaggctactacggtggctattggggtcatcaccatcatggctattacggaggctattatggcggtggacactattacggagattattatgccaatcgttcctataacagacaacccggtcgcaacggctcttatggcagcggacggtcgtcggcaagcagcagccggtcgtcggcaagcagcagtcggtcaagcgtaagtggcagcacccgcagcagcagtgctgtgagtggcagcacccgtagcagcagtgctgtaagtggtagtacccgctcttcgagtactcgtagcgatggtgtttcaacgcgttcaagttcaggctctgtgcgcagttcgtccgccacaacgcgctctgatgccgcaccgagtgtttcgacacgctccagcagttcttcttcggatgtttctacaagaagttcgtcgagcagcagttcaagtgcagcaccaactcgcagcagcagttcatcgaactattcgggcggcagtagcacgcgctcatccggcagcagttattccggaggaggcagcacacgctcgtccggtagcagtggtggtggtggcggtagccgctcgtccggcggcagcagtggtggcggaggtcgttcgtccggtggcaggagataaaagtatcaactattaatacacagtattatgaaacgggaaatgatgttattcatagctttgttcgcttgcggacaagtgtttgcacagggtgaaattgatgcgttgcggctttcgcgcaatgatttggcaggtactgctcgcgggcaggcaatgggcggcgcgtttggagccttaggaggcgatgtgaccggtgtcaccatcaatcctgcggggttgggcgtttacagtcggtcggagtttagcacctccatcagttttgtaaataataccgacaaggcggtttggaacagcatggacgataaaggcagcaaatttgatttcaattttgagagtttgtcgtatatggctgttgtgcctaccggtagcaaggaaatgccgtttataaacttcggcttttcatataatcggttgaaaaattttgtccgcaattacaatgcttcggcatcggatatgtcctcatctctaactgattatatggtcgtcaaaacaaatgggtatgctcatcccgccaatgacgaaaaatttatttatgaaagtggaggtcttccatggattggtggactgggatataatgctcggttgattaatgctaaaagtggtacaacaaatatgtatgaatcacctctgtcagacggagacaaggttagtccaacattgtctgtttcggagcaaggagccatcaacaattttgacttctcaatagccactaatcttaacgaccaactctatttcggtctggatttttcttataccgacattttttataaagctaacacgggttatacggaaaatttttatgatggaggaaatggtaatcattttggctatgttggattagataactattttgaaaccaccggttccggctatcaagtcaaattgggggctatttggaaaccaattaatgaattgcgtgttggtgtagcttatcattctcccacatggtatgtgctgacggactattatcagggattggcggatgtgaattatttattaccggatgattcgcaggtcaccggaaaagacgaaacaccaagagatggtcttacggactatcactttaaatcgccgtatagttggacagtcagtttagcgggtgtacttggaagcaaagccatcgtgagtttggactacgaaatgaaggattatacctgcatggatttgtcaaaccaaaatgggagtgagttttactaccgtgatatgaatagcgatattgacaaagatttcaaaatggcgtctactttgcgggcaggtgtggaatatagaattacatcgcaggtttccggtcgcttgggctatgcttggatggaaaatccatacgaacaaaaatttaaagatggtgaaaatctcagaggcgatgatagtgaacctgtatcacttgtgggcacagtgccaaactatacaattgaaggcaacacacaatacttcacagccggattgggctataaatttacgcctaacacctatctggatttagcgttcgtttatcaacaacgacaagataaattgtatgcgtttccttcggtagcacgtgatgatctgtttgtaacgtcaacgcctgcgacacttaaccatgcggcgtacaagacgatgctgacactgggatataaattctaaatagcacaaatggcatccttacggaatgaacaaaaagctgttattatttgttgccctgtttaccgccactgtcggagttggtcgtgcaatgccggacattgttttagcggacacgtttaaaatttacgatggcgcaccatttcctgctcaaggaaccgtttcgcctgaccacctcaccctttcttatgcttacagcggcaccctttttgacggcaccgcttatgcctcgaccgctacaccgcccacagatgccggaaattatatcatcaccgccacttcgtccggcgatgatacaattgtagcgacttcggtgacggctacgatgactatttacaaagcatccattgccctgactctgcaaaatatgggcgtaccgtttggcagtccggtggagatgtcgcctattacaagtaccttaggactgccaatcgtttattcatacgaaggtatcggcgaaacaatttacccgtcaaccgacatagtccccacacaaataggcacttaccgcgatactgcccgttttaccggcaacaacaactacaatccggcattcacaacggcttatttaactatctcggttgccggttcgcccgccctaaatttttccgactattggacaacttacaatggtgagcctcaatccatgcgcgaagtggattttaaggaggcagcggctgcgtatttaaaagattcaacaacctacatctacagcggcaccctttttgacggcactgcttatgactcgaccgctacaccgcccacaaatgccggaaattacattgttaccgccacttcgccgtccaacaccctctttcaatcggcttctgtcacggctcgtttcaccatttatagagccggtcagacgattactttttctactcttccgcccaaacaggtggggtcaccgcctttcgatatggatgcaaccgcctctacaggctttccggtgacctatttttccggtgacctttcgcttgcagagattttaccttccggtcttgttaatccccttgcggaaggctctgtggtgataacagcatatcaggcaggtaataacaactattatgcggcttgggcttatgataccttgccgattttggctgccgatgtcttgcttatttccttgacggtcaacgggcaacacattacggtcagcgataccatgctttacgattcaggatgcgataccgcatcggtttttcgtatggaattggtcattccggacggcgcagaaatagacaaggagcttgcatttaccgaagtgattgaccgtccggatgtccgtttggtgattttcaccgttacttcgagcaacaaggcgcacacgaagacctatacgctgattcttgaaaagcgtttcccattcgatgaaatagttacaacccgttggaacaacacgatgacggtgcgaaacaatccggaaaccaatggtggatacctgtttcaatcctttctgtggtatcgcaaatcggcgggcagcatgtattttctgccgttagcgagcggacagtcgtattcggcaggcaacaacggcgaacaacttcagtccgacgattcctaccttgtggaaatggttaccgatgccggacttcgttttcacacttgcgaaggcatcccgcagttgcgaaatataagcgtagatgcctatcccaatcctgtcgtgcgcagttcgttgctcaacgtggctgtggaggcggaagctgactttttgaatgatgccaccattgagatatataatatgcagggcttgttgttggaaacggtgcccgtgaacggcaaaaccaccgtgtgtgcctccgcagcggtgccgggtatctatttatatgtgttcagagcgaaaaatggtttctacaaagaagcgaaagtgtttgttaaataaatcaggatgaacgcaaatcacatacaatccaatcctataaaagtgctgcttggagtgttcgcagtgtggttttgctgcatatccacttttgctcaaccacccaaacatgaattttcggtgtatgcgggcattgcgcctgcacatttgttttactcaccggttgttggcgaggacaagaccggcattcgcgcaatgggcggctttggatatacccgctttttgtcgataaccaccggcttgaacaccggcgtggaaatgggctactacaactccacgctcgcattcaataacctgtctgccacctatccaacgaccgacacggatggtgctccctacgaatttcgcatgaaaacgaatgactacaaggaaaaacaaaactcatactttcttcaaattccgctgatgtttcaatatcaaacggcacacgaaattctccagttttacgctgccggaggtgcaaagttggctattcatctccaaacaaaataccaaacaaatccttctttaatgcaaaactccggttattatgccgatgaagattatgaatatacttcgcaaacatttctggatttcggcacattggcagaagacggaaaaacaggcacattagacgtttctaccggcattctgggttcggtggaaacaggcgtgagatggcctcaagcctacgacttttccctgtacgtcggtgtgtatgccgattacggcttcaatttgaacaccaacagcatcctgttttcaggctaccaccaacccaatttatccaccatgtttgaaggcaaactaataccgctgacggttggagtgaaaataaaattcgcaatgggcaacaaaagcctgagaaaaatgcgcgacccatgctcttgtgattgaatgatagggtgaaatcaatagaatgtcccgcaggctcccttgttctgctttagctgcttgtatgccgtccataagttacgtggacttaatattgtgaattgcattcaaaaaattttggcaggcaaataaaaatatttatctttgcagcgtgagaaacgaaaaaatcctacggagtacgcaggattaagaacattcttcggcttatagccttgttgtgaattgtctttcgggtgcaaaggtacaactattttttatattgacaaaataaaattaaaaaatatggaaaaaattttaggaattgacttgggaactaactctatgggcttaacattgagggatgacaatgagttttcgtggtatggtgtttacacttttaagaaaggtgtcggcgagggaaaatcaggtgaattttcgtatgctgccgaatgcaccaaacaccgttcttcacgcagattgtacaacgctcgcaggtacagaaaatgggaaacattaaaggtgctgatagacaatgatttttgtccgttgagcgaagaaaatctgaacaaatggaaacactacgaaaaaggcttgggcaggtttttccctgttaatgatattgcttttcaacaatggataaaattggattttaataatgacggagtacctgatttcacaagtccttatcagttaagaaaattattgattatagaaaaattggatttgtcaatttccgaaaatcgctataaagttggacgtgcattgtatcatgttgcacaacgcagaggttttaaaagtagccgaaaaagcggtgcaaatgaaaaaacagccgtttacaaaggcagcaacgaaaccaaaactatcggacgaaacgagtatgaaaatttgattattgagcatgaaactttgggtgcggcttttgcttacttggaaaatgaaaggattcgtgtaagaaacagatacacattgcgttccgattatcaacaggaagttcagaaaatcattacgtttcaaaaaattgaaaacagggaatttgcagaacaaatagagaaagccattttctttcaacgacctttgcgttcccaaaaaggactggttggaaaatgtacattggaaacaaacaagccgcgttgtccgataagccacccaaaatttgaagaatatcgggcgtggtcatttatcaacaatataaaatacagaatagataatcattctgattttgagccgcttcctttggatttgaaagaaaaaatttatcacgaaattttctttttcaaaagcaaaagggagtttcttttttctgaaatcagaaaatttattcagacaaatggcggtagaaattgggaattgaattacagcccaaaaatggatggaatttccgtcccaagttgctgtgtgtctgcacgattgaaatcggtttttggcaatgattggcatttttttgaaaaaatcgttgtcaaaaccaacaaaaaaggcgaaaatgagacaataacttacacgatagacgatatttggcatatcttattttcatttgcagatgaagaaaatttcattgaattttgtgcgaaaacgcttgaattagatgataatcaaatcaaagaattgacgaccttattcaattcatttcctgttggttacgcaaatttgagtcttaaagcgattaaaaatatcttgccttttttgcgcgaaggattaatttataccgaatcggttatcttggcgaaaatcccagaaataattagcgaacaactcttcaaggagcacaagaatattattttggctgaaataaaaaatgaaatagcaaaaaatcgttatgaaaaaatgattataactgttgttaataatttgattttcaagtattatgcgttagattacaatgaacgatttgcatggaaagatttttcatataaattaaatgaatcggattttaaggatattgaaaaagccgttatagaacattttggcgaaaaatcgtggaataaaaaatctgacaatgagcaacaaaaatttttatcagatgttaccgaaaaatatcaaacattttttgccgatgaaaagcgcgaacacataaaacctccgcatttggttaatcaaatcaaagaatttttactcgccaaatttgatgttgccgagaaaaaattgaacaaaatttaccatccttcacaaattgacatttaccctaaaaaagaagaccaacaacttttgaaaagtccgaaaacggcggctttcaaaaacccgatggcatacaaaacgctttacaaattgcgcgatgttatcaattatttagttgaaacagagagaattgataaagatactcgcatcgtagtagaaattgctcgagagttgaatgatgctaacaagcgttgggcgatagaagcctatcagcgcagacgcgaaacggaaaatcttgtgtttaaggcggctattacagaattgataaaagacacaaattttaaaggttttgcagaccctgaaagcagcgaagatattgataaattccgactttggacagaacaaaccgacaattacgaggaaacatcaaaggcaatcgcagaaatagataaaaacaaaaacatttcggataaagatattcaaaaataccgcctttggaaagaacaaaattgcacttgtatttacacgggtaaaataatcaatctcactgatttatttgaccaaaacaaggttgattttgagcataccattccgcgaagcaaatcgtttgacaattcattggcaaatttgacggtttgctatgcagatttcaatcgtaatataaaaaagaacaaaatgcctacggaattggataattacgatgaaattaaaaaccgattggaagcgtgggaaaagaaagttgatgatttggaaaaacaaattgatttttggaaaacaaaatcaaaacacgcacaggataaagacgaaaaggataacactattcgtcaacggcatttgcggcaaatggaatacgattattggaaaaataaattagaccgttttacgcgaacagaagtttcgcaaggttttataaatagtcaattaacagatacacagattattacaaaatatgcttttcattatttgaaaacagtttttgataaagttgatgtactaaaaggaacaaataccgcgcaattccgcaaaatttacggcattcaaccgaaatttgaaaagaaagataggagcgaacattctcaacacgccgttgacgctacggttttgactttaataccatctgcaaaaaagcgtgaagaaattttgaaaaagtcatacgaatttgaagaaaaacccgaaaacaaaaacaggcaatatcacgaaaagcctttttcttcatttaatcattctatgattgaggaaattcaaaagaatattcttatcaacaatcttgccgataaagaccaaacacttactccaggggaaaaaatagtccgcaaaagaggtcgtgtggtttggcttgacaaagaaaaccgtattccaaaaattgcacaaggcgattctattcgcggcgaactgcatttgcaaacatattatgggaaaatcaagattgcagcaaaagacgagcaaggaacattacaacgcgatgaagatggtaatattctctataatcaaatagatggtaaagacgaaatgtggatggtcttacgaaaatctattgaaagtgtaaattttaatactgatgtaattgttgatgtacatttggcagaacatctcaaagcacaattatcaaaaggcattaaacaaacggaattggaagattttcaagggaacaaattgcgacatttgcgttgcagagtaaaagcggcaagagggtttatgaattcggagaatgcaacaatagtcaaagaacacgtttataaatcagagaaagattataagaatttcatttatgctgcttcaggggagaactttttatttgctttatatgaaaacgaacaaggtaaatccatagtgccttttaatgtttttgaagccgcaaaatattcaaaatatcttgataatatcaactatgtagatttgtataagtcaaaagagcctatttatataggtagaggtgcaaataaaaaagttgctacattaaaacatatctttcaagtagggcaaaaagtattatttttcaatgaacaaaaagaagaattgtttgatttagaacaagaagacatttctaaaaggttgtattatgtaaaaactctatttgatgctaatacccaacgaattatatttcagcatcatttagaggcgagaagtaacgagcaattattaatagattttccaaaagaacagtttggaacaaaaggtaaagatggcttctcaaaatttactgcagatttcattgcgcccagattattattaactccaagcaattttaattttattattgaaggcaaagattttgaaatgaaattagatggaacaatagaatttaaggaggctgatgtatgaaaaaaaacataatccccactatccgttcttccaccgcaaaatgcctacattatgataaagaagaccctctatgttgctccccagcctatctcagcatgaagaacaagcaattggtcatcaaattgcctgaggttgagaagaatggttcgttgcctgaatcattaaaaaagcaagcaaaactctgtgataatattttgattattttcgcattctaaaaaaaaaattattatgtacgaacagcaaaacatagaatacaagtctatttggaaggacgaatatctgaagtggatatgcggctttgctaatgcgcaaggcggtaaaatttttattggtaaagacgatgacggcaaggtggtaggcgtgcagaacgcaaaaaaactgttggaagagttgcccaacaaaatcaccaccattctgggcattgtagccgatgtcaatttgcacgaacccgctgaaggcaattatattgaaatcgttgttgaagcacagctcaaccctgtgaattacaaaggcgaataccactaccgcagtggcagcaccaaacaagaactgaaaggtgcggcattggataaatttctgttggggaaactaggcaaacattgggatagtgtaccaattccaaatgttacggttgccgatttgaaacctgacacgtttgacttttttcgcaaaagaggcgttaaaagcacacgacttgaggatgaggtattgacagacagcaacgaacttttgcttgaaaatctgcaattgaccgagaataattatctgaaacgcgcggctattttgctattccaccccaaaccggaaaagtttgtgaccggtgcatttattaaaatcggctattttgaatcggacagtgatttgcgctttcaagacgaagtacatggcaatttgtttgaacaagttgaaaagacaatggaactgctttttacaaagtacattaaagccatgattagttacgaggatatttaccgcgtggaaacctacgaatacccgaaagaggcagtgcgtgaggctattcataatgccgttgcacacaaggactacaccggcgcaacacccattcaaatcagtgtttacaacgacaaaattatgatttggaactttgggcaacttcctgaaaattggacgattgacacattgctggacaaacattcttctgttcctcacaatcccgatatttccaacgcattttttcgtattggttatattgaggcgtggggacgcggtatccggaaaatgaacgaacagtgcgtaaaagcaagtttgccgccaccgctgtattattacgcaagttccggcttttgggtagtatttcgcaaagatttatttaacgaagcagatttgcgcgataacggactgaatgaaagacaaataaaagccgtgctctatgttaaagagaatggaaaaatcacgaatttgcaatatttggaaataaatggcgacataacggatagaacggcattacgcgacttagacgatttggtggaaaaaggtctttttcagcgtgttggcgataagaaagcagcctattacgaattagtaaatgtcggataaatgtcggatatgtcggataaatgtcggataatatgataaagaagaccctctattttgaaaactccgcctatctcagcatgaagaacaagcaattggtcatcaaattgcctgaggttgagaagaatgattctttgcccgaatcgttcaaggagcgcagtgtgcacaccattccgattgaggatattggcgttgtgattttggataataagcagctgactattacgcatggattgcttgaggaattgttggcaaataactgtgctgtaatcacttgtggaagtaatcgaatgccggttgggttacaattgccgctggatggaaataccttgcaaagcgagcgttttcaggcacaaattgatgcctccgttccgttgaaaaagcagttgtggcaacagaccattcaggcgaaaatcactaatcaggcgtatgttttgaaaacgacccgcaatgaaaccgtaactaatatgctgaaatgggcgggcgatgtgaaaagcggcgacagcgacaatctggaagcacgggcggcggcttattattggaaaaatatgttccctgatattgccgatttcacgcgggggcgcgaaggtgttccgcccaataatttgttaaattacggttatgcgattttgagggcagtcgttgcgcgtgctttggtggcgagcgggttgttgccaacgcttggaatacaccaccacaatcgctacaatgcctattgcttggcggacgatattatggagccttaccgcccgtttgtcgataaattggtggttgagattgtggatggcggcgggaatattgacgaattatccaaagcaatgaagattaaactgttgaacattcccgtcttggatgtggttatcaatgaacagcgcagcccgttgatgcttgcagcggcgcaaacaaccgcctcattagcaaagtgttatcttggcgaggcgcgtaaaattgcttacccttcatttacatagcgcaagaatatggaacgttttagcgaatatcgaattatgtgggtcatggtgttttttgatttgcctacggaaacgaaaaaggagaaaaaagcgtactccgatttccgtaaaaagttggtaaatgacggctttaccatgtttcaattttccatatatttgcgccattgtgccagtcacgaaaatgcagatgtgcacattaagcgggtcaaaaacattttgcccgaacagggtcatgttggcattctgtgtgttacagacaaacaatttggcagtatggaactgttttacggcaaaaaagaaaaggaagtatccacgccatatcagcaattagaattattttaaactataaaaaataaagaaaaatgaaaaatgaaagaactttttagtcaagatgagcaaaatctcatcatctacaacaccgatgatggcaaaacctccgtggcattattagccaaagatgggcagataggattgagtcagcaacagattgcagaactttttgacacctctgtgccaaatatcagtatgcacatatctaatatattgcttgacaatgaattagataaaaattcagttgttaaggattacttaacaactgccccggacggcaagaattacatggttacattctatagtttggaaatgattttggcgattgcttttagggtaagaagccatcggggtacacagtttcgccggtgggcaaatcgcaatttgaaggagtatttggtcaaaggttttgtgatgaatgatgaacgcctgaaaaatccaaacggacgattcgattatttcgatgaattacttgcccgcattcgtgacattcgcgcatccgaaaagcgattttatcagaaagtgcgagatttatttgctctttcaagtgactatgacacaacggataaggcgacgcaaatgtttttagccgaaacacaaaacaagttattgtatgcaattacgggcaaaaccgcagccgaacttattgtgtcacgagcagatgcttcgcaaccgaatatggcattgacaaattggaattgcgagccaaagaccgcaaagacatcacaatgaaattttggcgcgaaaacgtggataaaatcctgcaactcaacgacaaagtagtgttgatgagcaacggcaaggtaagcaatcagcaaatggaagaatatgttgatgtcgtatataacgattttcatcttcagcgcaaactttttgaggcgcaacaagctgatttgcaggatatagaagaattgaaagaattggaagaaaaacttaaataaaaatgcgtatttatggagcaacttaaagttgagcgttcatcacacacctccaaagaggaggtctatcaatgtttattgccgcaaatcaaggcattggtgcaatctgaaccggatttgattgctaatttagccaatattgctgcggttttgaaggcggcttttgattttctttgggtcggcttttatttggtgaaagacgaaaaattggttttgggtccatttcaaggtccgattgcgtgtactcgaattgcttatgggagaggcgtttgcggaacggcttggaaagaacgacgcaccatcgttgtgccggatgtagaacaattccctggtcatatcgcgtgtagtagcgagtcgaaatcggaaatcgtagtgccattactcgcaaatggcagcgtcatcggcgttttggacattgacagccatcaattaggcacgtttgatgcaattgacgccaaatatttggagaaaatatgccacagccttccataaaaggcaagtacaatcgaatttcaaacaaaaaatcctgccaaacaggcaagatttttaatgtaaacaatctctttttcctttcctaaaatcaatcgtaaacaactaaatttcaacggtttatcgcaaatttgttgtttacggtcgcaaaggtacaaattttgaaagcaattcacaacatacaatgttttcttcatcattttataatgttgtttacggtcgcaaaggtacaaattttgaaagcaattcacaaccaaccctaattcacgcgcctttgcggctaagttgtttacggtcgcaaaggtacaaattttgaaagcaattcacaacattcaatgtcagatgtatgaccggttaatagttgtttacggtcgcaaaggtacaaattttgaaagcaattcacaacgctaaatcctcttatgggaaatctaaaatgttgtttacggtcgcaaaggtacaaattttgaaagcaattcacaacaatctaactggtctgatactgattttggaggttgtttacggtcgcaaaggtacaaattttgaaagcaattcacaacacttgctgccggtgcattgcaatccatttggttgtttacggtcgcaaaggtacaaattttgaaagcaattcacaacttcgcctccgctgattgttacgggaacgatgttgtttacggtcgcaaaggtacaaattttgaaagcaattcacaacttgaagaagcctacactatttgcctctatttgttgtttacggtcgcaaaggtacaaattttgaaagcaattcacaaccacccggctcggcagatttccacgcattgtgttgtttacggtcgcaaaggtacaaattttgaaagcaattcacaacactatcggagtgccggacagtagcaggctcgttgtttacggtcgcaaaggtacaaattttgaaagcaattcacaacgcgtgcacgtaagcaatccggaatgaatgtgttgtttacggtcgcaaaggtacaaattttgaaagcaattcacaaccgcaaaggtacaaattttgaaagcaattcacaaccatccactctttggcttaaattcaacatcagttgtttacggtcgcaaaggtacaaattttgaaagcaattcacaacaatacacattagataatgcaggtacagagagttgtttacggtcgcaaaggtacaaattttgaaagcaattcacaaccacgttggcgacgggtaatgattcggcaggttgtttacggtcgcaaaggtacaaattttgaaagcaattcacaaccacgttggcgacgggtaatgattcggcaggttgtttacggtcgcaaaggtacaaattttgaaagcaattcacaaccaagtcttaaactcaacgttatacccttgcgttgtttacggtcgcaaaggtacaaattttgaaagcaattcacaacgtacgcctaccttcttgcacaggatggacggttgtttacggtcgcaaaggtacaaattttgaaagcaattcacaacatgaatttgatcgcgtatgtatttcgttctgttgtttacggtcgcaaaggtacaaattttgaaagcaattcacaacccatatattctgccgccgcatgcattgctcgttgtttacggtcgcaaaggtacaaattttgaaagcaattcacaacgaaagccacttatcaacaaataaagagttggttgtttacggtcgcaaaggtacaaattttgaaagcaattcacaacccgcccgatgatttgataatacagggctatgttgtttacggtcgcaaaggtacaaattttgaaagcaattcacaacaacagatattgtacccgtcatttttacaaggttgtttacggtcgcaaaggtacaaattttgaaagcaattcacaacggcgacatttcctcatattcaatccgctcagttgtttacggtcgcaaaggtacaaattttgaaagcaattcacaacctggtttattcgttccgcgcaggcggaagtgttgtttacggtcgcaaaggtacaaattttgaaagcaattcacaacctggctgtagtaacagttacagtagtactagttgtttacggtcgcaaaggtacaaattttgaaagcaattcacaactgtacataatcgctaacctttatttaactgttgtttacggtcgcaaaggtacaaattttgaaagcaattcacaacctgtttctatttcgggtacaaaggtaagtagttgtttacggtcgcaaaggtacaaattttgaaagcaattcacaacttaaaaaaagattccaatcgcttgggagagttgtttacggtcgcaaaggtacaaattttgaaggcaattcacaactgaattgatggagtgcttccatcggcatttgttgtttacggtcgcaaaggtacaaattttgaaagcaattcacaacattttagacaaggtcaaaaaaaagactgggttgtttacggtcgcaaaggtacaaattttgaaagcaattcacaaccatctgctacgtctaatgttctttttaatgttgtttacggtcgcaaaggtacaaattttgaaagcaattcacaacaacatccaacgcttgtattccgcaggcacggttgtttacggtcgcaaaggtacaaattttgaaagcaattcacaacagcgaaagtctcatctgtcttgttcgtttggttgtttacggtcgcaaaggtacaaattttgaaagcaattcacaacaatgtgtccaaatggacgttacttacaatgttgtaggtgttagaccattatgaacacccgcccttaattattttccttccaatttctttatggctgcatccacttgatcctccacctcataattaaagtgaaccataagtattagaaattccttcgaataattcttattgttcgggtcgttttttccggtaaccctacccttaatacactcatttttaatattccttaatacctgaattttactctccttaccgccataagaataagccgactgacttataagatgatcgaaagccttgttccatgattccacagtggtattatatagcttcttttcatccggagaaagtttctttatggcactctttaccgccacaccggaaggtcttcttgaggaatccacggaggattgagaatcgcaacttgtcattccaaagaacaatggaataaccaccgcggtcaatgagaccaaaaatactaactttttcatttttgtaaattattaaattattactattattttcttgttttcttgttttaatatggatcaataccattactgttgttttcggtcgcaaaggtacaaattttaaaagcaattcacaacctttgaaaacaaaaccctcttggaagcagcagttgtttacggtcgcaaaggtacaaattttcgtgaatctgttgaataatcatattttttttgtagttttgcgccttaaacacacatagtatattatgtcggagaatattagcatcacaaaggggttgttgccgcttgccaaattgtatggttgggtggtgaaggggcgcaataaattgtttgacgggggtgttttgaagtcggagcagtttccggtgcctgtcatttctgttggcaatctgacggttggggggacgggcaaaacgcctcatacggagtatcttattcgcctcttgagcaaaaagcacaaggtggcggtgctgagtcgcggttacaaacgaaaaacgagcggctttcacttggcaaatgcccggtctacggcacaaaccattggtgatgagccgtttcagattttcagaaaatttccggaagtgacggttgcggtggatggcaatcggaggcggggcattcatacgctgttgcaactgcctgtcaatcaacgccctgacgttattttgctggatgatgcctatcagcatcgctatgtgacaccttcgctgtctatcctgctgaccaatgcgcaacggttgttttccaaggatgcgttgcttccggcagggcgtttgcgcgaaccgggtgccaacagtagccgtgccaatatcgtgatttgcaccaaatgtggcaccgatttttcggcaaacgattatcacgctttggcgcaacaaattccattgaccccacagcaacaattatatttcacaaattatcactacaaagggcttttgcccgtgtttccggatgccacgccggtaaaaaaagaaaatctcgagcggctgaaaaaagaagaatattcactgctgatgctggcaggattggcacaaccggaggatatggaaacgtatttgcaagcttacaccgccgatttgcaaacgctcatcttctccgaccaccacgccttttccaaaaaagactttgaacacatcgctgcaaaacaggcggcaatcaggaacgacaaaaagttaatcatcacctccgaaaaagatgccatgcgtttgatggataatccgtttatgcccgaaaatctcaaatcgcagttgtattatctccctatccgtgtggcgtttagcaacaagcaggatgaagaattatttgtgcacaagattgaagagcatatcgctaatttgcaaattatttgcgcctgagccgttcccgcgccgcctcaatcagcgtgtcgcgctttctacgcgcatcagaagagaccaaactaaccacagtatcgggtgcaatcccgccttcaatatcctgcatatcagcattatacatggggcaagcggagaaacgcacaccccagccgttgggaatttcggacgaaaacggtagcccggagccgccgccggtggtgtcgccgagaatagtcacaccgggcagtccggacatcgcattgacaaaatcgttggtcgcactgtagcaatggcggttcgttagtaccaccacatcacgcaaatatcgccaacgatctgcgggcggttcgatatattttggcaccggctttgaaaaatcattgtgtcccttgccggttttgtgctgcatatagcccaccagcgtttttttactcacaaaacgggatgccagcatctccgcatagtccaaaacgccgccgccattgtcgcgcacatccacaatcatgccgcgacagttgcgaaacgtgtatatcacataatctaaattagcctcaccaatggcatccataaaatcggcgtagcgaacgtagccaatgctgtccggttcaagaattttatagcgcaggccggcggcaatctgataatcgtgccccaagtaggcatcaatcaactcctggttaaaatttttcggataattttcgtaccaatcccaataacgccccagattgaatgccgaaatcaagttcacatgtccatcacgcacctcccgaagcatcgcgctcaacaccaaaaacagcgtatcccgcgacatttttggggtgattttcggcgcatattccgcatgaacagcatcccaatccacccccttgacatcaaaaaaacaataatgctcatccatgattttccacaacgcctcaaaattgccttgcggcgagttgtcgaactcctctatctcgatgcaggtggcgaagagcaggggcagcagtgcaattaaactatatttgagaaaattcttcattcgcttgccggcaaaaaaggtttaacactcctacccggatgcactgtgaaatattgtgaaattccgatgaaaaaggtgttggaatgaacgcgcgtatcaacttgattgacacgggtttcatacatccaattgacatacgagaggcggagaatggtgctgaaattgaaa

SEQ ID NO: 4033 - DNA, 22721 bp, synthetic construct
  misc_feature 1..22721: note = Synthetic
  source 1..22721: mol_type = other DNA
ttaccgttcaacaactttatattaaatttggggagaggataccactggtcttaaacgccaattcctttggggctagccccaaaggaattggaacaacggacagagtttaatttacagacccttaccagtttttattcgtattcgtaattcatataatcttgataacgttttccatattttttatcattaagacgttttgtccattttattaaattttctttaggctcgtctgtatctgaaatattaaactgaaccaacaggttttttcccaattctttttgaaagaaaccttcagtacgcagtttctccaatacttgaacgcaagtttcgaataaagtgtttctaaaattttcaaagtctaattcttctttatcggtttctactgaaagagttttgcatatgtcattgaattcagggttggctccatcagaagtaaaccattcaactggttcaaattcataaaaatccttgtattgagggttttgggattgcattttctctaaatgacttttagtatttgtaaaagggactacagtcattgctccatcatcacttattaaggaaaaagagcaaatatcagaaccatatttttgaatattttctttaaaactttttttaacagcaaattcaattttgcttttcaattcttcgaaattaaaatcagtattcatagttctttttaattggttgcaacgtccacggtgtatggcgtagtgaggcgcgccttacggatagccataattgcgtctcattcgctatacacgctaatgtgtgtagttctcgtggactcgaataaatatacaataatatggcgaggtgcaattaacggttttgtgtatggttagtggtgtgtttaagtaactgatttagcaaatacgaaattaactggaaaatccgcgagccccgacgcttcggggttcgtaagtaagctagaaccagcaataaatcatacaggttgttatacccatttatttgttcttaagtgtcgggattattctgtcttgtaaaactctccaagtcgacttttcaggctcatcatttatattccagccgttaaagacgattattaaattgtattctggtgctatcattaaatattgtccgccatatccatttcctgcataaatactcgttttgccatcaaaagtatattcaggaatccaccattgataaccatatcccatattacttcgccattcaggttttacgtctttgatttgagggctcgtggatgttgttacccaactttcagatacaatttgattgtcattccatttcccattgttcaaaaacaaggaaccaattttagccaagtcttctgccttaagatatagacctccttctgtatcaatttccccatcaggtgtttctttccaatagtaatctgtaatgccgagtggcttaaataatttttcttctgcccaatcgtcaattcgtttgcctgtaatggttctaacgattttacctaaaagaacggttcctccaccattatagacgaatcttgttcctggtatggtatccataggtttgctcaacacatatgctatccagttgtcacttgattccagtaaaaaactatcatttgtattgtcattatgatcagtctcttcattccattgtaatccacttctcattgtcaataaatcttcaatagatatattttgcttccgtttatctaaaaagtcaatatcataaccagtcaacaaaggcattgctttattgctaacattataatccccattcaaatccaacgcaatacccaaaaggattgaggtgatacttttggttacagattgaagggtgtgcaattcacttttcttgtagtaaggatgccaatccgtattattgaaattgtattgatgattggttgtgtcatatttttgaacaatggtttcgtagtcctgttcatatttataatcagccaataactcgtcattctgtatgaccataaagcggtcaattaatccataatctccatcatttatttctgaattaatagaatcaatcacggcggaaaggacattttgggaagttaccctttgagtgtttttaatagactctttatctttattttttgagttacaaccaattgacgcaactataaataaaattaaaaatgttagcgtttcaattttatttatagttgttctcataatttttgtcctaattggttatagcgttcacggtgtatggcatagtggggggcgcctcacggatagccataattgcgtctcattagcgatacacgctgatgtgtatagttctcgtggactcgaataaatatacaataatatggcgaggtgcaattaacagtggacgatggtatgaaattagtagaagggaggcgtttgcgaaacgcgattctacgtgccgtaggcaattacatgccatcggtttagctatgaacagtacgggagcaaactagcgtttgctttccaccacgcacagagcaaaatctttttgatttataacggttgaccccagctttaataggagtttgtcttacgagtttttgggtatgggggtctcgataagaaaaatagacataccattcccttaaaagggcttccttttgttgtctacgggttagtttggaccaacctttgatattgacccctcccgtgtagaatttaggctcggaatagttcagtttcatggtcaaagcgtatacgttatcgtatacgctaggtagaagtaaggaaatagaagacataaaaaacggcttgtgtgtacacaaaccgttgattctgttgacctaaaccttagtagcggggactggactcgaaccagcgaccttcgggttatgagcctgaaaatcaatataattaaaattacgcaaaaccccttataatcaactgtttaatagaggtttaatatttttttaattcaataaaaatcaattaatatcaaattattctgtacttattctgtactagtttttagtatctttaatgtattcaaataaagagttatggcaagtatcaagattgtattgcgcaagaatatgatgaaaaaggatggcactattccattggcgcttcgaataagcgaaaactataaaacgaattacaagtggcttggtcaatacgtttttgaaaaagattgggataaagtttcaggaaaagcaaaagggtcccatcctaatcacaaaaaattgaataactttttaatgaaaaagttgaccgaggccaatgacctatactttgattctaaagaaaaaagtatcacaccaaaacaaattaaatataaattaaaggggcctggaggctctaaatctttctttactgtagcagctgaacgcgttaaaagtaaatatgatcgtggtactttttcagtagccaaatcagaactttccatattgtataatatcgaagagtttctttctttaaaatcttcctcacgtaaaaatgatatcattgaagcaataagaaaaagaaggaacgaaaggattagtaaagcacggaggtcagaattctcatttgttgatgggattaaccattttaagaagaacaagtcgctaaagtttcgcgatatagatgaatcatttttaaaacggtataaaactttttgctctgtttatctgaatcaaaaaactcgcacgatttcaaatcaacttatttttattagaacccttttcaatattgcaatcaaagaaggaatagtagattcaaaattttatcccttttcaggtgaaagagaaaggatacaacttggttcgggtaataaaattggccttactactaaagagctggaaaaaatagaatcccttcaatttgagccccaatcgtcaatctggcatacacataacgtttggttgatttctttctactttgcgggtatgcgtatttccgatgtggttaaattaagatgggccgatttcaaggataaccgcctttattacattatgaacaagaatgaaaaacccttgagtctcaaaattccagataaagctagcgtcatattgaacttttataaagaggcccagagagaaaataaaggatatgtatttccatttttaaaagatgcggaccctaaaaaagatgtggaaatttttaggaaaaccagaaatgcaacaacattgtttaataaatatttgaaacgtattgctagtctatgtggaattgataagaatttgtctaatcacatagcacgccacagttttggaaatatagcaggggacaagatacacccattgatgttgcaaaagctatatcgacatagtgatttgaaaacgacgctcaattatcaagctaatttcatccataaagatgccgatgatgcgttggatagcgttattaatttttaattgtcaacatattagcagttgaataaacacgaaactttccctaatcaacatttcttgtttttatacttaactacaaaccacagaatgtaagcttttccaaactagaactgcttagttttataaagcatcattaaagtcaaccttgatacttaatgggtttatcaaagggttttttatgcaaaaacgggtactatctatttagattcttgatgaaggaatacaagtgtcctttaccttctattcccattttgaatttaatttgatattgagaaaccaaacaaactccgcccattgaccttcattttatttcggtcaaagcgcatcgtttaaaggtcttgaacaccatcgattttaagaaaaataaaatcaatggagttcgcttttgattttagaaggatttaccattccaatttttcgaacaaaaaaactaaatgggaccaaaatctatcaaattatatgtacgtatttagtggtgggataattaagtgtttttatgcgttttcttgtaattaatgttatgataacaataagttgcattacatgacggtaaacgtggctccaacgggtcttaaaatgcaaaataagactatgttcgaagtaatttcaaaggctgtgaattatttgaaaatcattttttaaatttaaaaaaaagaaccggcggccgtttattgttttatatgtttattaatgtttataatagatactactgcttgtccactacttgtcctctcatgggacggttgtgtaccagtacttgtccgattatgggacggtgggacagcataagtactaatattgattttatgttgaggggttgtaaattatgataattgaccttaaattaaattggtgtttcatgttacattcgtgaccttttttccgataccaaagaaaaccaatttgttcttagacggattgcataaccaggctcgtttctcgctctttttataaatccttactaagctcaaatcagttgtgagaatagatatcgaaaaggctagggttaagggcaaggaaaaataaaattaatggttcttggatgcgggtttttgaatggatcggttcgaggagattaatgaggaattagcacccttgaatttggcggataaggagccatcaattaggactctggacataatgctaattttttcgttatgaagttaattaagtcgatggagatggttactcagtttttctaaatacttaaccagctgacagggtctttaccttgatagattttgtttacaatcgacaaagtgaatgttagtacatatgaatttaaccggaggctttgggctaccgtttttaggagcgaagtggataaaaagggagaagcaagagggtaacacgctaaagcgatgttacttattttaagtaattgatactcaattacttgcgtgtgtttcaatattgcactccgcatcacatttactgtaaaaacgctgggaagccaataaataggggaaaatttactgtaaatcgaataaaaaaactggttttcggtaattgtaaggctacaaaatcatagaagtacattatctatttttctttcatcagcttttcaagataagcgattttttcctgttctgatttcagcaaacgttcgtacaactctatcactttatctaaaggattgaaattgggttggacgttgatagcattaattgtagaattatcattactcgtaaatgtattagaaataatattcagaatattttcatcagaaaaattctctattccttccttggtcacaccaagtacttttgcgatctggttcaatttatcgtcctcgatatgctcggactgttcaatcttggaaaccgcctgttgactgattcccaattcttccgccagggtttcctgcttcatccctcgaagctccctgatacgacctatctttctaccaatatggttcggtttcgctgctgtttccatatatcaaatatatgatttttcatacaatctttatcgggtaaagaacaattaacatagggtaaaatacaaacggtgatggttcggtacttggcagctttgctgtttatttatctaaaacaggacatcatggaaacaggaacaaccataaaattcccatttcgggacgaacttataaaactgatacaaatggaactgcccctgcattcggtatacgtgatcggtatggagaccacaaaaaagagacaaaaggttttcctatacccattaccggtcatgccacaggagaccgtgacctatacgctcttggttgtcggacataggtccccggcaaaaaacctgggggatttcatggggagcctatatggtaaaatgaaaggacgctgtagggtatatgtcattttccgtaccctttccaatgtccttaaaaggttggacatcggggataattttctgaaccgtatcgtttctgggacaccctgcatctttaaggagaacaatctggtaaccgagtcctgtcctgttgggatgtgtctgcatagcacctattatgaacgaatccgggaaagttggatcgaccgaatggaaagggcggagtatcttctttcggtcgttggcatcatcggggaaagggaggacaccgcttccaaaatggccgtaatgcactttgccatggaacaggtatgccttggactgttgcgcattttttgggaatatgtcccgaaccattattccctgtcctatctgttccatttatgtggtcactttaccgggttgccgcaaaggatatttccccgcgggacatacggcctgcagcgccagttctatatgctgtgcaatgcgcaccatatcatgcgcttcaagggggcgatccaattttcaccagatgattcggacagggtttttcgccgttgtgaacggttctttatggaggcaaggggtttgggtgaaatacaattggcacatctcaaggaaatccattgtaacccttcgaagggaggttcgtaggctgtcgaaaggaatagttggctaagtagtatgttggaaagtaaagtccttccttacctttccttttatggtcatggttatatgcggtaggcacattttgttttgcggcaatagagccaatcaactttataattgccgtaagaaacacggcgtaaattttatcaaaagggagatcagtattgtctttttcgttcaaaattcgaccttaaagaattaaaagtgtatttacatcagagtaaagactgaccaaattataagtggatacagatatgctacttcagtatgtgggcaaaataagtgatttacagggtagactattggggagaatggagggtttgggttagaactaagataagaagcagtgcttgaaaccttaacggatgatattgtcaggactggcaatattggagaggcttgtagagccctttggaggaaaggtcatcagaagcgcgtaagataggtatggaatccattagttagtcaatacggggaaacttaactaagggcaatctaatttccttcattaaaaggaatataactctcccattcccagggcgtgtatatgtcgccaattgttattttcaacaattctttaaaaatactttctgcattgtcactattggagattagcaatacccctaaatgatgttcaggatatagaatagaataatgttgaaaaccttcgctgtggccctctttaaaaacacctttgccgtagggcgtttttgttattaatccccatgccataccataatttaggccaattctttcattttcagtagtagtttcaagggattctggtccaaattgtttttttgaattgattacaatattgggggaaaacaacagttgggttattggtgaattttgagattctaaagcaagtatgtgctctaaaaattttgtgtaatctacaggggtagtttccatagaacccgcggcacctgcttcaaatttcttatattgctttgcctcattcattatatattgtaatctaccttttttaaacgaaaaagcgacccgctaaggccgctttaaatgttttcacaacggattaatcgttattgtgaattgctttcagtacggcaaagataaaaaaaaacattgttattcacattacggatttccgtaaggtaatgcgcccggttattattatttttaaataaattttaggtaaatgaaacgaattttaagctttgattttaaaagtttaataaacaaaaaaaagcctcacagaagtatgcgaggcaaagaatttcttcggcttatagccttgttgtgaattgtctttcagattgtaaatataaaaaatttatataaatgaataaaattttaggaattgatctaggaacaaactcaataggccttactttaagagaagatgaagttttctcttggtatggtgtttacacattcagaaaaggagtgggcgaaggaaaaacaggcgaattttcttttgcagcagagcgtactaaacaccgttcttctagaagattatacaatgcaagaagatatcgaaaatgggaaactttagaagtattgattgaaaaaggctattgtccgttgaacatggaaaacctagacaaatggaaaaagtataaaaagggaattgggagagtttttcctgttgaagacaaagcttttcaaaaatggataagattggattttaatggcgacaacacgcctgatttttctagtccttttcaattaagaagattactgataaacgaaaagttggatttatcaattcaagaaaaccgttacaaaatcggtagagccctgtatcacattgcccaaagacgtggatttaaaagtagtagaaagcaaggagcaaatgagaaaacagctgtttacaaaggaagtaacgaaaccaaaacaatcggccgaaacgaatacgaagacctgattattgaacacggcagtttgggtgctgcttttgcttatttggaagataatggtattcgagtaagaaatcgatatacattaaggtccgattatttgtccgaagttcaaaaaatacttgagtgtcagaatatagctgataatgattttaaagagaaaatcgaaaaagcgattttctttcaacgtccattacgctcccaaaaagctttggtaggaaaatgtacccttgaacccaacaaagcaagatgcccagtaagtcaccccaggtttgaagaatatcgtgcatggtcatttattaacaatattaagttccgtactgacaaagatgcccagttggaggctattccgttggaattgaaagaaaaattgtatcacgaaaaattcttcttcaagagcaaaagggaatttgattttagtgaaataagaaaatttatacaagcaaaaggaggaaagaattgggaactgaattacagtaagaaaatggataaagtatccgtttcgagttgttttgtttccgcaaggttaaaatcggtttttggagaagattggaaaaactatgaaaagacagttatccgaaaaaataaaaaaggagaagatgaagcaaagaaatatacgatagaagatatatggcatatcctgttttcgtttgaagatgaagagtattttgatgaatttctaattgatgtactcgaattagaagaaactcaagtcaaagaattaaaaacactttttaataatttccccgttggctatgcaaatttgagcttaaaggccataaacaatattttgccatttctaagagaaggaatgatttattcccaagccgtaatcttggcaaaaatcccagaaattcttggtaaagaagtttttgaaggagacagagaagttatactcaaagcaattaaagatgagattgaagcaaatagaaaatacaagaaaataattaccattgccaataatttgatttttaaatattatgctttagattatgaagaccgatttgcttggaaagacactacatataaattaaatgaatctgattttaaggatgttgaaagtgcggcaaaagagcattttggaggaaagacttggcttaaattagatgatggatacaaacaaaaaatcttatcagaagtaaccgcaaagtatcaggcattttttgcttcttcaaaacgagaacaccttaaaccacctcatttggtgaatcagataaaacgatttttagatgataacttcaatgtcgaggaaaaaattttgaacaaaatttatcatccctcacaaatagatatttatcctaaaaaagaagggcagcagtatttattaagtccaaaaacggcgtctttcaaaaaccctatggcatacaaaacactttacaaattacgtgatgtcatcaattatttgattaaaaccggaaagatagatgaagatacacgcattgtcgttgaggttgcgcgagatttaaatgatagtaacaagcgttgggccattgaacaatatcagcgtcatagagaaaccgagaacagagaatttgcgaatgctatttccgaactgataaaggatccggaattttctggaatcgccaaccctataagtacaacagatacagataaattccggttatgggcagaacaattggaaaactatgaggaagtagtgaaatcgattaatgcttccaaagatgatgtgcagaaatacaggttatggaaagaacaaaactgcgtttgtatttacacgggtaaacttataaagttaacggacctatttaataaaaatgtaattgattttgaacatacgattccaagaagtaaatcatttgacaattccttagcaaatctaacagtttgttatgcagactataatcggggaattaaaaagaaccaaatgccaaccgagttacccaactacgaatttgaatcgcacggttacttaccaataaaacccagattattggattgggaaaagaaagtagatgctttgcgaaaacaaattgaaacacaaaagagaaattcaaaattagctatagacaaagattctaaggataaagctatccgagccagacatttgcttcaaatggagtataattattggaaaaataaattggataggtttacccgaactgaaattccacaaggttttgtaaacagccagttaatagatacacaaattataaccaaatatgcatttcattatttaaaaacggtttttagtaaagttgaagttattaagggaaccaatactgcacaattccgaaagatttacgaaatacagcctaaggatgaagcaaaagacaggggaaaacattatcaccacgcaattgatgcagctgtgttaactttaataccatcgccaagaaaacgagaggaaattttgaagacagcctatgaatttgaagaagaaaacagaggcaaacaatatcacgagaaaccattttcaagcttcagttattcaatgattgaagaaattcaaaagaacattctaatcaacaacattgctgataaggaccagacacttacacttggaataaaaaaagtaagaaaacgagggcgaattgtatggttgagagataagaatggaaaattactattggatgcaaatggaaataaaattataaaaattgcccaaggagattctataagaggagaactgcatcagcaaacgtattatggaaaaataaagattgctgctaaagataaagatggtagtttaaaaaggaatgaagatgggaatattctatataaccaagtagatgggaaagatgaaatatggatggtaataagaaagcccattgatagtgttaattttaaaactgatgtaataattgataaacatttagagcaacacctaaaaaggaaattggcagaaggtgtaaaacaacatgagctaaaagattttcaaggcaagacattacgtcatttacgctgtagagttaaagcggcccgtggctttatgaatcctgataatgctacaattgtaaaagaacaggtttataaatcctcaaaagattacaaaaactttatttatgcggattcaggagaaaattacatgttcggattatacgaaaatgaaaacggcagatctattgtgccctttaatgtgtttgagtcagctaaatatgcaaaacatcttgaagaattaactcctgaaaacctgtttaaatcaaaagaaattttagaacctgtttatataggaagagggaaaaaatccaaaagagctataataaaacatgtttttatggttggtcaaaaggtgatactttttgaaaatgataaagaggagttgaaagatttagaaaatgatgatttgtcaaataggttatattttgttaaacgattagctgatgcaaagactcaacgtatcctatttcaacatcatttagatgcacgcgatgataaacaattaatgggagattttcccaaggaagaatttgggactaaagggaaagatggtttttcaaaattctctgttgattttgtcgctccaagattattactcacaccagggaattttacttttgtaatagaaggtgaagattttgatatgaaattagacgggagcattgaatttaaattttaagcgatgatcaaacgcaccctattttttggcaatccagcctatctaagtacgcgtaatgaacaattggtggtcaactttccggaagaaggtagacaagaggctaccatccccattgaggacctgggctatgtggtcttggaagatccacaaataacagtaaccaatgggttgttacgcaaactggtacaaaataagacagcggttattacctgtgatctacagcatttaccatgttctttgttacagcccctagtgggccataccgaacagacagagcgaatgcgctatcaattgaatgccagtgtgcccttaaaaaagaacctatggcagcagacggtcagtatcaaaatagagaatcaagcaagtcatttattacaacgtaacaaaaatgccttaaaattgaaacgatgggccaaggaggtaaaaagcggggacgcccaaaaccatgaggccattgcagcggcctattattttcaaaacctatttgatatagaaggctttagtcgaaaccagaaaggtattgcgcccaataacctgttgaattacggctatgccattttaagggccgttacggcgcgtgccttggtcagtagtggtttgttaccctcggtaggtatttaccacagaaataaatacaatgccttttgtttggccgatgatatcatggaaccgtataggccttatgtagatacaatggttcttgatattgtgttatcaggtgagccctatgacgaattgaataaagaattaaaaagtgaattgttgggtattcctgctatggacgtcatgatcgatggaaaacaaagccctttgatgaatgctatgagccgaaccacgaatagtttgtatgaatgttttttgggaagtagtcgaaggttattgtatccagagtttctataaataaaatgtcagttcgagcgcagtcgagaactcagtaacaaagaagaacattaatttgtcagttcgagcgcagtcgagagctaaaaaaccatgaaaacatattacgtgtatatattggaatgcaaagacggcctattgtacacaggtgttacgaacgacctggccagacgtttcgatgaacatcagttgggaaggaacaagacctgttttacttataagtgaagaccgggcttatttggcatgaagtgttcaatgatataggacagaccaatgccattgagatacaaataaagaaatggagtagtacaaagaaaggggccttggcgaatggtgatgaagaaatgatacggattttggccgaatgcaggaattcaggccattacaaatttagaccgtgaaggaggtctcgactgcgctcgacctgacagataaaactcgtatgaatgtgttggccatggattgtgttcggattgacaaacgcatacccatgtcaatgtagtgaacttagacttcgtttgatatgacaaagttagactctggttaacccgattaatcgattatactgataatttaagatgagtgtaaaccattttagccgtttaaaccaatatagaagtatgtgggtacttgtattctttgatttgccgaccgaaacacgaaccgaccgtaaggtagcgacacggtttcgtaaaaatctgttagatgatggttttactatgtttcaatttagtatataccttcgtttttgcgctagtcgtgaaaatgccgaggtgcatattaaacggactaaaatgaatttaccgaaaaagggaaaggtctgtattatgcagattaccgacaaacaatttgggatgatcgaattgtttcacgggcaaaaagaaacagaacccgaaacccccacccaacaattagaacttttttagcattcaaaatgtcgggtcgagcgcagtcgagatctcgattggtatgttattattttatttctgaaacagcttataacaaacaggataccagcttattatggcgggtatcctgtgaactatccttaaaattaaagaactgaaagcaattcacaactgagcgcatagatttaatagcgaataaggacctgtgaactatccttaaaattaaagaactgaaagcaattcacaaccttgaaggaatggtgatacttgttatttcacctgtgaactatccttaaaattaaagaactgaaagcaattcacaacaatatcggtttcatgctttttgtcgtcctgcctgtgaactatccttaaaattaaagaactgaaagcaattcacaacaagctcgtaatcgtccgcgtttggtatggtcctgtgaactatccttaaaattaaagaactgaaagcaattcacaactttgcttatctctatgcggtcgatatgccacctgtgaactatccttaaaattaaagaactgaaagcaattcacaaccaataagacaagcgttggttctacatcttcctgtgaactatccttaaaattaaagaactgaaagcaattcacaaccatcaatacccgcgtttatggaaccggacccctgtgaactatccttaaaattaaagaactgaaagcaattcacaactgggtacgtctcgaaccagaaagagtatcccctgtgaactatccttaaaattaaagaactgaaagcaattcacaactatacatatcaattcaatattaagggtttacctgtgaactatccttaaaattaaagaactgaaagcaattcacaacgcctaagtgtttgagtactttatcgatcgccctgtgaactatccttaaaattaaagaactgaaagcaattcacaaccaagcgcgcgactagaggagaaagcagtggcctgtgaactatccttaaaattaaagaactgaaagcaattcacaacaataagattgaccagataaaccttgtattacctgtgaactatccttaaaattaaagaactgaaagcaattcacaactgattggatagacgcctttgaggttcttaccctgtgaactatccttaaaattaaagaactgaaagcaattcacaacataaattgtatcatctgtatttgatgattccctgtgaactatccttaaaattaaagaactgaaagcaattcacaaccttgggtctaatcctatgctaatagctaaacctgtgaactatccttaaaattaaagaactgaaagcaattcacaactgttgattcgggtggtcttggtgattttttcctgtgaactatccttaaaattaaagaactgaaagcaattcacaacttctttcccgttttcgtcaacacccatgaacctgtgaactatccttaaaattaaagaactgaaagcaattcacaactgtggcagcggaggcgaaaactctcaaagacctgtgaactatccttaaaattaaagaactgaaagcaattcacaacttatcactgtacattgaattatattcatggcctgtgaactatccttaaaattaaagaactgaaagcaattcacaaccaacatgcttatggggctgcttagcaattccctgtgaactatccttaaaattaaagaactgaaagcaattcacaacgttgacgcacccaggaacaacggaccgtttcctgtgaactatccttaaaattaaagaactgaaagcaattcacaacaaatctcccgtcatagaaaacgctaatccacctgtgaactatccttaaaattaaagaactgaaagcaattcacaaccattggtcgggagaactacccggaggatcacctgtgaactatccttaaaattaaagaactgaaagcaattcacaacctgcttgtacttgtacgtagattatcgatacctgtgaactatccttaaaattaaagaactgaaagcaattcacaaccatatccaaccgaatacaaagtcttaggcccctgtgaactatccttaaaattaaagaactgaaagcaattcacaactaagagccgtttgttgccgtgccgtcgtaacctgtgaactatccttaaaattaaagaactgaaagcaattcacaaccttaagtctttcggcttttcgttttgctctcctgtgaactatccttaaaattaaagaactgaaagcaattcacaacaactatgggtattaatctgtacaaaaaaagcctgtgaactatccttaaaattaaagaactgaaagcaattcacaactaacctggtttaggtttacgttgtcgttaacctgtgaactatccttaaaattaaagaactgaaagcaattcacaacatattcacctctatgtcggtacttccgttacctgtgaactatccttaaaattaaagaactgaaagcaattcacaacaatataatattgctatatattaaaaaataacctgtgaactatccttaaaattaaagaactgaaagcaattcacaacctggaaaccattgctctattcacggattttcctgtgaactatccttaaaattaaagaactgaaagcaattcacaacacatccactagcgcgggttatgtgcttctgcctgtgaactatccttaaaattaaagaactgaaagcaattcacaactgatgtgatgttttaaatgtttgactcagtcctgtgaactatccttaaaattaaagaactgaaagcaattcacaacaattatatttcttttaatgtatttgctagcctgtgaactatccttaaaattaaagaactgaaagcaattcacaactatttgcttaacgataacaattaaagacatcctgtgaactatccttaaaattaaagaactgaaagcaattcacaacttacttgccatgctctcgctttttgttttccctgtgaactatccttaaaattaaagaactgaaagcaattcacaactatatagtctttgccactttttattgaacacctgtgaactatccttaaaattaaagaactgaaagcaattcacaactccacgttcatcgaaaaacgcgcttatatgcctgtgaactatccttaaaattaaagaactgaaagcaattcacaactatataacctttgccactttttattgaatacctgtgaactatccttaaaattaaagaactgaaagcaattcacaacagaggaaggcccccggtgacattatagtgccctgtgaactatccttaaaattaaagaactgaaagcaattcacaacctttaggatggtcggataagctacttaacacctgtgaactatccttaaaattaaagaactgaaagcaattcacaacgaaaagtggggttttaaagatattaaattacctgtgaactatccttaaaattaaagaactgaaagcaattcacaactatagatttcattctcgaggattgcgtcggcctgtgaactatccttaaaattaaagaactgaaagcaattcacaacaatctataaatttggtattaccttggcactcctgtgaactatccttaaaattaaagaactgaaagcaattcacaacctaaaactcaagaacccgtccgcttcgtttcctgtgaactatccttaaaattaaagaactgaaagcaattcacaaccttggaaggtggtagcgcaacaaactccaccctgtgaactatccttaaaattaaagaactgaaagcaattcacaacctttatcacttcttaggagtttatcgaaggcctgtgaactatccttaaaattaaagaactgaaagcaattcacaaccgtgttggcgaattgcgatatcgcaatgttcctgtgaatcatttctaaaattaaagaattgaaatggacttgcaacaaaaaagtggacaattagataaggttcatgccgctattttttgattatacatttccgtttcaaattcttttatagttttataccccaaagtggagtgtatccttcttctattgtaccaagtttctatccattgaaagatcgataactcagcttctgatctaggcccataattgtgcttatacacccattctacctttaagcttttaaagaatgattcagctactgcgctatcccaacaattaccttttctactcatactttgtgttactgccctgtcataactttttagaacattggtaaagttatagctggcatactgagatcccctatcagaatgaaatatgagttctttagtaatagcatttgatttaacggccatcttccaagctgggataatagtgtcattagtgcttaaagtttcgctcattgaccatcctacgacctttcgatgaaacagatctacaatcaccgttaaatatatccaaccttgtttggtttgtatataggtgatatcagagacccatacctaatttcccctagagactgtaaagtcctgatttaatatattagggactattggatagttgtgtttgctatccgttgtaatcttgaatttacgtttccttctggcaaacagattattggccctcattatcctggctaccctgggccttgagactcgatatccctttttcgagagttccgctttgatcctcggtgccccgtaactcccaaagctaccttcgaaaatatcatggacagcttcagttatggcctcgttttccaaccaccttttggatgggccgcgacgcaaccaattataataaccacttttacttatcttgaacattctgcacatcttcccaactggaaatttaaatttatggtgttttatgaacctatatttttcctgtcgccctaggagaagatggctatcgccttttttaggatatcgcgctccagttcggcatacctcaatcttttcttcaattccgctatctccctttgctcgtctgtcagctttggattcccctttcccggaaaactattgtttccaaaatccctggattcccttcgccagcgcctcaataccgatcaaggtatgtccagtttcctgcatatttccacgacactgccacgggcataactcagttccactgctttttgtttaaactctaccgtgtaattccttttctcttaatttttttcaaaattaatataaacagcctacacgctcttaactttatgtccagttaaatatagtaagtccactttttttaatgacatagttatgctttaaaatgcaaaaggtttttggtggataatttaaatcaattattcataacccatttttttcaatcaatcaaataaaatcaattaggaataaataaaattgttttacacaaaaagtagcaattctgtacttattctgtactaggtgaaataaaaaaaaggctcccgatttctcggaagccctttgttctctagtagcggggactggactcgaaccagcgaccttcgggttatgagcccgacgagctacctactgctctaccccgcgatatgggtttcttctgtcttgttttgcaacttcagctcatgacactgacaagaagagcgctactatttgtaacgggcgacaaatatacaacggtttcttggtataatcaaaacttgttgcgataatctttttaatacggcccttcggtgaaaactcttaaaaatccatatcttcggatttttatagcccatggaccttatcaatgattttatagcaaagatgttgccctatacagaatggcctatgttcattcttcttatacttggcggactctttcttgtgttttattctaaattattaccttatcggtattttggtcatgcaatagccattaccatgggtaaatatgatggcaagcatgctaaaggtgatgtcagttcctttcaggcgctttcggcagcggttgctgccacagtagggttaggtaatatttcgggagtggccattgccattcacgatggtggtcccggagttgttttttggatttggatgaccgcattgattggtatgtgtatcaagttttattcctgtagtctttcaataatgtttagaaagaccgatgcccaaggtaatctgcaaggtggtcccatgtactatataacccaaggtttaggggagaaagcaagacccttggccgttttctttgcgatttgcggattatttggttttttaggcgtgtttacggcgaatcaatttacagagacttttatgagtgtggtggaaccgtcacgaaccatatatgggatgagtgatgtcaattggaaatggaccataggtttggttttggccttggttacctctttggttatttttggaggtttgacaaaaatcgcgaaggtggcctcagccattgtaccttttatggtggccgtctatttgattgctgtaatcgtggttatggtgatgaatgcttcccaaataatcccatcactccaaatgatcattacagaagcttggaattttgataccatggttaccggtggattttggggcttggtgattattggtgtccgtagggccatgttctccaatgaggctggtctggggagtgcaccaatgtatcatggccaatccaaaacggataatcctataaaggaaggtttggtcgcgatgttggggccttttatagataccataatggtttgtacctttacggcggtggttatcatccttagtggtgcatatctggaagatcaaagtggtatcgtaatgaccctttcggctttcgaaaagacactttttggttatggtgatggcctattgatgttgattgtgaccgcctttgcattatcaacgttatttacctattcgtattatggtgttaagtgtttatcgtttcttacgaatgcaaaaattggtagatattataattggtactttgtgatcatgattgtttttgcggccgttgcgtcgttggaattggtcaagaacctgatcgatctatcctatgcgctaatggtaataccgaatatgatcgcagtactattattggcacccaaagtgaataaggcagcaaatgagtattttaaaaatttgaagaatggcagagcataaagcaggattcgtaaatattatcggaaacccgaatgtgggcaagtccaccttgatgaatgccttcgtgggcgagaaactctctatcataacctcaaaggcgcagacgacccggcaccggattttggggattgtgaatggggatgattttcaaatgattctttcagatacccctggcataatcaaaccagcctatgagttgcagtcttcgatgatggattttgtaaaatcagcctttgaagatgccgatgtgctattgtatatggttgagattggtgagcaggcattaaaggatgagcagttttttgaaaaaatcaagaacagcaaaattccggtactcctattattgaataagatagatgcttccacgcaggaagaattggaaaaacaagtacaatattggcaagaacaattgccaatggttgagatccatccaatttcagcattgaataacttcaacgttaaaggcgtgtttgaacgaattctggaattacttccggaatcaccggcattttatcctaaagatcaacttaccgataaacccgaacggttttttgtaaatgagaccattcgtgaaaaaatattgcttttttacaagaaagaaattccatattccgttgagattgaaaccgaggaattttttgaagagcctgaaatcattcgaatgagagcggtgatcatggttgagcgcgattcccaaaaaggtattatcattggccataaggggagtgccctaaagcgggtaggtgttgaggcacgtaaggacctggaaaagtttttcgggaaacaagtccatcttgagttgtatgtcaaggtcaataaaaactggagaagcgacgcccgacaattaaagcgttttggttataatcaaaaaaaataagctacagcccaagtctcccattcatgaaattgtgaagctcttgcatttggggctttcccttgcttcttcctgtcctaccaaaagcatagagtacaaaccataagagtaccataaaaaccataaggccaatttgtagaccaattggcctgtccaaagaggcactggaataggcccaaatgcccaatccggtaaagatagtggctaccccaaaatgcaagaacatgaaaaaggtccatagggtagggtttgggccgaacaaaccataaagcctgctgccaccttcttcagtagtattgatttccaaatgta

SEQ ID NO: 4034 - DNA, 18206 bp, synthetic construct
  source 1..18206: mol_type = other DNA
  misc_feature 1..18206: note = Synthetic
ctattcttcggtatccttgcttgatgaggtggttgacggcttcatatgcactttcataatcatccgtaattaccttgggtgtatggaagttttccagaaacttatcaaactggatgacaggtttaccttcatctatgaattcctgcaaatgctcaaagtctttggtttcattactaactgaaatcaacaaaccatccacacttcctgaaagcatactcctacaagctaatttctcgttcggtagtttttcgtcggtttggcctaaaagtatcctgtacccatgttgattggtagctgcaattgctccgctgataatagatgaaaagaatgggtgtacgacttccgggacgatcattcccaaagtcatggttctatttcttcggaaattgactgctatgctatttggaacataattatgcttttcagcataatccttcaccaattttattgtctcttcagaaatcccagaataggaattaagcgctcttgaggcagtagaaacagatatacccaactcgcgggcaatatctttcaaggtaattcttctcttatccattcttttaaaggatcattttatcaagataaactgaaaaaatggatttttgtcctgttccaacctctgattagttttcgctgaggacttttcctttgctatccaacaataggattttctgaatttcccctttttgaattcgaagttcaattcttgtttgaccctctacttctttgaatatcaccctcctaatttcatagccagaatatttttttaagatttcagactcaatttccgagggcaattgatcctcatagggaatagtgttttcaaatctatactcaggccctaaatcggttttcaattccaaaaaggtattgcttccatcctcatttttcgccaattcaaaagcatcatagagttctcctacagctgtataggattcaaatttcaggctattattctcaatactaattacctgaaacaactgggtgttttcagcagcccggtctctcactgcctcggttccttcccatccatttgggttgaggccatacatttttcctccgctgactgacactacgtaaactgtaccagttaggtctctcaggttggtcccattcagtacattctcaccagggcctactctccctcgagcatagctatggtcatgtccttgcaatgccaagtctaccttaaattcatcgaaaataggcttccaaatagctctcaatgcctcattatctcttccagaggaagccgaaaaaagtggatggtggtaagatacaatggtccatttctttttattttctttcaagatatctcgaagccatgctgcctgcttttcatgatctctgttagagtccaagaaaataaatttgacatccggatagtccataaaataagccgtttcctccaaaccttcaggaccgttttcagggaaagtaaactgaggcttccactgaatggaaagtgctcttccggcctctcgattggagttattgagataattgtattcatgattaccaggaacagaaagggaagggagcatactatggataaaacctcctgccgtaaaccattcatgccattcctgttctctatgagcataattgatcaggtctcccgcatggattataaagtctgcatcaggtgcttttctatatccttcccgaatcaacctagcccataattctaggatataattttgtgcatctcctacatacaaaaaagaaaagcgctccttaggatcagcagaggcagttttaaattgaaaccattcagaccagtgttctccatctccaactctatagccataaagctgtccgggttgaaggttcttaaattccacagaatgataatttgcctccacttctgccatgggaacttccttagcattcaggtattcagttttagctgtcaaggtttgggcatttctccagaacttaggtgctgctgtcgccggtgcaatctctgcataggcaacttttacttctggactggttctccaggttacattcatctctgaactgggattttgaccgggatttaagatgattctgtccggatgaatactgggtttggaccaatcgttagcaaaaattggttctttgtaaactctaatatcttgggctttacaagaagattcaaaaattagaatgcctaaaaataggaataggaccctgatatgcataggattttgggtttggttaaggtcttgaaaaatacctgattatccccagaagaaaaatctattggcgttaaagatgtgttaactcagagtgaaggttagctattgatttgaaagttgggttagtttatcagctatccatgcttgatattccttataacagtcttctgaaaaggagttaagaattgacttattagagttagcagccaaaagctcctgatcctgttgaatccatctgttttgaatagtattcaattcctctctgatttggaaaaataagttttgtctgttttgatcgataaatgaatggagctctttggctttccaccatagggacttgtctggattgcaggttggagcaacgagaaagcttttggatgtgcccaggtaaaatggcaggtaaatactcaaacaggggtgtggtgtgcctgaaagccaaatgcttgaaaatccttcttttctcagttcggcaaccatacttcccgtggtatccgaaggatttgttaagcctgttgcgtgcatacaaatcgactcagaattggctttcttggggtgaaattcggtatcaggtaagttatgggtccttaaaatttcaatgactgaatgtacatcgatagctccctgattttcttgtagaaaattactggtacacgctcttcttttatcaccttttccaaaataggtaaataggatgtcagaaaatcttgacttaaatccagacttctgagcaaatagggaggaaaaggtttggttttcatctgtcaagtaaatttggtcataatcctcctcgatggtcaaaatattagaaatactcgcggtacttgtcacttttttccatgcccaggatttgccggatgtttccagaataaatgcattttcagaatcagcaataaggaaactgttgtgataataaaagctcttattttgataaccaccacaggcattttggccaaactgctgtagaagggagatgatgatttccatagcttcttctgcgcttttacctctttctaatgccaatcgcaacaaatccatccctgtaagtcccggattggatttatcgaatttgacattggtgaaaacagcttcatttcctatacatacattattctcattcactcccatctcagctccccacatttggaagggtttggataggatgcattcataggtttcctctacttggggaatttctatgaaagtacatttgatggtttgcgaagagtgcttttgagcaggaacccaaagaatttcatgggcctccaaaggttccctgtccgaattttttccaaaaatcagattcccattttttgaggcatttgcaagtgctaccagtgaatcacacataagctcaaaagtttaaggaccagattcctgcttgttctgctgtctggattgacaatgtatctcctctgaaataggcaagaggctgtccatctgcacccaaatcccagagttccccttttaagaaaatatttagccctacctgggcggatgtttggctgattttaccaggtaaggcatattttttccatgcttcaccttctgtcagaagattaatgtcggatttattgatgcttgtaggtgtgatggacccgctataacctttccaggggctattcatggtgctatctccaggacagaaggaaggcaccaagactatttcagcgctattttcaatagtatttaaataagcatcttcataccaactatccgcacagacgagtatggatattttgcccataggaagatcaaataccggtaaattattgctttctcctgagcttaaaaaagggagttctgatgctacaggaaatgccttgtagataggaggtccaatgatttgaccttgcggatcgaataaaaaagagacattatataaaggaccatttggatcaacatggagtttcccggaaatcacagaaggcttaggtagaataattgagcctgccgtgatataaacctgatatgtttgcgcaagacttgaaaaggtttcgaaataggtttttgccatttcctttgctttcatcctgaatatggaagctgcagctttgtctttttcttttgatttgagaaatgccagagaaaaatcaaagatattactcatgaccaaagtactcatggcctcattaattgtctttttttcagctaatacatgcttttctccttgcaaaaccagccaagtgccgatatactcaggatacagaaccaaagtgttactttttaaaaaacctgaatcgcgggcgatttgtagatacaattctatttttcttttaaaaatatccggctgcaaataatcgtgctcatccatgaaaggttgaattcctacaatattcctttctaaggaatcgctgggattgatttcctgaactatgctcaggtaggcctttggagttggagcttgaattttacgtccggatgaggaccaaatcaaccaaacgaaaatcactaataagaatagactgatgagtaatcttttaaccattgtttaattcctgtaatattttctctgcggcagcttctcctgctctcacggcaccttctatatatccatgccatcgaatagctgcttctgtgcctgcaaaatgcaatcttccctcgctttggctataactgttatgatatttagtccaagaattgacttctctaattccggcgtagcagccctcagaccatgtttcctgattcatggtgtggtccacatagttgatttcctgattagcttcctctccaaaatattggataagctgttttttcacggcttgttttctcgaatcctcatccatcttgaagaattttcgagccttatttccaatgacaaaacccattaagacgccgtattgtccatctgctggggaactgtcaaatagggtttggagataaaattctgagtccgaaacagcttgcccggatagattttggtctctccaaaatggcttaggatataccatttggcacttcccgatacatcccatatcatatctttccaagagtttttgcttttgatcagaaagtggagggttgattccaattttcttcaaaagaggaggaggaacggcaaagatgatatggctaaatacttgagctcctttggaggtgtttaggatgaatttttccttttcccgaatgattgacaggacaggggagtcaaattgaatacgatcaaaaaatggtttggcgatcgcttctgcaagtgtttgcattcctccatgaattctatgctgctgagctccgtttttgatagaaatcaatgcgcccagggagtttccggatcgaatataaaataaggtatgcaaaagagatagctcatgtagttcgcaggcgaagatggtttgcatacctactttcattacctggtagcaagtctctgtttttgaatttcttttcaagaaatcctccaatgtttgaccatcaaatagctgagctttgggatgaatccagggtttttccaaatctattttggaggccatgcgctctaacttgcgcacgatcatatccagattcaaaagtgaaataatatccagcttagggatagttccttggtaacttttgatttttcctttcagctcaagaatgcttttaccctgattgtaagtttcaaaataagaaatcccatattcttcacagagctcatacattcgagtttgggaagaacctatccattgtccgcccatatccagataaaggtcttcttggatttgttgggtataaactcttccacccagtctctctcttgcctcaaatacttggaaagaaattccagcttggtttaatattcgtgcggcggccaggccagagaaaccagcgccaataatggcaatctgattggttgggtgaatcatatcggaaaatagataaattttccgaaactcagatggctgattatttattctgcgaaatcaagaaattacgaaattcttcggtattaaaattactcatcccttcttgatagaatacgattttaccttgcgggtttaccacaagtgtagtgggaatagactcactttgcaagctgctattgagaccatagctggcatgagctgtggggaaagcccaacttttgctttgaataaaacctttacttttttcaaaatcattgtccaagccaatcagtaaaaattccagattgggttgatcttttacttttttgaagagctcagagatatgtggcatctccgcacggcaagggccacaccaagaagcccaaagattgataaatagcgtcttgcccctataatcagctaaattgatttcctttccttcaaaatccaggaatttacctctgtaatcaaacctttgatctgttaaatctacctgctcaagtttgggtgtgatcaggccggtataaagcaatgcggattgtattcctccttgaatcaccggcagcaggcctgtgaaatagaggaaggcaaaaaaggacaaaatcagcccccaggacttgagttctttgagaatggttgattttgacatgatttaaaatatttaagatttttgatttacgatttaaggaatggccacttaatttattgttgggaattatctcgctgaggcgcggcggcgcagcgagcattttaataaccacagatagtaaggagaattatttctttcaatttgtttttctaaagctatctaatggattccttatgatcatgttttaatatttttgatttacgaaatacgatttacgaggggcagaaaaaccacgacccaatcgttttatatttcatcactccttaactgtaaaccatgtgcttttgcaatttcttcaatcgaaagacactaataactcaataactaataaccttgaactattatatttccctccaagaacattgatgcttttgcagacagcttttttgaaggaataagtaattttggattgaagcctcgatgagaccgcttcgttccttgcggtgacgacaatatttttggtttacggattacgatttcctaagggtactaataactaataacctaccgccatcaaagaaaatagatacttctgctgactgcctctgacttttttatcccacagattaacacagatttctatcagctttcacacttctaatttcagcctttccaaaattacccccacgctttcagacgcttagtgacaagtctcacggactttacttttttgaaagaaaagcagccttatcttgcaggttcaatcgaaagatcttagccaaaaatatgaattacgagattaaaattgccaccgaactcaacatcaaaccccatcaggtgaaagccaccatggacttgctggatgagggaggaacagttccttttatttcacgctacagaaaagaagcaaccggaagcctggatgaagtacaggttgcagcggtaagagacaggttgcagcaattacgggatttggataaacgtagagaggcggtgctgaagtccatagaggaacaaggaaagctaagcccggaactcaaaaaggctgtggagaatgcagaaaccatggctaaactggaggatatctatcttccttataagccgaaaagaagaaccaaagccaccatcgccagagaaaaaggtttggaacccttagcggaacgtatttttcagcaggaatcaattgatttggaagaggaagcctctcaatatattgatgagcaaaaggaagttaaatcagtagaagaagcccttcagggagcaagagatattattgccgagtggatcaacgaaaaagcagatctcagggagaaaatgcgtaagctgtttttggaagaaggaaatttcacttccaaaataatccctggaaaagaagccgaagcggttaaatacaaagattatttcgactggacagaacctattaaaacagctccatctcatagggttttggcaatgcgtagaggggaaaaagagctttttctaatgcttgattcctgtccggtagaacaagatgccttggcattgatagaaagagtagtgattgattcccaaaaaagcaatgaatccgtagaacaggtgaaactggcgatcaaggattgttataagcgcttgctcaagccgagtatggaaacagaagttcgccttctgaccaaaaagaaagcagatgaggaagccattcgggtttttgcggagaatttaaagcagttgcttttgggagctcctttgggtgaaaaatctgtgatggcaatagatcctggtttccgtactggttgtaaattggtgtgcttgggcccacaaggtcaatttttacattatgaaagtatttttcctcatgagcctcaaaagagaacatcggaagcgggtatgaccgtcaagggcttagtggataagttttctattcaggcaattgccataggaaatggtacggcaggtagggaaacagaagcctttgtaaaatctttaggactgcccaagtcagtcatagttacaatggtcaatgaagcaggagcatccatctattctgcatcagaagtagcaagagaggagtttccggacttagatttgactgttagaggtgcagtttcaattggccgaagattgatggaccctttggctgaattggttaaaatcgacgcaaagtccataggagtgggacagtaccaacacgatgtggatcaaaatgctttgaaaaatgcactggatgatacggtgatgtctgcagtaaacggagtgggagtggaggtcaatacggcatccaaacaactgctgacttatgtttctggtctaggtcctgtactagctcaaaatatagtagaattccgaaatcaacatggaccattcaagtccagaagtcagttgctaaaggttcctcgcttaggtgaaaaggctttcgaacaggcagctggtttcttgcggatttcacaggcaaagaatcctttggatgcttcggcagtgcaccctgagcgatatgctttggtggaaagcatggcgaaagatctgggagcttccatcgatgatctggtaaagtcagaggacttgcgcaatcggatcaatttgaagaattacgtttctgaacaagttggtttaccgactttgcaggatattttagctgaattagccaagcccggtagagatccacgggagagctttgaagtctttcagtttgaagaaggagtaaatagcatggaagatctccgggtaggaatgaaattaccgggtgtggtcacgaatattactgcctttggagcttttgtagatgtaggagttcatcaagatggccttgttcacttaagccatctggcagaccgctttgtaaaggatcccaatgagattgtgcatgtcaatcaaaaggtggaggtgacagttttggaagtagatatcccaagaaagcgaattgggttgagtatgaaatccgatccatttgcagagcgaggtaagaaaatggaaaggagttcaaaaccagtgaaaaaagaagagccccaaggcacgatggcagaaaagttggccatgctgaaaggaaagtttagataagttagaattgtgaagtttgaaatatgaaaaagcgcgattccggaaggggttgcgttttttttattttacaattgattatttcaccatagaggatagagagaaattcatggagagtaaaagggggaggggctaattttgatcaattttaaccaataatttttcctagaaaaaggaaactcgaaagtcagtgttttaataaaactaatatttgaaaaataccctgttcagggtatttttttttgaattgaagtccctattttgcttttgaaactaaggagtaaaaataaagccctacagaagtatgcggggctaagaaatcttcggcttatagccttgttgtgaattgtctttcatttcaaatgtaaaaataaaaaattatggaacaaatttttgggattgatttaggaacgaattctattggagcagcacttagagaaggaaagcaatttccttggtatggagtctacacttttaaaaagggaattggtgagggtaaggctggagaatattcttttgctgccgagagaacatctaataggtcatctagaagactttacaatgctcgtagataccgtatttgggctacccttgaatgtttaattacaaatggttattgtccattgactttagaaaaactggatcaatggagaaaatactctaaaggtgaaggaaggaaatttcctgttgaagatgatgactttcagaaatggattaaactagatttcaaccatgatggaaagcctgattgtttaagtccatatcagttaagaaaggaaatagccaactctactctggatttatctattgaaactaatcggtttaaaataggtaggtcactgtttcatattgctcaaagaagaggatttaaaagtagtcgaaagaatgggtcaaatgaaaaggtggctatttacaaaggaagttcggaaacagggactattggtagaaatgaatatgaacaacttttggaagatcataaaacattaggtggtgcttttgctcatttggaaaatttaggagttcgaattagaaatagatatacccttagatctgattatgagaaagaagttgatattattttggaagttcagaatctggaagattctcaatttaaaacggaaataaaaaaggcaattttttttcagcggcctttaagatctcaaaagggtttggttggtaaatgtactttagagccgaaaaaaccaagatgtccgataagtcacccattatttgaggagtacagagcttggagttttttaaataatataaagtattttgattctgaaactggaaagctagaaccacttccattgaatcttaaagaagagttattcaatgagaaatttttcttgaaagggaaaaatgactttaagtttattcaaattaataagtatatccaaaaaatcactaataagaaattgaagcttaattacaaggatgatacaactgttcctgcttgtcctgtttctgctcgtcttagatctttgtttggagaggattggaaagatttccaacatacaaagtcgatttttaaatatggtaaaaggaaagaaatatcttatacaattgaagatatttggcacattctattttcgtttgaagatgaagaaattttagaagatttttttaaaaagaattttgatttcaatgaaggccaattaaaggaattgaaatccttgtggagttcttttccagttggatatgcttccttaagccttaaagcgataaactgtattttaccttttttaagagaaggattagtttatacggaagctgttttgcttgccaaaattccagaggttattggaaagggtaaattcaatgaaaatgaggtttttattaaaaaaagaattactgatgcaattgaagaaaataggagacaaaaaaaggtgatttcaattgttaataaattaatttcagactatcacctatctgattataagcaaggttataaaaatcctcaatatgaccttgatcaagatgattttaatgatgttcataaatcaattttggcgcactttggtgaagaatcctggaataaagagtcagaaaaagattatttcataagtaacgcaagagatttatatcaaaagttttttaaatcacaggatagaaagcatttttttagtccgcatttactagactacataaaagaaattctaaaggatgaatttcatattgatcttaaagaactaaaaaagctttatcatccatctcagatagatatttactcaccagcaaaaagagctgatgatggaaatttatatcttcctagccctaaaactggatccttcaaaaatcctatggcatataaaactttatttgaattgaggaaagtaataaatcatctaattaaagaaggcaaaattaatgaagatacaagggtagtggttgaagtggcacgtgacttaaatgatgcaaacaagagatgggcaattgaaacctatcaaagaaatagagagaatgaaaatcgagaaattgcatttgcgatctctcaattaattaaagatccagattttaggggtaatgcagacccagataatcagacagatagagaaaaactaaggctttggacagaacaaagctcggaccctaatgaattttggaaagaaattcttgctacaaaagatgatgtgaagaagtttagactttggaaggaacaagggtgtaaatgtatgtatacaggtgaattaattcctctaacaaaactatttgataaaaatattattcactttgaacacactatacccagaagcaaatcatttgataattctttagcaaacttgacagtttgttacgctaagtataatacggatgtaaaaaagaataatctaccagttgaacttccaaattatgataaagatacctccgagggaaaagcaataaagccccagttagttgattgggagaaaagggtggaatctttatataaccaaattgaaatagcgaaatccaagtcaagaggagcaatagataaggcgacaaaagatgatgctattcggaaaaagcacatgcttcaaatggaattggattattggaaaaacaaacttgatagattcacaagaaaagatgttccaacaggttttaaaaacagtcaattaatagatagccaattaattgctaaatatgcttttcattatttgaaaacggtttttaatagagttgatgttcaaaagggaaccgtaacttcattatttagaaaaatttatggaattcagcctaaagaagaatcaaaggatagaggtaaacattatcatcatgcaattgatgcagcagtattgactttgataccgaaagcagctgagagagaagctattttacaaaagtacttcttagatagtgaaaacagccaatttaaagattatccaattgctccgtttgagggatttggtcatcatatgcttgatggtataaaacaaaaaattcttatcaataatgtacccaataaagatcaagctttttctcctggtagaaaattagtcaggaaaagaggtagagttgtttggctaagagataaaaatggaaatttgatcttggatttggaagggaaaaaagtcccaaaagttgctacaggcgattctgtacggggacaacttcatttggatacattttacggtaaaataaaagtcgttcaaagaagtgagaatggtgggccgaaaagagatgatgatgggagttttctgtatagccaggttaatggtaaggatgaaatgtggttagttggaagaaagccaataacagatttaaaaatagataaagatgttatagttgatccatttataaaaacccacattcaaaatcaaattgcttctggaatctcactttcagagttgagagattttaatggtaaaattattagaagaattagagtcagggttaaagcaggtaggggatttcttgatgcggataatataacagagctaaaggagcagacctataagtctaaatatgattacaagaatatctattacaccaattctggagataattatgcttttgggtattataaaggaatccaccaaagaaagatagttccaatcaacctttttgaagcatctaaagttggaaagctaaatggtagttacaaacttgaagatttttttgaaaaaagaataaaaattggttcaggaaaaaatctagaagaggttgatttgtatcacgtttttcaagttggacaaaaagtattgatttattattcagaaataaaagaactaaaaggattagaaaataaagagttgtctgctcggctctattttgtcaaaaagctggcggatgcaaatcaaagtaaaattcagttccaacatcacttggagggtagagacgatcaaaagctttctattgactttcctaaagatgtttttggcacaaagggtaaggatgggttttcatcttttagtcctgactttattgccccaagattactactaacaccttcaaatttcaatttcgccattgaaggaaaggaatttatttttgggttagatggagggattaaattaaaggtttaaaaggaataatggcagtcgtatgaagtctattgttaggtgaatatcaaggagaatatcttattggaaatcgagatttataggttctatattgtgatcttccaaagttctaaaactttggaagagctttaatatgctagtcaaaaaaacttaaccgatggaaccaggtcaatcctaccatatctacaatcacgccaatggaatagagcaaatctttcaagaagaggaaaattatagattctttttaaagcaatacgcaaagtatttgggtggagtggtagatacttatgcttattgcctgatgcctaaccattttcatttactagttggcgtgaagctggaggacgaattgaagtcaacttttccaaagttcgaaactttggaaaagttaatctctaagcaatttgctaacttctttagttcttacactcagtcttttaataaagtttatagcagaagaggaagtttatttattaagaactttaaaagaacccccattctcgacgagcgccaatggcaagagactttcctttatatccacctcaacccagtgaagcatggctttgtcaaagttcatcaggattggaagtggtcaagttggcatgcatatcaagatctcaacaagccttcaaatttagaaagagattatttcactaatttctttgatggttggggacatgtgagaaatatgatggaagtgaaaaaagaatggttgatgaataaaagtttggaatagtagatcggaaaacttttctaaagttctaaaaatttagaaaagttaactctcggtaaaccttataaacatgatcaaaagaactctatttttcggaaatcccgcctatctcagtaccaaaaacgaacaattgcatatttcatttcctgaaaccgaaaaggaagcccgtatggttcctatcgaagacctgggaatgatagtgttggagaaccaacaagtcaccataacccatggcctgattgccaagctcacagagaaaaaagtggccattatcacgtgtaatagtcaacaccttccggaaggcctacttcttccaatgcacggtcattccgaacaaaccgaacggattcgcttccaaatccaagcttctcagccactcaagaaaaacctctggcaacagacagtcacagctaaaatccaaaaccaggcagcccatctcaaagaaaaaggaaaagattcaccgcgtctttattatttagccaagaatgtaagctctggagacagcggcaatcatgaagcccaagctgctgccatttattggcaaaacttatttgatatccctgattttaatcgagcacaggcaggaattcctcccaataatctgctcaactatggatatgcaatcttaagggctgtgattgcccgtgcattggtttcttcaggcatgtttccgggtttgggaatttggcatcggaataaatacaatgcttactgcttagcagatgatatcatggagccatatcggccctacgtggatttagtggttagccatttggtagagacggaagatgatatttctgaattgaccacttccatcaaaaaggaattgctgagtatccccgcattggatgtgcgaatcgatgggcaaaaaagtccgctgatggtggctgcttcaagaacgacttcctcattgtttgagtgttttgccggaatcagtcgaaaaattatttaccctgaatatggatgaaaaatatttttcaagacttaatcagtataggagtttgtgggttttagttttttttgatttgcctacggaaacccgtaaggataggaaagttgctacttctttccggaaaaagttgttggacgatggttttgccatgtttcagttttcgatttatatgcgcttctgtgccagtagggaaaatgccgatgtgcatataaagcgaactaagaaaaacctacctcccaaggggaaagtaggaatcatgtcaattactgataagcagtttgggatgatggaggtgttttttgggacaagtaagcaagagactgaaccacctactcagcaattagagttattttaaattgaagcttttccaaagttctaaactttggaaaagataaaacctacctatttccacatttcactcttcagttccaataaattttttaatcctaaaatagcacataaaaaacagcataccagccacttagcgtggggtatgctgtgattcctaaaggaatgtaccaatttgaaagcaattcacaacaagcgttacctttccttttgtagggataagctgtgattcctaaaggaatgtaccaatttgaaagcaattcacaactcaaatccactttggataatctctgaggccgctgtgattcctaaaggaatgtaccaatttgaaagcaattcacaaccgtttaattcgaggatgagcccggcacgaagctgtgattcctaaaggaatgtaccaatttgaaagcaattcacaacgaggcgcatcttgtaccagccctgactgtagctgtgattcctaaaggaatgtaccaatttgaaagcaattcacaactgtagctcagtcctttcctcagttcattcgctgtgattcctaaaggaatgtaccaatttgaaagcaattcacaactgactggaagttattcttcattgtgtggaggctgtgattcctaaaggaatgtaccaatttgaaagcaattcacaacacaatcgttcctccataatcccgaaagaacgctgtgattcctaaaggaatgtaccaatttgaaagcaattcacaacatagctgaacttgacttcgtttctgtttttgctgtgattcctaaaggaatgtaccaatttgaaagcaattcacaacattcaggcattcttccaggctaaatcctatgctgtgattcctaaaggaatgtaccaatttgaaagcaattcacaacatgtaccgaacatccgtgcgaaaatacaggctgtgattcctaaaggaatgtaccaatttgaaagcaattcacaaccctttctttgttactctagccatttctttgctgtgattcctaaaggaatgtaccaatttgaaagcaattcacaacactatcatccctttatttccagatcaccacgctgtgattcctaaaggaatgtaccaatttgaaagcaattcacaactcttttttgatgtctttttgagcggcgtaggctgtgattcctaaaggaatgtaccaatttgaaagcaattcacaaccacgggttccgtcacaggatcgaaagggttgctgtgattcctaaaggaatgtaccaatttgaaagcaattcacaactcccgcatcaaaaacggcgaaactgaagggctgtgattcctaaaggaatgtaccaatttgaaagcaattcacaacaatgtctctcactttcagatttctagctccgctgtgattcctaaaggaatgtaccaatttgaaagcaattcacaaccggatagtcctccagattatccttgagaaagctgtgattcctaaaggaatgtaccaatttgaaagcaattcacaacgctttacatattgcagacttttggatacagctgtgattcctaaaggaatgtaccaatttgaaagcaattcacaacagcaggatttaaagaggcttttgaaaaggggctgtgattcctaaaggaatgtaccaatttgaaagcaattcacaaccatagctgtttcccagaatgtgacggatgtgctgtgattcctaaaggaatgtaccaatttgaaagcaattcacaacgagctggataggagtcatcccgatagctccgctgtgattcctaaaggaatgtaccaatttgaaagcaattcacaacatcaagacatccttgccctcccgatctttcgctgtgattcctaaaggaatgtaccaatttgaaagcaattcacaacctaagatattgagttactgttaacagatcggctgtgattcctaaaggaatgtaccaatttgaaagcaattcacaacgccatactcataaggatttgcagatagcgagctgtgattcctaaaggaatgtaccaatttagttcgctaagaaattatattcaatggtgctcatgaatctcccttcggtcgat

SEQ ID NO: 4035 - DNA, 16976 bp, synthetic construct
  misc_feature 1..16976: note = Synthetic
  source 1..16976: mol_type = other DNA
gggttgtacaatttcaggacaggcagtggatcagggagtctggtactggacaaagaaaccgtaagtgcccgttatttattgctgcatactgccggacagcaacattcgggtgagttgtggaagatcgtaagcaaagggcctcagatattttcaaaagaggatttgctcgcgaaaggttatccttctcctggtcaggattattatctggtcataagtctggaacctgttcaggatccggagtttaaagcactgcaatgggactttaaaaagctttccaactatgtttcccgcagaatatcggcttttccatttaccgccagtttagccgagctgatgaaggtggtatataagttgtaatattttctctacattttccaggattgggaaaattcttcattctgaaaagcttccgccagtcctgtgatttgtcttagtcgaagtacttcatccggatccatacctaattcttctccgattcgtttgttagaccagtcgttacgttttagaaaagcgacgagctttgcagataattcgacctgatgcgtgccacgggccatattgtgtcggacagtagaagcgaccctgttttcaaggtttttactgagcgtggacactggcatatacccttttagtccatccctgatatccagcacctctttgcatactgctgtacggtgaaaaccatcgactaccacccaattatctccttttttctcggacgcgacgactattggcatggtgaggccgtctttctttatggaaagctcaagcaatttcatctctggtggagcaactttattcggattatattcgttgccttctacgcgaccgagaggcaccaactgaacattcagggcaggatgctccaattccagaaaatcgtaaagttcctgagttatctcattgaatacctctactttttcgtcaaaggaagcgttcttataccgttctattatctctctaatcataaggtttatttattatagtgaggaatttttaaaaatatgttcagttgcttctgcatttcaccttttgtttgggaaaaagaaagtcctctgcaccaatagtcatttttgagcagtaccctacagattcttcgccaggaaggggctttgcgctgcgcttcgagcttcaggtctgctgtttcgggaatatcatctttaaaaccgttctttttccagtattccaggaatttattgatcttggagttgtagtgatcccttagatagggcggcatggtgtctaacagaaacttagtatagcttttgtaagtatacccctcgggcaaattcattttaaaatttccgaaaacagtgcggttattttcggtgtaacggttgccgaagttggcgccttccacacggtttacgattttgctccatgtctccggttccagtatcttatagaggtatagacctttgcgctgatcgtcaccgtaaggttggcagatccgcatttgcggaagcgggactcccgcaagatacatcaggtcataaatcttgttgtaatcgtatccgaatttaccgttggcaatccagatgtcccttgtcgcccagtcatatatcggataaaaattatagagataaggggcggtcttcgtactccattgttttcgacgatagcgagtcttggcaaaattggctattgtccggtatctattaaaactttcatccgagcgaattccaatcaggcaagctgtatttttacccccggagaaccatttcccaaattcgaggacaaattcttcaaactccatacctttgcgaaaaaaggggaaataatcctgatccttgataacggaaggatgatcggggtagtcccgtacccaggcatcctgcttatcattgtcccaacatatccagtgtgactggtattggctcacggcattgcgcaggtgaatagggaggcacacccaataggctttgacctcgggtctcgataccatacgcatcatataatcaacggtattggcatactgtgcttcaagatcaacaatcagaacatgaacgggcagtttattgtgtcgacgggcggtttctattgtcatattgagcatgacgccactgtctttaccaccgctaaacgagacataaactttattaaaattagtgtaaatatagtctaaacgttcggtggatgcctcatatacatttacttctctgtatttctttgacatacgcttcttcttcctatgatattaccaaatttatcaaaattattgtataataataaatttgttcgctattggaaacggtgaaagaaggtttaattgcctaagcaggttgattgttcaatatacaaacgtattaacgggtcgttggtttaccatacttgcggtgagttttggtctgcccaccatgaacaacctgtacctttttcgtcaattggttttgagctttactactcccgttttgtagaggttgatagccttttgcaggatggtttcaacagcatggattggtaaatcttggtttgggtcaagcaacataattttcatcctgctacggtcttcctgaataagaaagggttcgtcaaaatgtttgccttccactattccgatataaggctgtttgtgttttttgtgtatccataaatagcaaaacatttttcctttgtagcaaaaaaacggcattccgtatttccacgatgcggaaatatctttgtcttggtttaagataatggtacgaagagccaacaagcaacttcttgttggctcttcatgctgttcgtaataattttctaatgcgttcatttaaaaaacactacccctatttacccattcttgtcagaatcgtttccatttctgccattactttattgatcttagcaatagtcagatcaaaaggttctgaggtattcatatccacacctgcatcgacgagcaactctacagggtatttggtacttccggaagccagaaaatcaaggtatcttttacgatccgcatctgttcccttgagtactttctcggagagcgctgtagaggcagtgaaggacgtcgcatactgataaacataaaaattgtaataaaaatgcgggatgtaagaccattcggatttgacatagtcgtcgactatacacacctttttatcatggccgtagtaccgtttggtcaggtcaaggtatatgttatcaaaatcttcacccgtgagcgcttcgccctttccaactttgtcgtggatgattgattcgaattcggcaaactgtgtctgacggaataatgttcctttagcaccttccagataatttccaaggatagcaagacgggtcttatcgtctttgatctgttgcagcatatagtcgttcaacagctcttcattcaacgtggatgcgacttcagcgacaaaaattgaatagtttgcattggcgaaatgttgcttcttattggtcagataactgtgcatggtatggcccaactcgtgggtcagtgtagacatgtcattgtacttcccattgtagttcatgagtatatacggatgtacgtcgtatgcagatccattagaatacgcaccggatcgttttccctcgtttggatacatgtcaatccatctttcatgaaatgctcttttagacacatctatataatcggtacccaaaggttgtaaggattttaaaatattttcaacagcttcttctaccgtatatgctaaatcgacttgttcaaccaagggggcatacaaatcataataatgcagggtatccagtcccatcatacgcttccggaggtttagatagcggtgaaaggtttccaggtttccgttcacatttttaacgagattatagaaaacatctgtcgggatattgccgccatccaatgccctttctaatgtactcccgtaatttctggcttttgtcgtaaacaatgccgcattgatgtttccgtatagttgtgccccaaaggtgcgttgaaattcattcaatttaccaaaataagtggaaaataccttgctccggatttcccggtctccactcgctctatacagtgcaaaattggccgtgttgagcttgacacgctcgccgttcaattcaacctctggatgcggaaactctgcattaaaaaatgtattgaagatattcgccgcattaccggacatcaatgccgagtaagccattactttttcgacttcttcagaacctctgtgtgcacgcttccgaagcagatccttgaggtaaaatcggtatgttgccaatcctttttcctgttccagaaaagcgttgagctgatcttcctgtaaggtcaataattcgggctctacaaaagatgttaatgcgccatatgctgcataaagctgttgcatctcttgcttcataccggcgtatttggtcaccctggtatcttgatcggatttcatcgctgcataagacgatagcctaaccatttccttgcgcagcgtgctgtttaactcaagtgcttccaaaagtacggtagctgactgggtaagcttgcccttgtaagaagctgctttttgcatttcttgttgaatccgttccttttcttctttccaggtctcatctgtggcatagagatcggtcaggtcccacttgtatttttcaggcagttcttcccgaactttcatctggctcacagcgaccgtcgtagaaaatagtatcatagcggtaattaattgtgtttttttacgcatactttagtaatatagatagtgcgcaatttacgaaaaaaattaaatgagttgctcctaagataactacggatgcttgacatattattcattatttatttgtttgttttttatggcatgaatgagctcacttcgtttggtttccgttttacccaatcaccctgcggtttggtgttgtcaccaaccgccatagtcgtcggtgataacaccgacaacaggtaatttacggattttcgtctgcaccctaactacggatgcatgacagattttattggttcgtgaaggcgtagaaccaaggcgtaatgatatacgacaaaaactacgaagcaaatccatggtatcgtaaaatatgtaccttgtcaccctgagcgtagtcgaagggggggcatggtttgactacgctcaccatgacaagctgcatttatccaactgccccggttcgtgtctccacgaatcggtaggttttgtcatgcttccgatattttgaagcatggggctaagcaattatattttagctaactttggcttttcgtatttacttaattattcagcagtgtctctagataaattaaagcttagtaaacgtcttcatgcatccatgaatgatctgggttattttacagcaaaagaattccagttaaaatcactctctcgaatcataggcgggcatagtattattggcattgcgccagaaggagcaggcaaaaccactacttacgttctgggggtattgatgcgcttaaaatatacacaagatgaggctccgaaagtcttgattttagcgcctaatgaagaaagaattgctgaaatagtagatcattttctgaccattagcaagaataaggacctccatatcatggggcttaagacgagcggaagtatggacgaagagatcgaagatctggtccgtggggtagatattgtagtagccactccgacccgtgcccgtgcggtgtatctaaagttaggacttaatttaaatcgtattcagacattcatcattgatgacgcggaagaaatagtgaagcagggaatgcaaactcctgtcagggagctggcacaaagctgtggaaaggtacagtatttaacttttagtacggtcgaacatgagaaattgcatttgatggtggatgcttttatgccttttgctacacggattgaggtggaagatcttggggagaaaacagctgaaacacatgagctcctactgtatccagttcctaattttaccacgaaaatcaatttgctaaatcttttgatgagagacgatgaggtatttgataaagtggcggtatttgtgaatagtcgacttactgcacaaaaactaagtcaaagtctacatgctaaacaaggagaagttgctgtattgcaccccctgtttcatgatgatgtgggtattgatgacatcaatgattttaagcaaattcctgaatgtcgaatactcctcattgccaatgaaggcacgaatgatattgatttaagcgggattccttttatatttcattttgaaataccggaaaatagagaagtttttgtgcaacatgtcgtaaaaacttcgaatgatgaagctatggcgatcacatttgcgacagacattgaacttccggaactcaaaaaaatagaacaattgttggggaagaaaatccctgtcatgcctcttcctgatgatcttattatctatcacccggccaataatccaaaagaaaaagatgaagtggatgaatcacgaggtggagcttttcataaaaagaaagaaagcaatagtaaaacctacaactacggcagtggagtaaaagccaaaatgacaatgaaaaataagaaaaggtaagttttatagcggctaatttccctccacccataattcggttgggttttgttcttgaaactagttatacaccaatagccgcacaggattcctctaatccggatccacacgaatatgctgaccgtgcggtccaaatctggacagattgtaactcaggccaaacgtaaacacacgggtgacgatagtattgcgggtatcgacgatggagttgccggatatttggcgggacaacatatttccctggttcaagagatcattagccctggccgttatccgaaaacccttatttttaagcatcattttactaatcccgatccctaccagaaatggattttggttagcgatagcataaccgatgttcattctctttgcagccgagaagtcaatattgtaggactttatgactctaaaattgccgtttagagacactaaaagagtttgtagatttcgctgtagctgttctacggacgtattctcattggcactgaagctgtagcttgtgttgcccgacatattccatttgtctgcaacatagcgggcgtttaaatttgtactaaacgtctttgtcctgaaaaaattatttgttgtaaattgtccggaattaaagaccatattcatctctcccatcacatccgtccccgccatagcggacaatccgacgacatcattattgttgacctgcgcataggagatacgggtgttcatggagaatttctttatattcacccttcccgaaacaaattggtcataattaagcccggtattaaaataacgttcattatcgataaagagtgctttgttagaaagaccgacggatcctccataaccaatcgaaaacttattcttttttaaaggaatcgtaaacatgtaattgctccctacctgataagttccgttggtattcgcaaacctggtctcttgtctatagctccccaacgtatccggaataatgatgacgttattgacaatttcattccgggtcgtagagagattcgaagcaagcaacaccgcccgtccggtttcttcatgcacataattgaagttcgacgacagcctatgttggaaaaaaggtcgcagatcaggatttccaataatgatattctgcagattctgtgtattagggaccggttgcagctgatggggcgtaggcgaattattattacctgaataattcactgtcaatatctttcccttagctatcgttcgatttaaattaatcgttggcgaataattaaatgcattgttataaatcgagtgaccaaaattgaggtaatcgtttcgaaagactaccggtctgatattcaatcctacggaaagtcgatttttcgctgttgtctgatggtaatccatacccagcgtctgattaatcatcaggcttttgaggtctgaactcaatgtatccacaaaatagtaggtattcgcggtattgtccaagacggatgttgcagatatttggcgcgtattgtccaaagcaaaccgataattcaagcttagccgcttctggttgttgttatttgcctgcccaattgtaaacgtatagtttgttccgaacgacaatcgctgtgtatgcgtcgtgttatcgatattgcggttcaacaccgagtctttaattaaagtttgatcatcttgactgtaatacaaggtattggtatgtatagatcgaaaagattcctgtgcgttattggaaaaggaaaaatttccggaaagcatgtgtttgctgtttgttaattttctcgttatcgccatatctacacctatatttggagaacggctttcattatcgctcacatttctaaagccctgatggatgactccactttgattgtttacagagctattgacgttcgcattatttctataaccaaatgtaaaggttccattataataccatttttcattaacgttggacagatttgcacgcacattgtggttgctgttatcccggtctccgcggctttgcgtagcattattatacaccccgatgctactgactgtttctacgtatcgctcgttttcgtaggcattggttccctgattaaatccatattggaatccgacgttgcctttttcacgaaatttatttctgaaattgcctgacacccctctgttgacactaaaccctgccccattatcctgtgttatatagtttgcgctgactccggtttgcttacgtccattccatagattgacatggccccgacctccgatctgattgttcgtacctacattactggatacgtcgccaaatttccccttattcatccctgatttggtctcgatgttgataagtttggttggctctccggttttgatccctgtaaaattagcttggtcgccaaaatcatccacaatctggatcttagaaacaatctcagcgggcagctttgctatgaactcgttgacgtcacctgtaaaaaagtcttcaccattgacacgcagcttgacgacactcttccccatgacagtgacattataagcttcgtctacctccagcccggagaactgtttgagcagatcggcaacattatctccttccttcacgtcataggctgctgcattatattcgacagtatcctgcgctatccgtatgggattgaccttagatttgacgacaatttcttccagctcattgtttgccatttccatcaccagatcgtccaattgtacactcgtggaatgtcccagtttgacctcactaaccaaagttttgtagccgatatgggaaatgatgagttttattttatcacctcgaacttttgtaaaagaaaatcgtcctttggtgtcagtcttagccatcagcgtatctttatcctgaacgaccatgacatttgcacttgcgattgtttgttttgcactatctatcaccccaccctgcacctgcctatacgtttgggtataggcaacgggactttgcagtaacaagcttagaagaaaaataagaaaataaaataacctcatactgttaccgacaaatataggagataatcaatcgtatcctatcaaaggatgcacatttgtaaacaattccataatatgagggaaaaataaaacagaatatttttttactacggcagtatgggtgaggtggtaaaagaaaaggcagggcgagatcaggtcatcgtaggcgataaaggcggaacattgttaggaaaggttaaagaacgtgttacatcttaacttgattccaatgtatctcgtgcaggcagcaccccagggtcgtggagccccccaggagttaattccccctcttcaacttgtacgcttaatcttaaacgtttagctataaaaataaaaaaacacgaacatagtcgaggcattaaataaatattttcataacagaataatccttactgtttttttcttaccttagagtaaatattaattaataaccacctgattgtgtaagcattatacttaaggaataaaaaatcccacggagtacgcaggattgaaaaatcttcggcttatagccttgttgtgaattgtctttcagatgcaaatatatatataaaaacagtttatataaacaaaaaatatggaaagagttttaggaattgatttaggaactaattcaataggacttactttaagagaaggtgatgttttctcttggtatggagtatatactttcaaaaaaggagtcggtaaaataaaaggtgatgaattttcttatgcagcagaaagaactaaacatcgttcttcaagaagattatataattctcggagatatcgtaaatgggcgactttaaaggtattgattgaaaatgggtattgcccgttggatattgagaatctgaaaaaatggaaaaattatgaaaaagaagtaggtagagtttttcctgttaatgacgaggcatttcaacaatggataaagttggacttcgatggcgacggtattcctgatttttcaagtccttaccaattaagaagattgctgatcaatgaaaaactagatttatccataaaagaaagtcgatgcaagattgggagagccttatatcacattgcccaaagacgtgggtttaaaagtagtagaaaacaaggagcaaacgaaaaaacggctgtctataaaggaagtaatgaaaccaaaacaatcgggcgaaacgaatatgagaatctaattattgaacacggtagcttgggggccgcttttgcttctttggaagataatggaatacggataaggaaccgatatacactaagagcagactacttggaagaagtcaaaaaaatacttgattttcaaaatattgctaatgctgattttaaagaaaaggttgaaaatgctattttctttcaacgtcctttgcgttcccaaaaaggattagtaggcaaatgtacgcttgaaccgaataaaccaagatgtccggttagccatccaaagtatgaagaatatcgtgcatggtcatttatcaacaacattaaatatcgaattgataaagatgctcgatttgaaccgattccgttggaattgaaagaaaaattgtatcacgaaaagttttttttcaaaagcaaaagggaatttgattttagtgaaatccgaaagtttatacaagcaaacggtggaaagaattgggaactgaattacagcaataaaatggataaagtatccgtttcgagttgttttgtttctgcaaggttaaggtctgttttgggtgacgactggcaacactttgagaagactgttgtacgaaagaataaaaaaggtgaaagcgaaacaaagacctacaacatagatgatatctggcatatcttgttttcgtttgaagatgaagaatactttgatgagtttttatctggagtactcgaattggatgaaaatcagattgaagagttaaagaaactttttaatggttttccagttggctatgccaatttgagtttgaaagctatcaataatattttaccgtttttacgggaaggaatgatttattccgaagcggctattttggcaaaagtccccgaaatccttggtaaagaagtctttgaaaaagacaaagatgttgttttcaaagcaatcaaagacaagattgaggaaaacagacaccaaaagaaaactatcaccattaccaacaatttgatttttaaatactatgccttggattttcaagataggtttggttggaaggatgtttcatacagattaaatgaatccgatttaaaagatgttgaaactgcagcaatagaacattttggagataaaacctggcctactttagatgaagaatataaaaaccaaatattatcagaagtaaccgagaaatatcaagtgttttttgcttcgacaaaacgagaacatctcaaaccaccccatttggtcaatcagataaaacagtttttagatgacaacttcaatgtacaagaaaaattgttggacaaaatctatcatccatcacaaatagatatctatcctaaaagagaaggacaacaatttttgttaagtcctaaaacggcagcgttcaaaaatccgatggcatacaaagcgctttataaattgcgtgatgttatcaattacctgatcgaaacagggagaatagatgaagaaacaaggatagtcgttgaaatcgcaagggatttgaatgacagcaacaaacgttgggctatagaaaaataccaacgagatcgggaagctgaaaacagggaattttcggatataatttcagagttaaccagcaaccctgaattttctggagtagcaaatagtgaaagcaaagacgacattgacaaaattaggcttctattagaacaaacagatgaagagcaaagcgaagaagtatttgagctcaaaaagatattattagacccatataaaaaacaaaaggaaaaaaatgaagctcaaaaatcactgatacgaaaataccgtctatggcttgaacaaggaatgcagtgcgtttacactggcaagcctattaagataaccgatttattcaataaaaatatcattgattttgagcatactattccaagaagtaaatcatttgataattctttagcgaacttaacagtttgttatgcagattataaccgtaatattaaaaacaaccgaatgccaacggaactgccgaattacgatgccgaatcacacggatattctgctataaaacccagattggaagcatgggaaaagaaagtagagcatttatttaaccaaatcgatttttggaaaacaaaatcgaaaaatgctaaagacaaaacagagaaagacaacgcaatccgtacaaaacatttatggcaaatggagtatgattattggaagaataaattggacaggtttactcgcacggaagttccacaaggttttgtaaatagccaattgaccgatacccaaatcattacgaaatatgcttttcattatttgaagacggttttcaataaggttgatgtgattaaaggaagtaatacggcacagtttcggaaaatctatgggattcagcctgaagaagaagagaaagatagaggtaaacactatcaccacgcagttgatgccgccgtattaacattgatcccatcgccaagaaagcgagaggagattttgaagaaagcttatgaatacgaagaaaaatatagggggaaacagtataatgaaaagccgttttcgggcttcagttattcaatgattgaagaaattcaacgaaatattctcattaacaacattgctgataaggaccaaacgttaacgcctggactaaaaaaagtaagaaaacgaggaagaatcgtttggctgaaagataaaaacggaaaaccattattagatgaaaatggagcaaaaattccaaaaatcgcaaaaggagattctataaggggggaattgcatttacagacttactacggaaaaattcgtattataaaacgagatgacaatctgaaaccattacgaaattctgacggtaaatgggaattcttggaaggaaaagatgaatacagatatgctttgcgaattcctctggaaaatcttacttcgttagacagtttggttagtccggaattggtgaaaattatagaaaatcagctaaatggaaggactctcaaaaaggcaattgtcgaagggctttatatggtcgataaaaagggaaatcaggttaataaaattcgcagagttcgggtttggcaagcggttgacccaatgcgaataaaagaacaaacatataaatcgaaaaacgagtataaaaattattattatgctaaaaatgcggaaaatactgcgtttggtttttataaaaacgacaatggcgaaacagtagtagtaccgagaaatttgtttgaaatatcaacttttgataaacccaattcaattaaaaatttaactgaactttttgaaatcgaaataaaaaacaagaaagggattgtgttgtcattatttcacgtttttattcccggacagaaagtattattttatgaaaacaacagagaagaactaaaagaattagataatctttcaaataatctatattttgtaaaaagattgtaccaagcaagtcgaggaaacattcaattccaacaccatttagaagcgcgagatgataaacagttaacagaagattttccggttaaagaatttggacaaaaagggaaaaatggtttttcaaaattcacgactgattttgttgccccaagattattgttgagtcctggaaatttcgattttatcattgaaggcaaagattttgagatgaaattggatggaacaataaaatttaagttttaaaatagatgaaccgcaccgacttcattaaatcaacaggcttgcgtacagaataataggatgctaaatttccaaacatattatcatatctataaccatgcaaatggtacggataacctgtttcgttcggacgaaaactatcggtatttcttgcagcagtggtcgagatatatcaaacccgttgcattcacttacgcctattgcttgatgcctaatcattttcattttctaataagaacgaagagtgaggcggagattagggataacttaaattttaaagaaaaagacctgccaggtttaattttgttgtttttgttttcaaaggcaaaattgagggcttcgccgtttgaaaacctggcaggtctaatctccaaacagttcggtaatttattcaattcttacgcaaaggcatacaataagcaatataatcgtaaaggttcattgtttatgaaacctttcaaatcaaaacagatccctactgaaatcgatttaatcaccatagtaaattacatccatcggaaccctattcaccacggcttctgtgagaaccatgaagattggctgcacagctcatatcatacttatctatctgaacgtccaaccaaaacacgaaaagacgatgttttggattggtttaacggcaaagatgaatttatcaattttcataaagaaaacatgatgttgatcgacaaatcatagtttatagactggtaagtatttcctgttgctgataaatgtatttttgattaggtataatcaacaggccacaaatataaattcaacattatgatcaaacgaaccctcatgttttccaatccggcctatctgagccataaaaatagccaattggttatttcttttccagataaggagaaagatgaccgtactgttcctattgaggatattggtgtggtagtgttagagaaccaacagattaccatttcacatggctgtattgctgccctgttacagaataatgtcgcagtagtttcctgcgacacttcccacatgcctactggcttgattttacctttggacggagggcatacacaatccgagcgctttcggtatcagatagaggcttctgtacctttgaaaaaacaattgtggcaacagactatacagcagaaaatacttaaccaggcacaggttttggatagtctgggaattgaagcgaccaatatggttcgttggtcaagatctgtgcgttcgggtgatccagataattatgaagggagagccgcggcttattattggcaaaatatctttggagaacatttgaatttcaaccggcatagagcgggagaacctccaaataatttattaaactacggttatgcgatattacgcgccattgtcgccagaagcctggtgtcatcgggattacttccgacactggggatttttcaccgcaataaatacaatgcctattgtctggcagatgatattatggaaccttatcggccatttgttgacaaaatggtgtacgatatcgtttccgaaggcggaaactatacggagctaacaacagatttgaagatgcgtttgctaacattaccgcaattggatgtgcagtttgatgatatgacgagccccttgttagtggggatgtcacgaacaactgcatcactggccagatgctttgaaggcgtatcccgaaaaatcaattatccgacattttaaaaagttttggcacatgtggaacgattaaaccaataccggatcttgtggatattagtcttttttgatttgcccaccgaaactaaaaaggaaagggcggcccacgcaaagttcagaaaggaaattatgcgggatggatttaccatgttccagttttcgatatatctgcgccattgcaacagccgagaaaacgccgatgtacatatcaaacgggtcaagcggcttttgccagagaaaggccatatcggcatattgactattacggacaagcagtttggggatatcgaattatttgtaggcaaagaattggggagaagaccggatactccacagcagttagagctgttttgagaaaacacatttcgccatccattttttgtaacagaacaccagataatcttgaaaatagaaccgacaaaagtgttctcctaacaaaaaaaccaagctagtggagcttggtttttttaattctaaatttcgatataacaatataaaaatcaacccattgactaaaggtatgttgttgtaaatatcgttaaatcaaaggacgaaagcaattcacaacgaacggtaaagtatgtattcggaggggcgggttgttgtaaatatcgttaaatcaaaggacgaaagcaattcacaactgaaagcacatgtcaacgccttacgggacagttgttgtaaatatcgttaaatcaaaggacgaaagcaattcacaactatggttttgatcccggttcctgggagagtgttgttgtaaatatcgttaaatcaaaggacgaaagcaattcacaacctgtctccgatctttcctatcgttaagcagttgttgtaaatatcgttaaatcaaaggacgaaagcaattcacaacaatagtaataaaaggacacgaataatgaaagttgttgtaaatatcgttaaatcaaaggacgaaagcaattcacaactacttcctcctagcttctttcaagatcattgttgttgtaaatatcgttaaatcaaaggacgaaagcaattcacaacccttgtacgacagcatccgcagttcaaactgttgttgtaaatatcgttaaatcaaaggacgaaagcaattcacaaccatggtggttcgaagtatcatcccgcaatggtt

SEQ ID NO: 4036 - DNA, 16471 bp, synthetic construct
  misc_feature 1..16471: note = Synthetic
  source 1..16471: mol_type = other DNA
tatgctggctattttgactttgattattaccctaaaagtgagataggttaaggttaaggttgaggttgagactgatacagagatctacagaaaaaaaagaagagctatatgaaaaaagaacgcatcgtcatattaggagccggagaaagtggcgtgggggcagccttgttagctaaagctaaaggtttggatgtctttgtgtctgactttggcaaaatagctgacaaatacaaatgggaactctcagaaaacgccataagttatgaagaaggacaacatagcgaaaagctgattactaatgctaccaccgtagttaagagccctggtatcgcagaccatgtagctatcgtaaaaaagattaaagaacaacaaatagagattatctccgagatagaattcggaggacgctatacgaaagctaaaatgctatgcattacaggaactaacggcaaaactaccacgagcacttgggcccatcacatcctaaaaaaaggaggattaaaagtaggactggccggcaatataggaaaaagcctggcccgtcaggtcgtcaaggacaaatatgatgtgtatgtattggaattaagcagttttcagcttgaaggtatgtatgattttaaagccgacatttctgtattgctcaacataagccccgatcatctggatcgttacgacaacgagatgcaaaattatgtggatgctaaaatgcgcatattacgcaatcagaccaaagacgattatgccatctattgtggtgatgaccaacgcttagtggatgaaataaaaaaaatcaaaccagcctccaaagtactggcatttaattacaatcctaagattgacagcatagccgctgtatacaatgagatgcttaagttcgaagtgcctgagcgcgaacctattgccatcaatatcagcaatatagccatcaaaggaaagcataacatctacaactcaatggccgcaggtatttctgcttttgctatgaacatcaaaaaagaggttattgccagtgccctgcaagattttagcggcgtaaatcatcgcctcgaacaagccggacaggtagcaggcgttcatttcatcaatgactctaaggccaccaacgtcaactcagtatggtatgcgctggacagtatgaacagccctgtggtatggatagctggtggcgtagacaaaggtaacgactacagtgaactgtatgacgtaatagataatgtaaaagcacttatctgcttaggggatggcagtgagaaattaaaagccgcatttaaaggcaaaataaaaaccattgtaacagctaagaacatgcacgaagctatagaacagtcaatgcaaatggccgagtgcgacgatacagtactcctctctccggcatgcgccagcttcgatttgtataaaaactatgaagaacgaggggacgattttaagaaagaaataggtcttttatagctaacagccaaaagcaatcaaaatgtcaaacttcttcaatcgtttttttaaaggcgacccaatcatatggagcatcatagtgatgttggctattgtttctattatcgaagtatatagctcaacgggcactctggcattcaagtatcaggatggcaacactagcttttacatcctgaaacacagctcatttttacttatgggctttggtataatatgggcggttcataatattcattataagatattttcctacgtatcggtattgcttttgccaatttctgttttcctgctaggcctcacactcgtcacaggcagtagcatcaatgaagcttcacgctggctgactattccggttttaggactcagctttcagccttctgaattggccaaattagctcttatcatatatacagcacgtaagttgtcgaaatttcaaggagaagaaggcgatccatcaaaagcattcaagcccattataatatggacattagccgtttgtacactcatcgctcctgaagacttatccaccgccctgctcataggcggcatcataatgctaatgatgtttattggacgtgtaccaattaagtatttattgggaactataggtagtggtatagccttaatagcacttttgattcttgtggcaccacgttttgacgatgtaggtcttttccatcgcgtcaacacctggacgacacgattggaaacctttagcgatacagagaacgccagcagtgatgcatcttaccaaagcgaccaagcaaaaatagccatctcatccgggggtatccttggaaaatttttcggaaatagccgtcagagcaactacttgcctcacccctactccgattttatctatgctatcatagtagaagaaggggggctagtcttcggtattattatcattttcttttatctgacactgctcttcaggtctgtttataccgccagtaggtgcaagacaagttttcctttatttctcatcaccggacttaccacagcactggttctacaggcttttgcacacatctttgtctgcgtaggcatcctccctgttaccggacaaacgctaccatttgtcagtatgggcggtacctccttgctccttacctccttatcattagggatgatcttaagtgtaacacaatacggcattaccgctaagaacgaacatccggaagaggagtttgaaccgaatgaagatattaccgaaagattagaattgcaaagcataggcgaataattcacacaagaaaaaagggctaaatagccccctttttgcgcacgcctttttttgcgtaaaacttccgtttaggttttttggcagctccctcttttttagatgttactgccgttttcttagagcttttgtttcgctgtccttgctgctgctgaggcttaggagggtcgtgatccatcaatggaaaatcatgcccgtctattagcgttaattttttcttgatgagcttttcaatatcacgcaaatattctttttctatggcatcgcaaaaggaataggaaataccttcgcggcccgcacgccctgtacgacctatgcggtgtacataagtttcagaaatatttggcagatcaaaattgatgacatatttcaaacgatccacatcaatgcctcgggcggcaatatcggtagctaccaatacacgtgtggtcttatctttaaaattattcaatgcattttgtcgtgcattctgcgacttattaccatgaatagcctctgcccttatgttcttctttttaagatggcgcactaccttgtcagcaccgtgcttggtacgggtaaacacaagtaccgagtctattttttcatccttcagcaaatcctgtaacagaaaactcttgttcggcttatcaacaaaataaacatactgctctatgatatctacagtagacgaaaccggtgccacagagaccttctcaggattattcaaaatactatctgccagcttcatgatattgggcggcatagtggccgagaaaaagagagactgacgctgcttaggcaatacctttagcaagcgtttaatatcatgaataaagcccatatcgagcatacggtcagcttcatccagcacaaacatctccacatcacgaatagaaagtaatttttgatccatcaggtcgagcaagcgccccggtgtagccaccagcacatccactcctgctttgatacgggccacctgtttaatctgcttcacaccaccatatatcacggtatgttttaaactagtgaagcgcccataagcctcaaaactttcaccaatctgaatggccagctcacgagtaggcgtcactatcaagccacggatacgcttacgctttgcagtgggctttacgctattctctaataattgtataattggaatagaaaaggctgctgtcttgcctgttcctgtttgtgcacatcctaagatgtcttttccttcaagaattaatgggatggattgttcctgtatgggggttggtgccttgtagccttgttggtctacggctttaataatgggctcgataagatcgagcgagttaaatgtcatttagtcttttttacttaatataatcctttcaaaaacagtccttcgtttccgaaaaggcgcgcaaaggtacgcttattatttttagtaccagaaaacaattactattacattaatattctataccttacaattattcacaagcccttttaaaagtcactccgaaacaataacaacacgaccttaaattttcaagccaaaaaatcgagattccaagaacagactgatattttgcaacatacagccatttcatggattttactaagtatcaacacttcgttaaattttcaatacttcgacacatccgacaggtggtcattgagcttgtcaaaatgctcagtgcggcgcagctcagcaagctatacaaaaaaccaaattagcttcgctgaacgttgtctctaatagcacgctgatattctgcgacatacaacaaatgtggaagttttgataaatatcaaacaatcaaactaataaaaaaagattaatgaactattataagtatttaaaaatcaaaaaaaggttaaccgactattatcaaataagaatattgatacatcattaaaagcaagcaggaaagatagaaaacagaaaccatcaccgaataaaagttcacctaaactatcaatttgaattttttcagtaaggtaaactatcaaaaagaaacaaatgctgcccttaagcaggattttttttgtatttttgcccgacttttacaaaacaccagaaaacaagacaaaaaactaacaatcagccacttttcattgttatcaacgtttgctttttggattttaactattgaaattttcacaattttatggaaaacaaaaaagtactactcgcctttagcggaggtttggatacctcttactgtgctaagtacctgagtgatgaattaggccttgaagtttacactgctgttggtaataccggtggattctcagaccaagagctaaaaaacattgaagataaagcttaccgcttaggctccaaaaagcacgtggcacttgatgtaactcaggaatattatcaaaagagtattaaatatatggtttacggcaacgtattgcgcaacggcacctaccctatctcggtaagttcggagcgcgtattccaagccattgccatcatagaatacgctaaggaaataggcgctaaatatgttgctcacggaagtaccggcgccggtaacgaccaagtgcgttttgatttaactttcgacgtattggcacctgaaattgagatactaaccccaacacgcgatatggagctcacccgcgagtacgagatcaactaccttaaagagcgtggtatcgaagacgattgggttaagatggaatactccatcaacaaaggtctatggggtacctctataggtggaaaagagactttgcactccaaccaaaccctacccgaagaagcttaccccactcagatggagaaagaaggcgaagaagacatcgtacttaattttgagaaaggagagtttgtaggaatcaatggtgaaaaggctgaaaatcctattgacgccattcgtcagttggaagaaatagccggaccttggggcgtaggacgcgatatgcacgtaggcgacaccattatcgggatcaaaggccgtgtaggatttgaagcggcagcacctatggtcataatacgtgctcaccaaatgttggaaaaacacaccctcaccaagtggcaacaatactggaaagaccaattgggtacttggtatggcatgttccttcacgaatcacaatacctggagccggtaatgcgcgacatggaagctttccttgaaagcactcaggaaaatgtaacaggtgatgttattgtgacattgaaaccttaccatttcgtactagtaggcgtggaatcagaaaaagatttaatgaaatctgaatttggtgaatatggtgaaatgcacaaagcctggacagccgatgatgtgaaaggatttaccaagatattgggcacacaaatgaagatagcacaatcacgggataaaaagtagacagcagccaggaagcactgggcagtcgtcagtgggcagtaagcaatgggcagtagctaaccctgtaaccttataacccatatcaaccaaagcctcaacacaggcaaacttaattgggcaaagcgccctcaactaaactatgaaactatacataaacgccatagggcactatacacctaaagaggtgattccaaacgattattttaagaagatgaacggcttggatgatgagtggatttttaaacgaacgggaataaaaacccgcgtacgctcgacggaagaagaaaacagtaactcgatgggtattgacgctgtaaaagccttggcaacacaatataccggtgctcttgaaggcgtagacctgattgtaggagctacctattcaccttacgataccgtactgactctggcccatgctgttcagcgcgaatttgaactgaaaggtgccaaagctaccaccataacctccgcttgttcttcctttgttaatgcattggaaatagcagagatgtacatcaaagccggaaaatgccaaaaagcccttatcgtagcctcagaatgcaactcttgctacagcaacgatgtgtgttccaagagtggacacctatggggcgatggtgccggatgcgtagtcatttcagcagaaaaaacgaacgaaaaagatcctgaaattgtggatattatttccgaaggattaggacatatcggccaggcagatgaatctgtttacctgcgtccggctaacggtaaactggaaatgccgattgggcgcgacgtctttgtaaatgcctgtacctatatggccaaggctgttgaagacatcaccctaaaaaatggcatcacaacagacgaaatcgactatctgatacctcaccaggccaatatccgcattatgcgcaatgtggcttcgggcttaaagataccggaagaaaaagtcgtcaccaatgtggataccctgggaaataccggtagcgccagtactgttattggcttatcgcaaatatacagtgaagtgaaaagcggcagcaatgttgtttttaccgtatttggcggtggctactcgatggggggtgtttacgtgaaattttaagggagacggatgaccgatgacgggtgaccgataacaaaagaaaacttagaactttaaactaataaacttagaacttaatattacaactatgataaaagtaggcatcgtgggagcagcaggctatacagccggtgaattgttccgtatcttactcaaccaccccgaggcagaaatcgtttttgccaacagtaaaagcaatgcaggcaacccggtatatgaggttcatcaaggacttataggggataccgacctcacctttactgatgagatgcctctcgacacagtagacgttatcttcctgtgtatggggcatggtttttctgaggaatttttcagaaatcacgatgtaccagaagaccttaaagtgatagacctgggtaatgatttccgcctggaaggcgaccacggttttacctacggcttgccggagcttaacttcaaagccatactaacatcaaaacgcatagctaacccgggctgttttgccacagctatccaactggggctgttacctttggctcaaaacctactgcttaccagcgagatcaacatcaccgctatcacgggtagtacaggcgcaggccagcgaccttctcagtattctcactttagctggcgcaataataacatctcggtttacaaagcttttaaccatcagcatgttccagaaattaagcgctctttaaaacagctccaaagctcttttgatcaagatatcaacttcgtaccagtacggggtgactttgcccgtggcattatggccattatgcatattgactgccctctggaactggacgaagccaaacgcatctttacagaatattatgctaagcatcagaaatttacttatgtgatagataaaaaccctgacctaaaagatgtggttaacaccaacaaggccgtggtacatttggaaaaacatggtaagaaactgatgatcattaccgctattgacaaccttgtaaaaggagcttcgggacaggccgttcacaatatgaaccttatatttgacctcgaacaaagcgttggtttagatttcaaagcgagtgcgttttaaggattcaaaaacgaccttatttaaaactcaaaaatcacggatatactatgtttaagaaaaacgaatactttgaaggaaaagtggcctcattagcttttaatggtgcagaaggagaagccacctctggtgtgatggcacccggagtgtatgaatttggcactgctacagtagagatcatgaccgtcatctctggtgaaatggatgtcaaacttccgggcgaaacggcatataaaacttacaaaaaatttgagtcctttgaagtggcaaaagatgtcaaatttatggttaaggtaagcgaagatacggcttatctgtgcttgtacaaataattcttttttactgttatcacaaaaagcaaagttaggctatttatgcttagctttgcttttttgttttatgtaagcgattggtattataccaatattacattaaaatgagccttataatttcattcttttgccttttatctgcgttaataaatatcaacgtagctatggctatgcctctcccgatgtacatcgggattgccttgataaaagacaaaacctctaaaatcatttaaggctcatcttaaaataaaattggtattagcgatgaaaacccgccacctccactcctatttttacttgcatctggccgtactgctcgtcgggttaaccgcggtatttggcgaattgatccagctttcgggactcaacctggtatggtggcgtatgttactgacctccacaagctttatgatttaccccaaagcgattaaagctgccggacaagtcaacaaaaaaatcttgtggcaatttataggtatcggcgtgcttgtagctattcactgggttttgttttacagctctatcaaggtcgctaatgcatcagtggctgtagtgatgatagctaccgttagtttcttcgtcgcttttttggaacctttgttaactaaaaagcggattaaggtgggtgagattgcccttagtttattggttattcccggcatatatctaatgaaccgtagcggaaagtacgattatagtctgggcattgcactaggtctgctatcctctttagttatggctttattttcggtgttgaataaaataatggtggataaaacccaaacacctgcccgtaccattacttttatcgaaatgaccagcggctttgtatttctaagcctgatagttggcagtacatccatttcgtcacatagcatagaaaccttacggcctgagcaaacaagctttatctatctgattattttagcattactttgcactgttctgccttttaccctcaccctaaaggcacaggaaaaactctcggccttcacctgtaattttgccttgaatctggaacctgtctatggcgttttgctcgccatgctgctactacatcaacacaaagagctggatgctaatttctacctgggcagtggcattattgtggggggagttattttctattcattgcttaagctttattatattaagacaaagaaagccgaaaaccagtagtctccggtataattctgaatttattggatgcaacaacggactagtgttcaaaagccccttcaccccttataaacacaggaactcctgactttcagaatcatattgcaaacaccacaaaaaactgtaaaatctgtcgtttcttaaaattaaagtttataatcctttgattttcaaaatggaatttataggtttgtgagactattcttacaaaccaactaacgggaagaaaatttcggacaaaaaaagcctcacagagtatgcgaggcgtagaatttcttcggcttatagccttgttgtgaattgtctttcgaatgcaaatatataaagaaaaaagatatgaaaaaaacattaggaatagatttaggtacaaattcaataggattagcaatcagaaatgaaaacgaatttgattggtttggagtatatactttcaagaaaggtgtaggatttggaaaaactggagagttttcctttgctgctgaacgaacaaagcatcgattatccagaagactatataatgcaagaaggtatagaaaatgggaaacactaaaggtgttaattgaaaatgattattgccctttaacgatcgacgaactaaacaactggaaacactataaaaaaggcagcggacgtacatttccgatgaataacaatctgtttaataactggattaaattggattttaacaacgatggacttgttgattactcttctccatatcaattaaggagagaacttatcgaatacactttggacacaagtttggaaaccaatcgtcacaaaattggtcgagctctttatcatattgctcagagacgtggttttaaaagcagccgtaaaagtggtgataatgagaaaacatccgtctataaaggtagctctgaaacaaaaaccataggcagaaacgaatatgaggaactaattattgaacacggaagcttaggtgcagcatttgcagaactggaagataaaggaataagagtgagaaatcgctacactttaagaagtgactaccaacttgaagtagaaacaatttgtaaaaaacaaaagcttaaggaaagtttgattgattctgtcacaaaagctatattttttcaacgtccattaagatcacaaaaaggcttagttgggaaatgcacactcgaaaaaaacaaatacagatgccctattagccacccaaggtttgaagctttccgtgcgtggtcatttattaacacaattaagtataaaactgaggatgctgaagattttattccgataccaatagagataaaacaaaaactctataatgaagtattttttagaaaaagcaaaacaaattttcacttctcagatattagaaaatttctagagactaatggaggtagaaactggcaccttaattataaaaagaaacttgacaaaacaaatgtagcgggatgtcctgtttctgcgagatttaaatcagtatttggtgaaaattgggaagctaaaaagataaagactgaacgtacaaacaaaaaaggggagattaaacaagttgaatacagcattgatgacatttggcatatcttattctcatttgaagatgaagaagtatttcaagagttcatactaaatactttaaaattagatgaggatcaatttaaggaactcacaacactttggaactcgtttcctattggatatgcaaatctgagcctaaatgccataaacaacattttaccattcttaaaagaaggtttaatttatacagagtctgttttattagcaaaaataccgcaactaataggaaaagagcgatttctagagaataaagagtttttgctaaatgcaatcaaatcagaaattgaaacaaacagaaacatcaaatttaaattaaacattgtcaatattttaataagcaagtatttctctgaatttattggtcgcagagccaaaggagttgattcgcaaatagaagaaattgcaaacaaagaggttcaagcagcactaaaatcgtcaattggaaacaaaacctggagtaattattcggaagaaactaaaaaagaatattttgattttgtttactcgaaatacatcaagtttcttgacggaaagcaatccaagaaggaaaaagcgtcctattcaagcaataaaaacccagaaatcgattactatcgaatgcctcacctactagatcaaattaaagattttcttataggaaatttcaacttgactgatcaagcagtttcaaagatgtatcatccttcacagattgatatttataaaaaagaagatggacagacttatttaaaaagccctagaactgttgcatttaaaaacccgatggcatataaaaccctttatagattaaaagacgtaatcaaccatctaattgaaatagggaaaatagataacgaaaccagaatagttgttgaaattgcaagagaattaaatgatgctaacaagagaaatgcattagaaacctatcaacgccgcagagaaaatgaaaacaaagagtttgctattgccattactgaattattaaaagaccctgatttttctgggacagctgatcccaatagtaaatcggacaaagacaaatttagactttggactgaacaaatcaataacaaagatgaagtatttagagacatagtagcgaccaaagaagacataaaaaaatacagattgtggaaagagcaagactgtcaatgtatttataccggtaaaacaataaacctcacagatctatttaacccgaacactatagattttgaacacacaattccacgaagtttgtccttcgacaattcccttgcgaatcttactgtttgctatgcagattacaacagaaatgtaaaaaacaatggcattccaacagaaatgccaaactatagtgcaagcacacaagactattcggcaatagagcctaggctagaaaagtggaaagaacgtattgatgagcttgaaaagcaaattgatttttggaagtttaagtcaaagacagcaatggataaggagggaaaagacaaagccataagagaaagacatttgcgctattttgaatatgactattggagaaacaaagtagatagatttacacgagaggatgtgcctcaaggatttgttaacagtcaattaagagacactcaaatcattactaagtatgcttttcattatttaaaaactatttttaacaaagtagatgtacaaaaaggctcagtcacttctgaattcagaaaaatatatgagatacaaaataaggatgaagtaaaaagcaggagtaagcaccaccatcacgctatagatgccgcagttctaactcttattcctgactcagctaaaagagaagagattctaaaaaaatcctatgagtatgaagaatatagacgtaagcaatatcatgataaaccatttgttggatttcatcaaagccaaattactagtattgaagaaacactactaatcaacaacatacccaacaaggatcaagcactatccaagtcaaaacgaattgttcgtcaccgaggcaaagtagtatggcttagagataagaatggaaaacttcttaaagatgtagatgggaacaaaatcccaaaaattgcacaaggagatagtgtcagaggacagttgcacgaagactcatattatggtaagattaggataccagaatatggcgatgatagcaaaataaaacgtgataagaacggtaaaattttaatgtcagacgaatattgggttgtcaaacgagaattaatcacagatctaaaaattgacaagggaattataaaagatgaaataattgacaaaccgcttaaaaaacacatcgaagaacaattaaaacaaggtatagcaattaataaggtgcttgatttcaatggaaaagtaattaggcatatcagagtacgcccaaaagcggcaagagggtttgtttctcctgataatttgaaaacattaaagaaacatacatacgaatcgtcctataaacataaaaaagacatatttgtcaaaactggcgataattatgcctttgctctttatgtatcagaagatgggagaaaaaaaattatttcacgaaatcttttcgagatagcaggatttgaatcaggtacacctttgaaatttttatttgaaccctatattaatcttacaaagactaaacaagctaaactacatcacattttccaagttggtcaaaaagtcatcttttatgagaataataaaaatgaacttaaagaattagataacttatccagtcggctttatcgtgtgcacactttggcagatgcaaaacaaagcttgattaggtttcaacatcatttagaggctagaagcgatcaacagttgagtttagatttccctaaaagtactttcggagttagaggtaaaaatggcttctcaaagttttcaacagatttcattcaaccaaggttgctacttagtcccggaaaccttaattgcattattgaggatgtcgatttcgtaatgtccttgcatggggaaattgagttgttattctgatttcacagctattcacgaggtaactcaaagacatcccgtgaccaataataaaacacaaataaaagccgtatgctggaaactaaaagttgaccgtttagggaatatcacccaattcataaggtaatgaacaccttttcactcggggcgcgactctaagtcgcactccgagtagaaggtcaacatcaacaaacactatggaattcgaagcagggcacatataccacatctataatcaaggcaataaccgacaaaaggtgttctttaaacaggagaactatttattctttctaaggaagttaagaaaacatctacttccttttggcgacctgctcgcttactgcttaatgccaaatcattttcacttgatgatgcaggtaaacgctgtggagcgtgtttttactcggagtgcgactccaagtcgcgccccgagtaaaaacacaccacccaaaaaatacaccaccaacctaaacaaagaaattggcatactattagcctcttacacccgggccatcaacaaacagcaagaaagcagcggttctctattccggcaaaaaaccaaagccgagtgtctaactctttctgaaggcattacgccctcattttacaatactgaatttggcactcaagggcataatgcatttcctgaagaagaataccttcaaacttgtttcgattacatacaccaaaacccggtaaaagcaaagcttgtaacactagcttccgattgggaatactcttcagctaaggaatacgaaggcttaagaaacggaactttggtaaatgttgaattagcaaaacaattgttagctatttagtttagtcggggcgcgacatggagtcgcactccgactaaacgaagtagaccataaaaaactacaagaatgattaaacgcactctctatttcgaaaatccgtactacctgcatagcggacacaaacaattagtcatcgaagtccctaaagtaaaaggtgtaaaaaagaccatcccaattgaggatatcggtatcattgtcctcgatcatccgcaaatcacattaagcaatgccttaataatgcaattaatggataataatgtggccgtattttcctgcaacgaacagcacctgccactcggccttatgttgccaatgtatgcccaccatgcctctaccgaaaaaatgtatgcccaactaaactcttcgcttccattgcgcaaaaatctatggcaacaaaccatcactgcaaaaatcaataatcaggcagctctgctagaaacaaaagggattaaaagcgaaaatatgcgctattgggccaaatcagttaaaagcggagatcctgataattatgaagcccgtgcagcagcctattactggagcaatatttttcctaacatcaaagactttaaacgtcaccgctatggagatgcccccaaccccttgcttaattatggctattcactcctccgtggtattgtagcccgttcactagttggcagcggcttacttacagctttaggcattcatcatcgcaataaatacaatccttactgcctggcagatgatattatggaaccgtatcgtccttatatcgacaagttagtctgtaatataatggatagcggaacaccgtatcaggaattaaataaagacatcaaacttcaattgttttcaatagcaacaatggacatacaaatagatggacaaaaaagtcctttgatggtaggcgtgcaaagaacaacggcatcgcttcggaaatgtttcgaaggcacagtgagaaaaatagtttatcccgaactaatgtttaatgatgagcaccctttctaatcgtttaaatcaataccgtataatgtgggttttcgtatttttcgacttaccaaccgagacaaaaaagaatcggagagatgccaccaggttcagaaaaaatctgatcgaagatggctttgctatgatgcagttttccatctatgtgcgacactgcaatagtagagaaaatgccgacgtccatcagcgacgtgtaaaagcagttcttccccccaaaggacaagtaattatgttttgcctgaccgataagcaattcggaatgatggaattttacaaaggagaggttgaaagcaaaagacctgatgtcccgcagcaattggagttgttttagttttttttactcggggcgcgacttaaagtcgcactccgagtaaaaaaaagccaccatccataaactgaacagtagcttttccctctatttttctttttctatatttggcgatataattttgatataaaacacaataaccttaggtctgttgtgacaaatatatcaaagaacaaattgaaagcaattcacaac

SEQ ID NO: 4037 - DNA, 16135 bp, synthetic construct
  misc_feature 1..16135: note = Synthetic
  source 1..16135: mol_type = other DNA
tatcggcagagaaagttgaaatcagagacaggtacaatgatctgtttgaagggttttatgagcatcttaaagaccgggacctgaaaagaaggctggctccctccgatacagggttagccgtgaactccattgctgccattatcaacaaagtcaaaaccggcctgaccaaccgttttgatgagtattgttacgtacagcccaaacttaagttttcgattcccgaagaagactccgacactattgtgttacctgtggaaatgatggaaatactctttgccagtgatgagatcaacccatttgaactccccaggccccatgaacgagcctataactacatcatgtttgcgttgtctactacctgccgtgccagtgatatatatgagactacagcggatcatatccgtgaaaccaatggagaactggaatttcagaaactaacccgtaaaaccaattctaaggtcaactcctatctgtatccagtagtagttgatttgatgaaccggaatattgaacgttacggggatgctttttacccattgggacgagaaaataccacccgacaatcctatgtctccaatatggccgggacccttaagtctttcttcaggcagtttgactgtatgcatgaggtctatatgcaagaagtacgagattccaataccagggagcttactatcgttaagaagccactatatgaaatggtcgctacccataccatgcgaaggaccagcattacctatatgcagatcatgggaatgtccgatgccgatataaagcgaatgtcagggcataccaagaactctaaatcctatgagaagtataagagatttgttcccagtgcattcaggagcaacgttcagaactacatagataggctatcacaaggcaacctggtggagcaaagacctgctcctgacgttttaaaggtcattagggacgaaagaggagctgcataactataatcattaactgataagaagggagtgtttgactccctttttttattcccatccaggcaaggattacacctggtcattgttctcaggcccagtggaaggcattatgtaaatttgagcctcgaaaaagctagatgattcaagaacgtaaagatcagaatgacgaagacagcaagttcaaagcgattacatcaattcctagaggctaaaaagattactcagaaggagtttttgactaaggttcaaacggtatccaagaatgatctaaaaaaggccttggagggtaatcaaatcagttgggctgttgcttttgcaattcagaagagttatccggattgcaacccgaattggatggtaaccggtgaagaagaaatgcttttagaagaaaagactcagaccatcaataaaaggattaaggagatacgaatttcaatgggcttatcagcggcagaaatggccaaaaaactaaataagccccgctctacctattcacagattgagaacgggcaaatgaaggtaaccttggagatggttcgggctattcagggcataagtaacttaccctatacttatatcatagatggtggttctatagagtttgctatcaaggaataaattaataagatcgaggagctgaaaaaggaaaaagctgaattggtcagggcaatagagatgttgcggaaagcttaggaaaaaactaaaagggattgaattaggagatttgaatctttcattagagctattttcatatctctgtctctccccatacttaccaagcctataccaattcttttctaattattttgcatattgaaagctgaaagggaggctgttctgtaaatctgttgatgatttacggaacggtctttttttgtttgggaaatagaaatacgggattgggaagataatggcccggtgagaggggagaagcgggatattgaaaaaataaaagccccacggcgtacgcagggctgagaaaatcttcggcttatagccttgttgtgaatcgtaatccaaacttaaccaaattttttaattgatggaaaaaacactcggacttgacttaggaactaactcaattggcgcagcattgagagtcggtaatgaatttgactggtttggtgtgaaaacctttaagaaaggtgtaggaaccggaaaatctggtgagttctctctggctgcagaaagaaccggccaccgctctaagcgcaggctttacaatgccaagcgttatcgaaaatgggaaaccttgaaggtgctcatagaagctcgttactgccctctttctatagaagaattacataaatggaaacgctatgagaaaggggtgggacgtgtgtatcccatagagaataaagaatttgatcaatggattaagcttgattttgatggcgatgggacgcctgatttctccagtccctatcaattgaggagactgctcattcaggagaaatttgatttatcagacaaaagaaataagcagatgcttggaagagcattttatcatattgcccagagacgtggttttaaaagtagccgaaagggtggtgataaagaaacctcggctattcatgaaggaagctccgaaacggatgcggttccaagagatttatataaggagatgctcacagaatatagaactctcggagcagccttagctaaattggaagacgatggcatacgcataagaaaccgctacacacttcgaaaggattatgaggaagaaattaagaagatcgcagaggttcaggaattggatgagcagataagggagaaaattctaaaagcaatattcttccagcggcctctccgttcgcaaaaagggctagttggtaaatgcaccctggaaccaatgaaagccaaatgctctatcagtcatccacaatttgagttgtatcgggcatgggcatttattaataatctggagttctatgattttgaaggtgaggaatggataaaactgccaattgaatggaaaagaaacctgttgaatgactgctttttaaaagtacgaacctctttcaagtttggtgacatcaggaaaaacctaaataagcaggcaggcaccaagctgacgctaaactacgatgtgagtcagggaagaattgacaaacagaaaaatctttcctctgttgacaaagtgagtgtttcaggttgtcccgttgctggtaggtttaaaagtgtactcggagaaaattggcataactggagctatgagaccacccgaactaataaactaagtggtgaatcaaaagaagaaactaaaatctattcaatcgatgacctttggcatgttctgttttcttttgaagacgaggagtattttgaggaatactgctttgaagtgctcgattttaatgaagacaaaagaaagcaactcctcactctttggaagagctttccagttggctatgcctcccttagtttaaaggcgatcaacaatattttaccttttcttgaagagggcttgatctatactgaagctgtgctgctggctaagattcctgaactgattggtaaggaaaaatttcaggagaataaagaattattgattcaggagattagggggatcattaagcaaaaccgcttgaagaagagagtccttaacatagccaacaacctcatttcacaatactatttacttgagcatggtaacggacggtttgcccataaggactatggatataaactggcggatagcgataaaagagatgtagcaaaagcctgcgttcagcattttggagaaaagcgatgggagaagatggaggatgctgaaaaggaatccacagaagtcgctgtgcaggacaaataccaggaattttttacgaatcctaagcggatgcattttaaacttccccgcctgatcgatcacattcaggaatttctggctgatcattttgagcttgaccaaaagcagttgaaaaaactataccacccatcccaaattgatatttatcccgaatctcggcctgccgatgatggtaaatgttacctcggttccccaaagactggggcttttaaaaatccaatggctatgcgcaccatgcacgagctccgatcgctgataaataaactgattgaagacggtaagatagacgaagaaacacgaatagttgtggagactgcaaggagcctcaattacgccaatatgcgatgggcaatagagaagcatcagcgtgacagggagaaggaaaacaaagaatttgcaatcgccatttctgaactgataaaggattcggagtttcaaggacaagctaaccccaatagcaaatcagacattgataaattcaggttgtgggtagagcagatcgaggattttgagaaagtcctaaaagttgtatccgctacaaaagaagatgtagagaagtactatcactggaaagagcaggggtgtcgatgcatgtacacaggggagtttatcagtatcacagatcttttcgatactaacaaagtggactttgagcatactataccaaggagtatctcatttgataattctctggcaaaccgcacagtggcctacgccagctataaccggaatgtaaaaggaaataaacttcctaccgaactgcccaactattgggaggataccaaagaaggtaaggcaatcaagcccagattggagacatgggaaaacaggttgaaatcctataaggagaaaatagagcgtgcaaaagccgcctccaaaggtgcgcaggataaggactctaaagatcaaaatgttagaagaaaacatatagcgcagctcgaatatgactattggaaaaacaaactggatcggtttaccagggaagacgttcctactggctggaagaacagtcaactcatcgatacgcagatcgtttcgaaatacgcctttcattacctaaaatcagttttcaatcgggtagatgttcagaaaggaagcaataccgctgaattcaggaagatctatcaaattcaggacgaggacaagaaggatcgtggcaagcacagtcatcacgcggtggatgcggccgtactaaccttaatacctagtccttctaagatgaaggagattttgtacaaggcttatatgtattatgaaaaaaatagtaagcagtacacggaaaagccgtttgagggctttcatcaaagccagatcaccgaaatagaagataaaatcctgatcaatcaaaaatccaaagaccaggccttggcttcagggtctaaaaaagtcaggaaacggggaaagattgaatacttgcgagacgctaatggtgaatttagactagatgaagaaggaaagcggattccgaaaattgcaaccggtgattccattcgaggtcagcttcatttggatactttttatgggaagattaaagtggttgaaagaaatcctgatggaactcctagaagaaatgaggatggtgagctggtgtttgaaaaaaagaatggtgagcacgtcttctggatggtagagcgtgtaaaagtctccgattcaaagcttaatctgaagaatgttgttgatccacttttacgccaacacatggaaaagcagattaagaatggaaggaagctaaatgaacttgaagatttcaatggtaaaattattcgacatgtaagatgcaaatcacatgtcactgaacccatcacattaaagaagcatacttataaatccaaacatcctcataagcagtcttactatgtggccaatggcgaaaattatggatatgctttttacgagggtctggtaaatggtaaactgcacagagattacgaaatcataagattgatggatttagcagttactaataggggaggagaagcgaccgttttacccgccatgtcgattggcaaagacactaaaattccattacgcgccattcttaaacctggacagagggttcttttttatcagaatactccagacgagctaggctctctgaatcctgctgatctttctaaacgcttttataaagttgtaaagtttgaaaaagatgggagaatagtgttcgagcatcattcgaatgctaaagatgataatgcccttaaagagttggcaggagaacacggtaaatcaatttacaatggtttctcaacaatcaatttcgaagcaccttggccgaagctaaagctttccagaggcaatctggatcttcttatagaatgtgtagatttcgatcaagatgaaaccggcaaattaacttggaaaggttaaaatcaaaagtttttcagggcacctttaattttcaaaccaaatcgatgataaagaaaacgctctacttcggcaaccctgcttatctgaagaaggatcaactgcaattgcgcgtggaataccctgaggatgaggaaaaaccaccaaaaacagttcccattgaagatgtaggtatcgttatcatagatcacccacgggtcaccattacccaggctttgttaactgcgctaattgaaaacaatgctgctttactaagttgcgatagccgtcatctgccggctggtctgtttatgcctatgagcgccaatcatatatacaccgaaaagctacgctaccaattggagtcttccgagccattgcgtaaaaacctttggcagcaaacagtaaaggcaaaaattgaaaatcaagcacgggtgcttaggttaatgggaaaggaagcggataatatggattactgggcttctaaggtgcgcagtggtgatcctgataactatgagggccgggcagccgctaattattgggtaaggttaatagatggtgatgagccttttaaacgaggaagatttgaagagcctcccaacaacctactgaactacggctatgctgtgcttcgcgccatagtttcgcgtagcctggtggccagtggcatgttgcccgcagtaggaattcatcatcgaaacaaatacaaccccttttgcttggcggatgatgttatggagccttaccgccccttcgtggatcttttggtactggaaatagccgggcgttatgatgacgatgaaatagagcaacttaccccacgtataaaacaggagcttttggtattgcctaccttggatgtgaggattgaagaagcgaaaagccctcttatggtagggatgcaacgtacaaccgccagcctgatgcaatgctacgaaggggagaagagaaagatcgcttatcctgaaattcaatttcctgattagattttccaaagttccaaacttttgaaaatcttgtagaccaagaaaatgacctcaatcaaccgctttaacgcctatcgcattatgtgggtatttgtgtactacgatcttcctacggatactgccaaagatagacgaaatgccgcccaatttcgcaagaagctgatcaaagacggttttacaatgatgcagttttccatctatacccgtcactgtgccagtcgcgaaaatggcgatgtgcatatcaagagggttaaagcgttcttgccacctaagggagaagtgatcattttcactttaaccgataaacaatttggcatgatggaattctttcggggaaaatcagaagccgaaaagccggagacaccacagcagttggagcttttttagtatttgttttttaattctgattttggccttaactgattgaaagtaaacttagtccgcctaggtatactgtgacggactaagttacaattcaatttgaaagcgattcacaacccttggccgttgctgcaatagcaacaatgtactgtgacggactaagttacaattcaatttgaaagcgattcacaactttcgactgctataaaaacgaaagcgtcgtactgtgacggactaagttacaattcaatttgaaagcgattcacaactaggtagtgcattttcagaaaaacagaaaaactgtgacggactaagttacaattcaatttgaaagcgattcacaacaaagaagcctcctgggcttccgcaataagactgtgacggactaagttacaattcaatttgaaagcgattcacaacgcgtgggcatcaaatgtactaaaacttgtgactgtgacggactaagttacaattcaatttgaaagcgattcacaacacctgcaagcgtatacggtagtctaccgcgactgtgacggactaagttacaattcaatttgaaagcgattcacaactacatactatgaaagtctgacgggtaaaaaactgtgacggactaagttacaattcaatttgaaagcgattcacaactgtaaataccccgcaggagtttcagcaataactgtgacggactaagttacaattcaatttgaaagcgattcacaactgctacgaatagtagaatgagcaaacctaaactgtgacggactaagttacaattcaatttgaaagcgattcacaacttgaatggctttacaaaattaagccgttaaactgtgacggactaagttacaattcaatttgaaagcgattcacaactactcttacgacctggagtcagacgattccactgtgacggactaagttacaattcaatttgaaagcgattcacaaccctgtgcatcacgaatctgcgccaataacactgtgacggactaagttacaattcaatttgaaagcgattcacaaccctgccactagtgccaatcttctcaattaaactgtgacggactaagttacaattcaatttgaaagcgattcacaaccgtatctccggaacaactcattcatacgttactgtgacggactaagttacaattcaatttgaaagcgattcacaacatgtgtgttgatattacgatttatgcggtgactgtgacggactaagttacaattcaatttgaaagcgattcacaacggccatggtgctttgtgataaatgagaaatactgtgacggactaagttacaattcaatttgaaagcgattcacaaccgaatcgctcagtagtacttcatactgacactgtgacggactaagttacaattcaatttgaaagcgattcacaactgtttattgagagtaaggattacccccaccactgtgacggactaagttacaattcaatttgaaagcgattcacaactgtttcgcgatgcaggagggtcggtgatttactgtgacggactaagttacaattcaatttgaaagcgattcacaaccaattacaaagtgcaataatatcacaaccgactgtgacggactaagttacaattcaatttgaaagcgattcacaactattcgctgacaaaagaaccgaatctcatgactgtgacggactaagttacaattcaatttgaaagcgattcacaactactgataatttataggcctcgttaatatcactgtgacggactaagttacaattcaatttgaaagcgattcacaactacatacgccttgccagttgcaggggcctgactgtgacggactaagttacaattcaatttgaaagcgattcacaaccaaccgatccattcaccctcaaggtataggactgtgacggactaagttacaattcaatttgaaagcgattcacaacctattaccccggctacggtcctgtctctaaactgtgacggactaagttacaattcaaaaggtcaaaccgaataggtaatgtagaaagttttataggtctagtttggtcatttcatttaaaaccatgaatatgaccttcacaactgcccaccagagctttattgatcattgtaaatttgagaaaaacctatcggacaaaaccatagagttctacgaaattgacctgaagcaattccagagttttttaaaatcgaataacctaagctaccaggtttccgaaatagataagtttgcgctgaagggttacctaaaacgcctatcacatttcaagcccaaaacaatcaagcgtaaattagcaacattgaaagcacttttcaactttcttgagtttgaagacatcattccgtttaaccccttccgtaagctcagagtaaaaatcaaagagcctcaggtcctccctacactgatgaatgcctatgaggtgcgaaaaatttttaaagcagcctatacggctaaagagcaactgaccgcctcagatgcaaactatcttataagagtcagggacgttgccgttttggagttgttgtttgctacaggtgtcagagtgtctgaactgtgtgatctaaaagatcagaatataaaccttcacaccggggtgatcagcatttatggaaaaggcagtaaggaaaggcttatccaggtttgcaatgcagatgtactcaatattcttcgtgagtaccgaagtcattttgaggaggcgattcgagcttgtggtttcttctttatcaatcgtctaggcaagcgattatctgatcaatcaattcgtgggcttatcagacgttatacccaattggcagcaatcgataaaaacatcacccctcatacatttcggcacactttcgctacccttctattggaagaagatgtggatattaaatatatccaacactttttagggcatagctctatcgccaccacacagatttatacccacgttaatagcgccaaacaacaacaaatcctgagtaccaagcaccccagaaacggctttgagtttggatcatgattaagattatccaatgaaggataactccgaattatggtggataagaatttgataagtgtgataatgacagtttacaatagtggtaattatcttcacaacccactttctagtatcctagcacagtcctattcaaactatgagcttattgttattaatgacgcttctactgatggctccaaagagtgtatagaagtctttgcctctcaaaaccctgagataagcttaagctacttcgaaaatcacaaaaacctcggacaagctgcatccttaaatattggtttagacaatgctagaggagagtatgtctgtttaattgattcagacgatcgcatatctcctaactttctctctcttttgatggaaaagattagggattcacttgattttgtctattgtggatttgatactattgatactgtcactagtaaagtcaccccttatctctccaatagaaagtacttagatgactccaacgaaatcatcaggcagtatatgaacgctagaaatcactttgcatttgttggagctatttaccgtagagaattcttggataagaataaaattcgattcaatgaggtaaatcgacacggatgtgacattgagtttatctgtgatttattcctaaaaaggcctagatgcggatgtgttcatgagagtctatattattatttggtccgaccaaactctttatcaacagacccgcaatgccctaatatatttcattgtgtagaagcacttgaacgtattcaaggaaaaatgccaacacgtttagggaaactgcgctttgcattaacccgaaaggcaaatatgatatttcatgtggtatgtgaactatacgaaaaacgaaccaagaagaagatttcaatcagaatgaagtattactacatctggtattttctttttgaaatattcagaaacccaaagcaaaagctaaagtcaaaaaaccttcgggcacttaacttctttgctaaatagtctaatacaatgaaacggccttcaagtttttcgatactagtgctttatcacaaaggtgaatcctatttaaaagcttgcttgagcagtcttgtttcaacggctcaaccatccgatgaaattttggtggtggtaaataattcggataaaactgttcacaatttaaccttgtatcccgatagagttacttacttgcacatttatgaaggcttaggacacgcaagagcagtcaacgaaggcgtgaaatccgcagcccatgatcatgttatcatttcagaccacgatcttgtttttcagcacggatggattgaggctctttgggaactctactctagtgatagctcaattggggctgtgagttgcaaagtcctaaacaccagtaatcagcgagtattagattatggaatcgcctattctaacttcaacctaggccatccctttatggatttgccttcaaaccatccattagtccagaaagaccgtatggctcaaatgatttgcacaggtgggttcctaatcaaaaagaaggatttggttcaagttggaggatttgaagagagctttggaacactttacacggacttagatatgtgcttgaaattgaaacgtgccggcctgaaagttgctgcagcggctggtgcgttagcctatcattttggaggggatttttcattaatcaatagatcttacaaagaagggcatctcaaagcagatgttaagggcgcttttatgcgcaacaatgtggatgtgcttgagcctgacatgcatgactattaccaaatgtcggccgtgtactttaaaagggcttttggggatttcggaaaatactttttctgcaatatgatgaatgtggttgatccgacttggtatgagaagattgctcaatcaaatggagctgaaaagtatgatcgtatacatagaccatcaggttatcgggatgcggccaatattggtttattcgaaatattaggttacgatctgatgtccttaggtgttcctattgcatatttcgtggacagatatatcagtataacaaataacactttttggtggaatgaaagacgcggaggcaagaatgacattgtgattgataggaatgctaatattctaccagttaaagcgataatatctcaaggaaatggatagttgaagctttcagttgcaaataaagtgaagggtacttttacctgacggttacttattgccttatgaatatcggaaacattagtccctcttaacaaatagtgtttaataggaaatggctcctcaatcatgtattctatccaaaagttagcagcatcccacaacaaggctccgttactaggggttatataggtgtttttagtatttttttgtaaatcagattctaacttttcaagtgctgctacaaataatgcttttgcaccatgggtattaccagtatggcaattaagtatagcatgaaggtgaagggcttttatataaaatctatctatgcgcgaaataattgacaggtcctcaatctcatttatcatctccttgagtaaatctagatcttgtttgtctaattgagtttctgaaagttgctgtctacaattaagtactgcttttgcaagtaatcctcgtaacatataataatggctgtaactcttttccgtgaggcggattagctgctcagcggaccgtattgccacttgaatattacccctaagaccttctaaatgcgccttgttttcaagacaggaaaactcgatacttggttcgagttcgttgatttctttcctgttaacttcgtagaatgaaagggctctttccacgtagttactataatgctcaaaatcctttttctcactgcgataaatcccgcaaagatcaattaagataagacatgcaaattccttatgatcgtattgcaaggccatctcaagggcttttttaccgatttcctcggctagcttcatatcccccataccttttaggcacacacatcgcctattcatataatttactttgatcttgcttagtgtataggtgtctataactccacttaacaggtcaactttagacaattcgtctcgtaaaatctgttcacctatctctggctttcctaataaactggaataactcgcatactgacgaattataccgcataaggcatatgctgcgtggttagtggtgggcgtaaaggaattgagccgttgacgacaagtccaaagccgatttgtcatattctgaacctgcccttcagccgataggttacatatagcctgtatagcgtctatataggaggccgggggaatattattaggcctaataatgaactcgtacagagcctgggcatgcatttttttccgaattgtaggcacagtgtctttaagagttttaatggcttccaatgctgcatctaagaactgggcatcattacccgacaatgcaaatcgtgctaaaggatatatatcttcaactccactttttaatagcctctctgcaataacatcagtaagtgattgatcttgaataaaatgtaaatatttattttgattctcgtgattaataatttctatcaagaatcgctctatactcggatggtaaaaatcaacttgattcccattagtgtaacgcacccaaccattttctatcagacgatccacttcataagaagaacagcccgaaagtgacataaatagattaacatcaccttctcccaaataagccagcacaagcagaaaactcaattggtttggcttactgataaataattttaaccgttcggtaagaatgtttttggtagttccgctaactctcttaatcagctcgtaaaaaacttctgtatccttaacaaaaaagaatccatcatcaaccctggcaatttgctcatcttgtgccgctaaaaagagttgatacaggtctaatgggcgtggtaaaacggattcataaataagatcggtaagggctggatagtgtgttgtgaatttttcatccaaacccatcgatccacaaatggtatttaggaacatttccactgagtttctactaaattgaggaaggtcaaaaaactgtattgacccctttacaaacgatgcttctttctgtaatttgtttcgaaataaagcagaatcagtggagtaaatgagttcgtcctcattaaaagcaaacaacagagctacctgacctaccgtgccggtgatgcgttctgaaagtttagtaagaaaatgtatagttgagtgatccagcttttgcacattgtctatgagcaaagcggccctttgacttatcaaaccctgaatggctaaatccaagatttgctctaattcttcattaagggtattcttttctgtttgagactgatacacgtagtagcaaactttgtcaaaaagagtatccctattcttgctacgtgtataggtgttcgtgtcagaagaaaacaagtttatatttggtaatctccaaatctgagctaacaaacctattacaaaagtattgaatacctcgcaccgatgatctctcccatccattcgaagtacgtgataattgttcgagagcaatcgcatttccgcttcttccagaaaacgggttttaccaactccactcttaccacttacagcagcaagtgtaatagtgtttttacccgatattcgtgtttcgaaggcttcaagagcgtcatatacaggtttccctactaacgagggtctgttcagtctcggaacatttacttggatgggtgggagagctgtagttttttttccaatgctatatgatattgatggtatggtttgcactcttgtgctgaccggtgctaaaagtattttcacacttgttaactctcctggcaataactctttatgtaggcagtgatttgggtctgtgtttatagcattacgattcagcaagttgattgcattttcactttccataaaaggggataggtcaattactatcttttcgctcttagcaatttgattggagcgaataaatatttcatacaagcaaggtgtgttaataggtacaagagtcttgcgaaatttatccacaccatcaatcccctctaattgagagcggtctatatgtacatctgtgctaaaagacgggacaatatccaaagcgggcagctccgaagctttatagatcggttgaacagcaggaaaaaagcgtcttaaaaccagttttgaagaaaggattagagcttcaagcttttcatcatcaaaaacttgaacttcgatatttgaagattctgaaaatcgtgacagatgttgccttgtattttcatttaattggctaaaagaaaatataattagcctcttaaccttcgggtggtgaccaatggccataactaatgtattgcttaccaccttgattgataaaggagctttatacattttgcattctgcccatgcctccaagccggttattgagcggtcaacgaagtccttacctccatcccatgtccgggttgtttgattccaatttccactaaaatgagtatccaagactaggcgaatcagctcctcgaatagctctccatcaaaaacttctctcccgttattatcttttttaaagctggtccaatagttcgaaccaagaatattcataattcggagttatctatactaatatcaataatacaaaattcaaactattgaaacggaaagaatggagttgtttaaatattgttataaataatagccggtaaaaaacccctctat

SEQ ID NO: 4038 - DNA, 16015 bp, synthetic construct
  source 1..16015: mol_type = other DNA
  misc_feature 1..16015: note = Synthetic
tgcccccgttgaagttggtaacccatattcctttttgcacagatgataaaatggtatcgaaacctctttctcccaaagacatttgaagaatagacggggaagatatggtagggactactcccattttcagagaattgtatgtgtctatgaaataattttgcagtatacctttctctataatcgttctatcctttgtctctacgccttcaccatcaaaccatcgggcaccaaaggagcgttttatatgaggtgtatcgtaaagggtaaagatatcagccgttatcttttttcccattttgttcaataggaaagaatttttctgttgaagtgctgttccgtacattgcactcataagcggagataatatgcgcgacgaagtagtattgtctaacagcatgtcatatttgcccgattttatcttttgttgcccgatcttgcgtaatgctctgttgaatgcaatttttgctatcccactttttttcagatcttcccaatatacagcactgtcgtaccagaaggattcagcacgagcgtcaccatccgttttcagcgatacttctaccatcaggttgaacgctgagtctacacattcggcttcaaatccattgctggcaatcatatattctgctcctacgccatcatcgtatgccgaggtgacagagattatacgattgtcgctgccatgtatttcgtctacagactgctttataagatttaacttctcacttgttgggatggcctcaaagcttccgtcacataggtctaaatcagtttcgtctcctctgaaatatctttgcgtgtcgggcagttggcgaaaagggtcttctgataaatatttagtagacgtgatgccttcttttataaaagactctaatcctgatttttctatccgattggtagaaaatgagccgtatctgccatctataaagaattctatatagagtttgttttcactgctttggtgaagtttatctaattgagtgtttctgtattcgaaagagttgttgtttgccgtgattactgaaacccgagctccttggcatccattagccagagccagttgcatagaccattgggcaatatctttgtgttgcttacttatcatatctttgttgttgtggatgcaaaaatacacagatttagtgtaaaaaagagaaaaagttagaatagaaactttctagctgtacgaattaacgttctctaactaagctgttgtgattcaaagtctgtacaatgtttctcgagaaaagattctaatttaatttcttaaagtttagtcaagttgcagaggagtgttatagtgtgtacttgtaaatagagattgaggggtacttattatagcatatcaaacgctacagcaatcattttttcatatataatagaaaaagcgacaccgaagtgccgctcttgatgttttcacaacggaataatcattattgtaatttatttctaaatatcacaaaaaatatttttattcagaaaattcatggaattgttaaaaataattatctttaaggactcattatcagattgtagagtgaaatctgattttgttaaattacaaaagtttataatctaaaataatgtgtttgatataaccttttaaacacaaatataatacttatggaaaagtgattaaattcagacacaaatgaaaaaaagtatcagttgacattagtaaatagaaatgttgaaaaagaaaaaccaacattgagacttgaaataagtagaaaatcccacggagtacgcgggattaagaatttcttcggcttatagccttgttgtgaaaagtctttcactcttgtatcttatggctcaaagttataaaatattttaattcaaaccaaataaaagttgacaatatgggcaaaattttaggtgttgatttgggtacaaattctataggtttaacactaagagaagatgatatcttttcttggtatggtgtttatacttttaaaaaaggtgttggtcaaggaaagtctggtgagttttcatatgctgctgaacgtagaaaacatcgttcttctcgccgattgtacaacgctcgtcgatatcgaaaatgggaaaccatgaaaacgttgattgaatttggattttgcccactggagaaagaatatttggaaagatgggtgcatttcgatacaacaaaagacgaagtcggtaaatcaataggacggatttttcccagaaatgacaacaatttcaataattggataaaattggattttaacggcgatggtattcctgaatttacgagtccttaccagctaagaaggcttttgatagcggaaaagctagatttatcgattcctgaaaaccgttacaaggttggacgtgcattataccatattgcccaaagacgtggttttagaagtagccgaaaaagtggtgctaatgataaaatagctgtttacaaaggtagtaacgaaaccaaaacaatcgggagaaatgaatacgagaatttgattactaaacataaaactttaggggcagcttttggttatctggaagagaaaggtataagagttcggaatagatatacccttcgttccgattaccaagacgaagtgagtaaaattgttgaatttcagaaaattgaagatgtattgttttctgaaaaaattgaaaaagccatattttaccaacgtccattacgttctcaaaaaggattagtaggaaagcacattagaaccaagtaaatcacgctgccctattagtcaccctaaatttgaggaatatcgtgcgtggtcatttataaataatataaaatttcgtaacgaagaaacttcagaatttgagccgctttctttagaattgaaaaaacaactttatcaagaaaaattcttttttaaaagtaaaagagagtttaagtttttagaaattagaaaatttattcaacaaaatatcggttgcaatctggtgttgaattatagtcctaagatggataatatttctataccgagttgttatgtgtctgcaagattgaaagccgtatttggtgaagattggcagcattttgaaaagaaaatcgagcaaaaaaataagaacggtgaaaataaagtaataacatatagaatagaagatatttggcacattttattttcgtttgagcatgaggataattttatagaatttttagataataaactttgtttaagcgaaaatcaaattaaggaaatgattaaattatttaatgatttccctattggttatgctaatttgagtttgaaagcaattaataatattttaccctttttgcgtgaagggcatatttataccgaagctgttatcttggcaaaaattcctgaaattttaggtgaagaattctccgaaaataaggtagatatcattaagactattgagaacgaaataagtaataatagatatgagaaaactattactacgattgcgaacaatcttatttttaaatattatgcactagattatgaagatagatttggttggaaagatattacttataaactcaaggatagtgattttaacgatgttgaaatcgcaacaaaaggtcattttggtgaaaaatcgtgggagaaattaaacgaagataaacaacaaaatattttagcagaagttgtcaaaaaatatcaagcgttttttgccgatgataaaagaaagcatattgaaccactacatttggtaaaccaaatcaaagagtttttatctgcaaatttcaatattgaaaaaaaagtattagagaagatctatcatccgtcacaaattgacatttacgctagtaaagaggatcaacgattgttagcaagccccaaaactgctgcatttaaaaacccgatggcttataaaaccttgtataagttacgggatgttattaattacttgatagaaacaaaccgtatagataatgaaacacgcatagtagttgaaattgcgagagatttaaacgatgcgaataaacgttgggcaatagaaacctatcagcgaagaagagaaactgaaaatttagaatttgcggcagcaattacagaattgataaatgataatgatttttcaggtgttgctgatccaaacagtgatgatgatattgataaatttaggctttgggcagaacagattgaagactacggagaagtctctaaagaagttgtaacaattaataaagataaatccatatccaataaagatatacagaagtatcgcttatggaaagaacaaaattgcacttgtatgtacactgggaaaattatcaatctaaccgatttatttgatcaaaataaggttgattttgaacacactatcccaagaagtaagtcgtttgataattctttagctaatttgacggtttgctatgctgactacaaccgaaatgtcaagaaaaataaaatacctgttgaattgccaaattacgaaagtgaaggacttagctactctgctataaaaccacgattagaggcttgggagaagagaatagactccctgaaagatagaattgaaacacaaaataaaaattctaaattagctatcgataaggagaaaaaagatgatgccattcgccaaagacatttgttacaaatggaatgcgattattggaaaaataaattagaccgatttattcgcacagaagttccgcaaggttttatcaacagtcaattaaccgatacacaaattattacaaaatatgcttttcattatttaaaaactgtgtttcgtaaagtagatgtgataaaaggtgcaaatacagctgattttcggaaaatctatgggattcaaacgaaatttgaaaaaaaagatagaagccaatattttcatcacgctattgatgccgctgtcttgacattgattccccctgcgaaaaatagagaggagattttgaaaagagcatacgaatttgaagagaaaccggaaaacaaaaacaagcaatatcacgagaagcctttttcggcatttaatcattttatgcttgaagaaatccaaaaaaatattctaatcaacaatcttgcagagaaagaccaaacactcacgcctggaaaaaagataatccgtaaaagagggagagtaatgtggatcgacaaagaaaaacggatacccaaaattgcacagggcgattctattcgaggcgaattacatttacaaacatattatgggaaaataaagattgcagcaaaagacaaaaaaggaacattgttacgagatgaaaaaggtaaaattatttacaatcaaatagatggaatagatgaagtgtggatggttctgagaattttggtaactgatagtaaatttaatgctgataatattattgataatgccttgcgaaaatatgtaaaagaacaacttaaagaaaaaaaagttacagaattagtcgattttaatggtaatataattaggcatattagatgtcgtgttaaatcaggaaaaggttttatgaatccacaaaatgttacaatagttaaggaacaaacctacaaatcctcaaagaattataagagctatatttatgcagattcgggtgagaactatatatttgggctttatgaaaatatatatggcagagatgtaatttcagtcaacaaattcgaagcagcaaaatttatcagcaaactgaattttgtcgacaaatctgatttatttaagatgaaagaacctgtttttataaaaaaaacagaagcaaagttgattcatatttttgaaattggacagaaagtgattttttataaatcctcgaaaaatgaaatcaaagacttatatgaaacagataaaatagaaatttctaaaagattatattttataaaacgcttacaccaagcatctgtcggaaatatacaacttcaacatcatttggaagcaagaacggatgatgagttatcaaaaaagtttccaaaagagatgttcaattcagcggggaaagatggattttcaaaatatcaagaagattttgtagcaccacgacttctttttaagcccacaaattctaattttattatagaaggtaaagattttgaaatgaaattagatggaactatagcgtttaaattttaatcctatgataaaaaagacactttactttggcaatcctgcgtatttgagtatgcgtaacaatcagttggtaataaaactacccgaagttgaaaaaagcgacaccttacccgataccttcaaaaaagcaaacgaaaccctctttcccattgaagacttgggagtagttatactcgaccataaacaaataacgctaacacatgggcttatcgaaaaactgttggataacaatactgctctcttgacttgcgatagtagccgcatgcccgtagggctgatgctcccattatgtggaaacaaaacacaaagtgaaagatttaactcgcagattaacgcttctgaccctttaaagaaaaacttatggcagcaaaccataaaagcgaaaataactaatcaggcagaagtattgaagaagtttaggtcttgtaatatccgtaatatgatacactgggcaggagaagtaaaaagtggcgatcctgataactttgaaggacgtgctgctgcttactattggaaagaggcttttcctcagattgagaattttactagaggcagagaagagaatcctcctaataatctgttaaattacggatatgctattcttcgtgcagttattgcccgctctttagtagcaagtggtttattaccaacgttaggtatacatcaccacaaccgttacaatgcttattgcttagcggacgatataatggaaccatatcgcccatttgtagatgaattagttttctcgatagttgatagtggagaggattataccgaattaacgacttcgttaaaaagcaaactgctacaaataccaacaatagatgtgatgatggggaaacaaaaaagccccttaatgattgctgtaggtcagacaactgcatccttaaaccaatgtttcgaagggaaactacgtaaaattaaatatcccgaattattataatccgtcggtaatatggaccaagaccgattaaatcaataccgtattatgtgggttctagtattatttgatttgcctaccgagacgaagaaggatagaaaagtatacgctgattttaggaaaaacttgcagcgagacggatttaccatgttccaattttcgacttatttacgacattgtatgagtgttgagaatgcgaatgtacatattaaacgagtgaaaaactttcttcctgcaaaaggacatgtgggaatactctgtattacagataagcaatttggaatgatggaactgttttatggcaaaagtcccgaatcaaagaaaacaggagcgcagcaacttgaattattttagaaaataaaaatcccgatcaaagtcgggatttttatttgaaatacattgatttttttaatgctaatggtgtttgcaatgtattgaaatacatatacttgttgtgtggtatgatgtatttcaatgaactaagatacaattttgaaagcaaatcacaactatggttgtatttatttatttcaaattcttgatgtatttcaatgaactaagatacaattttgaaagcaaatcacaacagatagcaatgattattctcaaaaaaatcagatgtatttcaatgaactaagatacaattttgaaagcaaatcacaactaaataaccatgttatgaatgtaggattatgatgtatttcaatgaactaagatacaattttgaaagcaaatcacaacagtcccatgtttatgcccaacaagtttgatgatgtatttcaatgaactaagatacaattttgaaagcaaatcacaacttcgcggccacccatccataagatatctaatgatgtatttcaatgaactaagatacaattttgaaagcaaatcacaacacaaaagtgtgcaaacaacagcggtatgtagatgtatttcaatgaactaagatacaattttgaaagcaaatcacaactaaagtgtattactataaaacattaaataagatgtatttcaatgaactaagatacaattttgaaagcaaatcacaacttccagagctgcacaccgtacaataacaggatgtatttcaatgaactaagatacaattttgaaagcaaatcacaacaaatcgggacggtatttaaaaaagcatccccatgtatttcaatgaactaagatacaattttgaatacaatttgcaattgatggctcaagatatattaagcagatagtcttgtcgctaacttaatagtacattgtaagtatgcgagtactctattgaaaaatgtatctattcccaagcgcgtattgacgataatttgtaatgttcttattgtccgtaaatagcagacgctatagtaatagttctttatataccgatctcgacttctatagcacattgtctatcgcaaatcggtttacagaaccatataatccttcagcttaacgcgaagtatttttaaagattttgttatacgatattccaccgtttttatagatattccgaggtttatagcgatttctgcattcgtattttctccaaatctgctcatttcaaaaacttctttgtatttttcaggcaattctttaatagcggactgtattctgattgccagttcttctaccatgtaataatcggggtcttcgaattgctcttttaatttttcatataatattgcatgtactctttttctatattgctcattcctgattgcattaaaagtgcgatttttggcagcaacgaacagatacgatttcagggacgtttcgacagtcagatatttccttttctcccatatatgcaacatgagatcttgaactaattcttcagcctcaacgtcagaaatgaattgtgaaacatattcacaaagaggtgaatagaacttaacaaacatttctttataagccctagtatccccttctaaaattccgtttagaagcaattgttcatccataatatttaaggtgcgggcaaaggtaattttttcatcaataataagtatataaaactttcaagaaaagtagggccattaaaattaataaaaaatttgatttgtagtttagggtggtgcacaatatatgtgtcgtatatatagaaacatgtagtgaataggcttataaaaaaatggaattaaacgaaaaatcatatattgagataccagatgagtcgttgctccttagatatattatcggagaagtaacgcaagaggagaatttattggtcaaagaatggagtgggaaagacactgcaaatgaagagctccttattcagctggcacgcatgtattatgctcaaagaacacaacagcggattaagaatcgtgatactgaagccgcatttcgaatcgtaaataataaaatcaagagaaaaggaaggcgtttattcctccagcgggttggcgtagcagcatctttgattatcggtattctaggtataggttctttcttctttcaatatctagacttgcgcgagagtttccttccatctatgattacagtagaatcgaatgataactcccgtactcgtctggtgctacccgatggaacggaagtttgtcttaattcgggaagcagcatcacatatccgtcccattatacccacggtgaacgaaatgttactctctcaggtgaagcatattttaaagtgactcataataaagagaaaccttttgttgtgaatgctctggataagaagtataaagttaaggtactcggaacagagttcaatatgcaggcctataaagacgacaatgttattcagacaacacttatagccggaagtgttcaggtcgatattcaggggaggaacacgaagacggttttgttgccttcgcaaaaagcaatctactctctacagaataacgaattggaggtagtaagtgctaatacggatagagagacagactggatgtatagccgtttggtattcaagaaaacacctatgccggaggtactggcgcgattgtcccgtttctataaagtggagttcgatgtgagaaataaaatcatagatacttatacatttaccggaaccttcgaagacagacctttgtatcaggtgttggattatatgaagatatcatcacaaatagattataatataacttatcagaaagatgaaaaaggtactaagtctgtcgtggtattgagacgatagaacgaaaagaaaataactcggatatctttcaaaatcaacgaaccttaaaatttaacagcctatgaaaaaataaccagaagaaatctaataaaaaaacacggaaacatgttaccagcatatttccgtgctaaaaaacaaatctgaaaaacaatttattttttacttaaagcataacaaaaatatgagaaaaatccatcatctccaacaaccttggagatattgtaaccgtttcctcgagttacacaaaattcctcttactatgaaattatcgttgacattacttattctgtcaattaatgtctcttttgcagcccattcgtatgctcaacaagtaacattatcccttgacatccaaaacaagaaagtcgttgatgttttggacgaaatcgaaaaacaatcggaatttcgattttactacaataataaactggtcgatgtagatcgtacggtatctgtaaaagtgaagaagaaagccgtgttttctattctggacgaattgttttcaaattacaatgtagagtacaaagtaattgataaagatatcatccttactaaaaaaaacaagggtgaaaataagacccgcgaagcacatcagcagcaaatggatataacgggtgtagtgacagatgcaaatggagaagtattacccggggtaagtgttgtcctgaaaaatactacattcggtacaattaccgacacagatggcaagtataccataaatgttcccgacagaaatgctgttctgatctattcgatgataggttttctgaaatatgaagagcctgtgggcaatagaaggtctataaatatatcactgaaagaagaaatacgcgaaatggatgaggtcgttgtgataggttacggtactgtaaaaagagccaatctgggaggagctgttgctacagccgattcgaaagtattccagtctcgtcctattcaaaatgctgcctctgcactccaaggcgaggttccgggtcttactgtgatacgtacaagcggggcccccggaagtagtccggttttgcgtgtacgtgatatctcgtctgtcaatggaggagctccgttggtgttgattgatggcgcagaaggagatttgggcacaataaaccctgccgatatcgagaatatatctgttctcaaagacgggacagcagctatctacggggcgcgtgctgctgacggggttgtactgattacaacaaaaaatgcgaacaagaaccaaaaattaaaggtaaccctcgatgcatattactcgataaagaaaccggcactgttgaaaaaacctgccaatctttatcagcatgctgctatggctcttgaaataacagacggcagttttcctatagaatatacccaagatgaattacaactcattcttgagggcagcgataaagttatcccagccggaacgacttggggacgatggggcaatgcatatccaaaattctacaaagaccaaaattggaatgaacatattataggaaatggcaatattcagaattacaatgtcagcttttccggagggggagataaatatacatatctcatttctttgggctaccagaaagaagagggactacctaaattcggaatagattcggataagcgttattttgtacgtgcaaaatctaatatagaaatagtaaaaaacctgaactatgaccttaatatatcctacgaggctagtgatagggattactcttccagtattagtcagggacagaatatatgggagttgatatacaaaactcgcagttgggcacctgtatacaatccggcaggaaatttctatactttcgaaggttttgacaatccggcacaagtattgcaagatgggggagagtctcgtcgaacaacaggaaactttacgttcaacaaccaattgcgttggcaggttatagacgggctaaaccttacagggcgtgctatagttcgcaagagcgatgcagatgagtatatcgtccagaagatgctttacagctacaattgggaaaatgtaaatcatcggacggcaagaaagcccaatagcgccgagcgtaattatgccaaaacgttgtctaaaaactttacattgtatggagaatacaaaaagacatttgctcaaaaacatgatataggtataatgttcggagggtctcatgaatctgccgactatgacaaattctgggcaaagcgtatcaatttcgatcagcaggaacagatgcctatcagcatgggtagccccgaagatcaggatgcagctagtgatggtaacgcatggaccattaactctttcttctcgaggcttaattatggattcgctaataagtattttatcgaagctacattacgtggtgatggttgttctcgatttgcgccgggggaacgttggggatatttcccgggagtaaatgcaacatggcgtataggtgaagaatcatttataaagccgctaaatgttttcgacgacctcaaattcagggcttcctacggaaaaatgggaaatcaatctaatataggaccttatgattttatcgaactaattaatatcagcagaaattattatccgttcggcaatggggcaaaaggtcagatggcgaatcagtcgaatctggtttctacttcccgtacatgggagactatcaggtctgtaaacatcggtacagatttcagttttctgaataacagactatacgggtctttcgactacttctggaaaaccaatgagaatatgttgatttccattacttatccttccattttggggattgcagctccttctacgaacagtggagaactgaaaattcacggttgggaaattatattaggatggagagaccagatcagtgatttcaaatattcggtaagagcgagtttaagtgatgctcagaatgaaatagccaaaagaatcgggaactctataataggatatggaaataacaggacgcctgtaggctatccaatggattcttatttcggatatgtatttgatggtattatccaaaatgaacaggaacttgccgaatacaagtctcgtttccctaatagcggaaccgtacaggataaaaggatacaagtaggagatgccaagtataaagatctgaacggcgatggtaatctgactgaatatgctgatggcgatggcgaccttgtttatttagggaatactaatccccggtacaacttcggattcaatatcaatgctgaatataaaggcttcgacttaggtgcattctttcagggagtaggcaagcgcacgatgttcctcgaaggagatgccagtaaaccgtttaatgcaccatggtatcagtcggcagaatactggtatggaaaaacatggacgcctgaaagaaccgatgccaagtacccggctatatcaaacgatggtaccagaaaaaattataactattatatctctacaaataccaagcataatgtaggatatatcaggttgaagaacttgcaggtcggctatactatccctaaaaagtatacactgaaagcgaaactggagaaagtaaggatatacttcagcggtgaagacctctttgaaatacacaatgcacccggcggatgggaccctgaagatggaggtagttttgtgagttatccgtttgctcgcaattactcgttaggtgttaatatcgttttctaattttgctaaagtacataatcatgaaaaaatatatatcaacaatttccgcgctcattgctattttagtggcaatgtcaagttgccaggatatggatttgcttccgaaagaaaacctaagcgatcctcagttttggaaaaccccggccgattataaaaaagcggcaaatctcttgtatgacaggatggaaagttttaatacaagcgacagtgaaagtgatattgcttacggcgaaggtgcaaataatgtaagtaatggaacatatatcgcaaattcttcggatggaaattggaatgaccgatttactgatatccgtaattgtaataaaattatagagaaaagtgaagcctacgagggcaatccttccgaaatagaacattatgtagccgaagcccgttttttcagggcctatacttattggcgtttgatgaagagattcgctgacgtgcctgtcattactaaaactttaaatgtggattcccctgaattatttgctcatagagattctcaggacaaagtagaggattttatactttcggaactggaagcaatctatactaaactgccaaaacagagtgagcttgcagccgatgataaagggcgtgtaacacagggcgcagccttagctctgaaagcgagagtcgcattattctccggaacatgggccaaatatcataagcatcggacagattataaagaactgttggaacaggcggtaactgcagctgaaaaagtaagggcaagtggagaatactccttatatgaaggctcaggtgccgagagctatcgttatctgtttatagaaaaaggagacgatgcgccggaagcgattctttccaaccgctactttaaagatatacgtatgcactcgcaggcgcacggtgtttattgggggcagaggggtactccgaccaaaaagctggccgagatgtatctgtgcaaaagtacgggcttacctataaccgcctccggatcaggatttgaaggatataaacaaatggctgatgagtttaaaaatcgtgacccccgtatgactcagacgttcttgataccggggacaacattcttgagcccgcaggatggtcagttggtcagtgctccgggttttgagacccgtccgaatacgaagacaggatataagctatggaagtttatgggagaagaaagaaccggagtaaacgattcgtattatgattatcatatcatccgttatgcggaagtattacttatcttggcagaagccacattcgaaaaagatgataaaataagtaatgaagtcctgaataatacgatcaatgtagtccgctcgcgaaagggagtagagatgcctgtccttacaaatgaatttgtacaggtaaatggactggatatgcggactgaaatacgcagagagcgtacgatagagcttgcattcgaaggatttagacgagatgatctcagacgttggaaaacggcggaaactgaattggtcggagctctgaaaggtttcaggtataaagatagtgagtatgcagaattgaaggtactggatgatgaaagtgcaaagaagctagatgagaatggtttctatattgtagaacctgagacaaaccgtaagtttatagcacctaaaaattattattattctctgcctttggatgaaacaaaactcaatccgaatttattaccaaataatccggggtggtagaatatattaacggttataagatgacaaagaaaagtttatttttaattctattaacctttacttcagtttggtgtggctctctctcttccctaaaaggacagagtaagggggagccgacaccggctgtactgatgggaaatcgtttcctcaccctgaatacaataatccgagtaaatcagattgaggtaagcagagacagaaacgaaggactggacgaacgttcggagcatacccctgagcgtataatcgcattccgggaagccgtatcttctgagtttccgggtgcaaggataacatgggcattcagttggttggcattgcatgacgaaaccgaaaattataagaagattcgtgaactggtagtcggatatcaccttaagtatggtgacgatattacattcatacctggtgcatactttgccaatgcttataatactcgcgaacaggtaaataaagacttgcacgatggactggctaaggtgagtgaaatagtcggaaacggattccgccccaaaagtgttgtcgccggcttcctgtctgccgaaaatcaacaattcttagctgaaaaagaggaaatacatgtatgt

SEQ ID NO: 4039 - DNA, 14634 bp, synthetic construct
  source 1..14634: mol_type = other DNA
  misc_feature 1..14634: note = Synthetic
tccaatagcttccccatctcctcaaaaaatataggtgtaggaattgcttttagtaacaagcagggtccaagtttcaactcctttgcgttaaacatttcaagctcctatcagcaagttataaatagaaataatgctatactttatggtgtgggactaaacgtgggtagcatagataaacttggtggaattgaaaattatttttgggaaattaatacaccaagtccaatacgtaacgaaaattattttgcttcattaaatgctggaataagatacattcataaatctctatatttcgggcttgcaagtcaaaacctttatactcaagcctttaacaaagacttccataaaagcatttcgccatttatactccacttcaatttgggtggaaaattaagaatatctcagcagtgggcaattcacccctcactaaatgcccaatggaacacattctatggcaacagattctacaccccatatttatcctttagcagacgcaacaaattcatctttggagttcatagcgaaaaccttcaatcggcgggacttcatcttggctacgaaacttcaaagacactctatttcatgcttaaaaccgggcttactatcaacaatcaaatccgtagagaatatggaattataaactacggcgaaatgggcataaaaattgaactgggcaacttccaaaagatgaattaaaagctattagctaagcctaatccaatacaacttaacagattattaagttatgtaaaaattatttactcaatataatttgtattattgagaaaaagttgtaattttgcaaactcaaaaaaaaccaaattataaataattatggcaacaagaatcagattacaacgccacggaaaaaagggtcgtcccttttatcaaattgttatagcagatggtcgtgcacctcgtgatgggcgtttcatcgagaacatcggaacttacaatccaatgaccaatcctgcttcaatcaacttaaattttgacagagctatgcattggttaagtgtaggtgcttctccttctgatacagctcgttcaatccttcgtcgcgaaggcgttctttacaaattccacttgatgggtggtgttaagaaaggtgcatttagcgaagctgaagctgaaaaacgctttgaagactggatgaacaacaagcaacaacaacttaaaaaagttgctgacgatgacgtaattaaagctagagaagaaagaaaaaaacttatcgaagctgaatcaaaagtacgtgaagctcgcgaagctgaacttttgaaaaaacgacaagctgaaaacgctgaagctgaagaagccaacgaagaagccaacgaagagcctgtagctgaaacagaagcaagcgaagaagttgtagcagaagctaccgaagaagctactcctgctccagaaacagaagaagaacctgcaacagaagagtagttcatgttcaatctcgacaattgttttagtttaggaaaaataacaaaaacagtcggttacaaaggtgaattaaacctatatttagacaccgattcaccagaaaattattacaatatagaatcagttctcatcgatattagaggggaactgattccttttattatagagcaaagaaaagcaaaaaatcgtttcaatatatccataaaacttcaaaatgtagaagatgacgaggtgggcgattttgtaaatagtgaagtatatttgccaatgtctcttttgccaaaactcgatggcaacaaattctattttcacgaagttataggcttccaagttgtggacgaaaaccacggcactgtgggcaaaattgatggattctacgaaaacatcacccaacctctgatgataatcattggaaatgaaaacaaagagattttaattcccgtaatcgacaattttataaagttggttgacagagaaaataaaacaatagaaattagcgttccagaaggacttatagagctgtatttggaataaaaatgagttcaaaattcaagtttcaacaatttgaagtttaccactcgcaatcgagcatgaaagtgggaaccgacgccattttattgggagcaatagctaaattttataagcccaaaagaatattagatattggctgtggttcgggcattttaagcctaatgttggcacaaagatactcatgccccattgatgccatagatattgataaagattctgctgatgaagcaagttttaattttaaaaactcaatctggagtgaacgactaaaagcttttcatagcgacataaataaatttgatagtagagaaaaatatgacggaattatttgtaatccaccctattttgatgaaaaaacatataataaatctcaacaaaaaaatatagctcgacacaatctctcattggattttgaccaaatttgtcagaacacaaaaagactaagtaccgaaaaagctagtctatgggttgttctaccaccaaagcaacatcaaaactttacctttgctgcaacaagaaatgttttatttctaaaaaaatacattctaatttttcctcataaaaactcaacagaagcttcattggtgatttcgcaatggcaaaaagaaagcgaagagatttacatggaaaaactctttattaaagacaagtcgggagagccttcccatgaatacaaggagctgacaaaaacataccttctgaaataatttttttagatttttctcaaattaacaattcccatacaattaatttgtatttttgaatctgactttagattttattaaattaattaagaatgatatgaggaaaatattcattttttttattctaatagcctttgttttttcacccttcgcacatgcacaaaagggctttgaagttgtaaaagagcttaaaaatgggcaatctcggtttttaaaaattgaaattacagaagatattacgcaatactcttccatatcttatggtatggaaatggaaactcccatagctttcacctcatttggaataggctggaaatcaggaactaacaatcatcaagctggaaattttcaaataatgtatcgagtaaaaaagagggatgggcactggtcgaactggaaagaagaagagggttatttctctccccaagagaccgaagatgcccactattggaccgatttactatttggatttgacgaatatttacaccactatattgagtttatcatcacacctccttttggcgaaactatcgaatctatcaggctgagtctcatagacttatcttctgaagtaaatccaaactatcaagctgaaacaaatatagacaaatcaaataactgcccagaatttccaccaattatttcacgttcagactggtgtggttcatacacagcatgccacaatcccacctacagccccacatatagaaatcccacgcatgctgttattcaccatggtgctgcccccgacacatacactgatggacactccgtcgttcgcagttattggtactatcacaccaataataacggctggtcggacattggatacaactacttaaccgataaatttggcaacctctttttgggcagacacaatccccaaatgcctaatgcagacgtgcaggcagctcatgcaggcaactccaaccctcactccatcggaattaactttttgggcaattcagatgtaacttatcccacccccgttcagttggaaacctgtaatcaactactggcgtggtggtttgaccacaaagacttcgatccactttccagtgctaatattgtgatgcaaactcccggttcctcaattcaaccacgaatttgcggacatcgcgatgttaatcccggcggaactacctgcccgggtgattctctctacaatctgttgggaacaatcagattgggcacaaagcaaattattgacaattgctcggcgcctgcagataccttagcacccagtagcgaaattgtttatgataatgaatggcaaaacgacgattttctaataagctttaacgaccacgacaatgaggaaggctctggcgtaaataaaagcttctaccaagtattagattttgatggcgaaaactggtacgccaacggcgataaaggcttcttttatgacaatttcaatacagatttggcaacacattggaccactctttctggaaattggtctatcgaaaatggaagtttaaaacaatccaacgaagcaataacaaaccccaacatctatacccttgtaaatcagagcagtaacaactcatatctataccattggcagatgaaaatttcgggttcgggagccaatagacgagcagggatatttttctattgtagcgagccatcagccacctatcgcggagatgcatatatggtttactttagagtagaaacaaataaaatcgagttgtacaaagcctccaatggcaccattagcggcattttgaaagaagaaactgcaacaataaatgccgatacttggatggatataaaaattgtgtacgagggacaaaatggcgatataaatatttttataaacaacgaacataaactctactggcgtgatagttcgccgctcaattcgggtagtggtatttcctttagaactggaaattgtatagctgaatatgacgattttaaggtctataaatcgagaggtgaagaggttatgattagtactggactggatagtgataaagagattagatacgaaagcataaacagcaaccaagaggcaggaagagtgaaaacactctgcatcgacaatgccaaaaactggtctgaaattgccgtgcaaaatattttcacagatttcacaaagccaagtacaaatatcaatattgaaaatgaatggcaaacgggagatttccttgctcaaatggaagattcagacaatttaagtggtatcgacatgaggtttttccaagtgatagaaaaagaaaacgaaagctggaaaacaaatccccaaactggatttttctacgataaattggaagaagaaaacagcctttggacatcgcaaacaggcacttggtcataccaagacaatgttttaaagcagactaacgaacaagaaaacaacagtaattattgggcttttttacaacaagacttgtcggacacatatttatatgaatttgacatgaaagttgatggaactcactccaacagcagagctggtttccactatttttgcgacaatccaagtttggacaatagaggaaattcctactttatttggtttagatatgccagtaaagatttggagttttacaaggttaatgaaaatgtattttcactaaaaaaacattttacagttgatattgaaaaatcagaatggtataatatcaaactatttttcaatagaataaatggcgaaacaaaggtttatataaacgatattttgagcggtgtttgggttgacgaaaacccatttgacgagtctctacaccaacaacactcctacatctctttccgtagtggaaacgccattctaagcacaagaaatcttaacacatacagaagcagagagagtagcgaaacaatcactgttggtggcagttctgcaatgattcaaaatcaaagcatagccaatgtagcttcggcaaaaattaaaagtttcgtaattgacaaagctaataacttctcaacaatttatgaccaagatttaaaaattgacttcacaaaacccaatgccggacttgttattgatggagatattacagacgtggacacaagcgttgtaaacagttcatacaaaggctcttgggcaaattttagcgacatacattcgggaattgttgaatataaatactccttgggaaccaatattgcacaggcagatatagtcccttggacaagcaataatttatccacaagtatagacttatcagacttaaacttagagacttcccaaacatatttcttaaatgtttgtgcaaaaaacggtgctggattatggtcggatacagtctccagcaatggaatatttatcgcagaaaaacccttggctgatttttcaaatttaaacacagaagtttgtgagggtcaaacaattagctttgaaaacacatcgagcaactacacatcaatagtttggtattttcagaatggtgaaccaaacacatctcaatcggaaagcccaagcgtaacattcaataattcaggaacttacgaaatcaaactcatagcctatgcttatgatggcatcgacacaatagtaagggaagttaatgtaaattcactacccacaattgttgtggaatcgccacttttgatttgcttaggcgacaccataaatctctctgctcaaggtgccgaaacttatctctggagtggtggtagctccactgtttcgccacaaatatctactacatattttgtaacaggaacttcagaatatggttgcaattccactgctgaaattcttgtaaatgttgaaaatcatcctgaaataagtattaataccacaaactccgaatgtggaaacaacaatggtagtgcaaatattattaccgacggtgattacacttatcagtgggatttgaatgcaggtgggggtaacgatttgtgggcaaacaacttagcatcaggtacatatcaaataagcgtatgtggcgaggtttgtacaaaaacttacactttcaccatttcggatatgggagctcccgaggtggaaatttgggcaaacaacacttccatctgccttggcgaaagtgtggaaatttatgctagcggtgccgaaaactacctctggagcggagacagtattcaaggttcaaactctgaaaatcagataattgctaatccagaaaccaccaccacatacatagtgcaagccgtggagggcaactgctccacctatgccgaaatcacaatagaggtaaacactcccaccccacttaattttcctgaagagaaaaaaatgtgcatgggaaatcctgtggaattaagtgatgtcgttccaagtggtggaacatacagcggcaatggcgttagcaacaatgttttctcccccagcgaagccggtgttggcataagtcaaatttattatgaatatacaaatgagcattcgtgcatcagcaactgcacatatacaattgaagttttggcaaatccccaaattacatgctccgatatatgggtttgtgccggcagctcagccttccaacttgataacgctcaacccagtggtggtgtgtattccggaaatgcagtggaaaataatatcttcgaccccaatgctgcaaacagcggacacaacgcactttcgtacatatatcacgatgaaaacaactgctcatccatatgctcatttattgttgaaataatagattatgttaacgcagatttcgccctgcaacaagagggaaacattgtcattatcagcaatcaaaccacccccaacaatgccgaaatttactataatatgggagatggtaatgagatttatgagagctcattttcatatacatatctaaacaatggagaatacaccattaagcaattggctaacaatcaatgctttaacgacagtactctaaaaactgtaaacatcgtaaatgtgggcataaatgataataaacatttaataagaaacatctaccccaaccctgcttctgacaatctgaacattgactttgaaagcaaatttaatggcaaattggaaatatacaatgcccttggtcagagggttttggtatataatttggacaatttagaaaatgtaagcatagatattagcaagtttgcttctaatatctactttttaaaattgagcacagacgcaaactttagcatacacaagtttgttataaaaagagatgagtaagaatatctaattttctatctttacaaataaaaaactgatttatgcccaattttgaagatataatgaaggacttattccacaatcaaacggcttggtatgtggatatgtttggaaaagtgaagtctaacaaaaccacactttttatggacagaaacaactgcacatcgcaggaacatgtcgaaaagtggctttgtatcaacgacttactaaatataatgcactatttcaatagcgtatgcattgacgatgtttgcaccaaagacacaaggtattccataggtttaaatctggatggcgagccaataattagggctgccaacaatgattatggcacagcttttgtttttaacagatatgatgacgccgaaaaagccatagaaattatgggaaaagagaagttgaaaaaaatttttatggatagagtgtaagatatttcacaaaaactgaaacaaattgataattattacgttataaaactattcaaagagaaataaaatgaaagaactaataaaaagcattactctaaaacaagttgtcagcactatattaattatatttttagtgatatttgtgatgatgaacctcaaccctatcgaggtgagtttaatatttacaggtgttacaatgccattggtaatattgataacatttgtattttttattggatattttgtgggtcgtacagtgaaaaaatccaaaacttgtaaagaagaaaaaagagaggctaaacttaaaaaagttgaagaagattcaatctgcgaagcagaagatgaagaatagaatttatatgccccaatccctaaataatttaaaaaaaagccatttaaaattgaatggctttttttatgcattataaatcatccaaatttgtcatcttgagttccgatagcttatatagatgggaaaaatattatagaccattttttcgtttttccccgaccccgagctacctaaaaaagagattcagtcggctgatgagccaacagaccacactttctcctttctccactatctacaatctctcatctactatctattatctccctaactaatatttatacctcaacctgcctttatcatcaaacagctctccaacatcatcgcggagccaatgggtatgaatccccaatttattggcaccctgagtatgcttcaaggtatcatcgataaaaagggtttcctctgcttgcaaattatgggcatttaagacatattgaaaaatctctttattaggcttcaacattttcagattatgcgaaaaatatgctttctcaaaaatttcatcaaaattattatatccatatttatcttttagctgttgcacataattcacataatgaatttgattggaattactcaaaaggaaaatcctataattagttttcaccttttctaataaatcaatcctatgttggggaatatccaccaaaattgcattccaaatttcgtctatactctcgttgggcaagtccattacaaagaaattattcaaagaggctctaaattcattatccgaaattaatccaccctcgtatagctcaaatacttttttctcttccaagagtttccaaatcacttcaacatcggtctgggcgtgggatttaagcatctttaaaggagtttcgtagtccaaatttataagcactccaccgaagtcgaaaataatatttttgattttttccatattttttctctttttattttgcaagatagatattttttgtaattttgcagtccatttccaaaaataaaaaaggaaatcggtcccatagctcaggtggttagagcacttgactcataatcaaggggtcctaggttcaagtcctagtgggaccacaaagcaaagcagaaacgcctaactatcaaatagttaggcgttttttgtttctataaaagtttattttacccaaaaaatatagattccaataaaaaaccaaaaggaaatctaatattttataagtttaaaaatatttgcaaataaaaaactcacaaaacttatcaagacactaaattgtttttattttatttgtttttattaagataatatttgtaactttacagagatgtatttaaaacagtgaaaagacaaataagcaaaaagccccacggagtacgcagggctgagaaattcttcggcttatagccttgttgtgaattgtctttgaattgcaaatatataaaacattttctaaaaaacaaaaatattatgaaaaaaactttaggcatagatttaggaactaactccattggattaactttgagagaaaacgatatatttacatggtacggagtttatacatttaaaaaaggtgtaggtgaaggaaaaactggagaattttcatatgcaacaaaaagaacaacgcaccgatcatcaagacgactatacaacgccagaaggtataggaaatgggaaacactaaaagtgttaattgaaaacgatatgtgcccactttcaattgatgaattaaacaactggaaaaactataaaaaaggtgttggaagggtctatcctgttgataatataccttttcagaaatggattagtctagattttgataatgatggagtttccgattatacaagtccttatcaattaagaagagaacttataacaaaaaagtatgatttagaaaacaaaattgaaagacaaaaacttggaagagccttataccatatcgcacaaagaagaggatttaaaagtagcagaaaacaaggtgcaaatgaaaaaacagccgtatataaaggcagtaatgaaaccaaaacaataggacgaaatgaatatgaagatttaattattaaacatggtagtttaggtgcagcttttgctcatcttgaagacgaaggtataagagttagaaatcgatatactttaagagctgattataaagacgaagttgataaaattttaaacttccaagaaatatcagataattatttaagagataaaatgctcttagaaacatcaaacggatcaattttttatcaacgaccactacgctcacaaaagggtcttataggcaaatgcacattggaacctagtaaagcaagatgtcccatcagccatccaaagtttgaagagtatcgtgcttggtcatttataaataatataagatatagaactagcgaaaatagcgaatttgagtccataccaatagaattaaaagaaaagttatataaagataaatttttcttcatcagcaaaagagattttgaatttagtgagattagaaaatatataaaggcaaatggtggtgcagattgggaactaaattacagcagtaagatggataaaatttctgtacctagctgttttgttactgcaagattaaaatctgtatttggcgaagattggcgaaattataaaaaaaccattctaagaaaagacaaaaaaggatacgagcaatcaattacctataccatagaagacatttggcatatacttttctcatttgaagatgatgagtactttagacaatttctggaaaacataatagaattaaacgaaaatcaaatcaaagaactcaacacactttataacaattttcctgtaggctacgccaatttaagtttaaaagctataaataatattttaccttttcttcgtgaaggtatgatttattctgatgcggtaatattagccaaaatacctgaaattattggcaaagacttattcaatacaaataaaaacataatactaaatgctgttaaggatgaaatagaaaaaaacagattccaaaaaagaatagttgccattgtcaacaatttaatattcaaatattatgcattagactttcaagacaagtttggctggaaagacatatcttataaattagacgatattgatttaaaagacattgaaatagcaactatagagaattttggagagaagacatgggttaaattagataatgactataaaatttcaattttatcaaaagtgaaggaggcttatcaagacttttttagctcttcaaaacgagaacatataaagcctccgcatcttgttaatcaaataaaacaatttataagtgctaaattcggtacaaatgaaaaagttttagacaaaatctatcatccttctcaaattgcaatctatcctaaaaaagaaggacaacaatatttattgagcccaaaaactgcagcttttaagaatccaatggcatacaaatcgctatacaaactaagagaagttattaaccacttaatagaaattggtaaaatagacgaagaaacaagaattgttgttgaagttgcaagagacttaaacgacagcaataaaaggtgggctatcaacagccatcagagggacagagaagctgaaaacagacaatttgcagaaataataagtgaattagctaaagatcctgaatttagcggcagtgcagatgctaatagtgaaactgatataaataaatttagactttggtatgaacaaatagaagattatgagacattaatggaaggcttaaaagagatagacaataacaaagcgttgtcgatttcagaaaaagaaataaaaaaatacagattgtggaaagagcaaaactgtgcatgcatctacacaggcaaaatcattagtttaacggatttatttaatcaaaatataattgattttgaacatacaattccaagaagtaagtcatttgacaattctctggccaatttaactgtttgctatgcagattataatagaaatataaaaggcaataagctccccacagaactacctaattacgaaaacgaatcaaatggatatactgctataaagcctaggttaaaagcttgggagagaagagctgataatcttttcaatcagattgatttttggaaaacaaaatcaaaaacagcaatggataaaaatgaaaaggactacgccataagacaaggtcatttgagaaaaatggagtatgattactggaaaaacaagttggatagattcacccgaaccgaagttcctcaaggttttgtaaacagccagctaattgacacccaaataattacaaaatacgctttccattatttaaaaactgtattcaataaagttgatgttattaagggaagcaatactgcacaatttagaaaaatatatggtattcaagctaaagatgaaattaaagatagaagtatgcattatcatcatgcaattgatgcagccgtattaacactaattccatcggcaagaaaacgagaagaaatattaaagaaatcttatgaatacgaagagctacatagaggcaaacaatatacagaagtgccatttaaaggcttcaactattctatgattgaagaaataaaaagaaacattttagttaacaatattgcagacaaagaccaaacacttacaccaacagtaaaaagagtaagaaagcgaggaagaattacttggttaaaagacgaaaacgacagatttttattagacaataagggaaataaaatcccgaaaattgcccaaggtgactccattagaggagagttgcatcaacaaacttattatgggaaaattaaaattgctgcaaaagatgaaaaaggtagattggtaaaagatgaggaaggcaacatcttatataaccaagttgacggcaatgatgaaatatggatggtcattagaagacccatttcagatataaaatttccttcaacaggtttaattgtcgacactgacttggaggaacatcttaatagacaaattaaaaatggcattaagccatatgaactaaaagattttcaaaataacactataagacgtgtgaggtgcagagtgaaatcaggaagaggatatatgaaccctgataatgtaacaaaagtaaaagagcaaacttatagatctgaaaaagaatataaaaattatatttgggcagactctggcgataattacttatttgctttatatgaaaatgaaaagggtagagaaatagtagctgtaaataagtttgaagccgctaatgtactaagtacagtaaaagaagtacaaacaaaagcagatttatttaaacataaagagcctgtttacattaaaaattctgaagctatattaattcatatttttgaagttggtcaaaaggcaattttcattgatgataatgaagacatacacgacattataagcgacaatgaattgctatctaaaagattatattttataaaaagatttcatcaggcatctgctggtaatatggtatttcaacaccaccttgaagctaggtcagatgagcgattaatgatagactttccaaaggaaaaacataaaatggctggtagagatggcttctctaaatatcaaactgagtttgttgcaccaagacttttgtttaaacctacttcaaaaaacattctttttgaaacattagattttgaaatgactataaaaggaagcatcaaaataataaataatatatagattttatttattgtggttatgtaagaaagttacacatttctggcacgtttttcgcaactaataaggtagaacaaatatattacaagattaactattgtgtttataattgttagataaaaaactaatataatgcttgaatttgaaaggtattatcatatatataatcatgcaaatggttgtgaaaatctttttcgagaagaaaaaaactacactttttttatagataaatatcgagagcatacggaagctgtggctgaaacaatggcatggtgtttaatgccaaatcattttcatattttgctaagaattaaaagcgaaaaggaaatagtgtcttaaatgctaatacttggacacttttttctaattaattactcatattaagctgctttctttttcattttaattccatgtttttcaagaaacgcagcaggcgattcatatcc

SEQ ID NO: 4040 - DNA, 23009 bp, synthetic construct
  misc_feature 1..23009: note = Synthetic
  source 1..23009: mol_type = other DNA
  variation 22067..22076: note = note, n is a, c, g, or t
tacttaaaagtctattagaaaatacacaatgagtgatcgaatgtaaatttttatctagcaaatcccattctttaaaatacacacaatgtgtaaataaagttctttggcctttaaaaagttctaaaaagctttgtggggtgtaaaatggcataggatttttgctaaatttagccaagctctttttaaaatcaccttttttaaaccttagccagttgttttcatgattgctttcaagaaaatgtgcgcttagcaaatgatcgttttctctagcaagttttatagcaaatttggcaagctctgggtgggttgagtagggtgcatgtactgaaatagcagggataaatttagaagttttaaaatgcatgcttttttcataatgagttaaaaattcctcttttttagcttggataaaattttcatttgaacctaaaatttcattgaaaaataccactctagcttgtgaattgacacaaggagttaaatcgctcccaaaacttgaaatttcacctatggtagcagtgccactttttagcattttatggatattttgcgagattaatttttctttggctttttcgtttaattgctcgcgattattaaaaacactttcaagccattttaaaaagtctccaaagactaaatttccattatttgcactaaattctaaatgtgtgtgtggattgataaaagcaggtaaaagtaaggtatcttttggagttgatataagcttagcttgtgggtaggatttttgtaaattttctaaactatcaatttctaaaatattatcatcaaaaagaactgctttgttttctaaaatattaaaatcatcatcgcaagttaagatgattttaggtgctattataaacattttacctcctttaaaaagggaaattgtagctaaaatttagctttaaaatgctataatatagtaaattttactaaataaaggttagattatgaaagttatggtgatacaaggaccaaacatcaatatgcttggtgtgagagaaactcatgtttatggcaatatgaaaatggaagatatccatgagcaaatgaaacaagctgcaaaacaagctaatgtggagattgagttttttcaaagcaattttgaaggtgagttagttgataaaattcaagagtgcttaggtagtgtagatggagtgattattaatgcagctgcttatgcacacacttctatagcaatccgcgatgcgatcgcagcgattaatatgcctgtgattgaagtgcatattagcaatacttatagaagagaagaattcagacaaaaaagcatgatagcaccagtttgcgcaggtagcgtggtaggttttggtccttttggttatcatatggctttaatgggactttttcaaatttttgatcaaatcaatgcatataaagcagctcaagcaaaagcacaacaagcaaatcaatgaattttatcttaaaaaacgaaaatgcacttttttatgagtgtggctattcttgtgataatgctttgtttttaaagcttgaagatgaagcatttttcatcactgatgcaagatatagctttgaagctagtgaaatgataaaaaatgctaaggtggttttagtacaagatctttttgctagtgctagagagcttttagaaaaagcagaaattgatagggtgagttttgacccaaaagactttagctattttgaatttaaagaacttagtaaaagtgcaaatatcgtttttgaagaaaaattagacttgagtaaaaacaagcgcattataaaaaatgccaaggaattacaaattttgcaaaaggctgtaaattttggcaaagaatgctttgaagaatttgctaaatttatcagccaagaaggccatggaaaaagtgaaaaagaattacattttaaagcatgtgaaatttttcaaaaaaaaggtgctttaggactttctttttcacctattgtagctattaatgaaaatgcggctaaagcacacgctttacctagtgataaatgtttagaatatggagatttgttattagttgatgcgggtgttgtttatcaaaggtattgttctgatcgtacaagaacggcttgttttgatgagaatggtatagtatttgataaaaataagtcaaattttaaagataaagaaattatgcaaatttatgaagtggtcaagcaagctcagcttcaagctatagaaagagcacgcgttggtatgatggcaagtgagcttgattttatcgcaagagaagtgattaaaaacgcaggttttgaaaaagaatttattcatagtttaggacatggagtggggcttgatatacatgagttgccaaacattagtccaagaagtgattatgagctaaaagaaggtatggtatttaccattgaacctggaatttatatcaaagataaacttggtattagaatagaagacatggtctatcttgataaagaaaaggcagtggtgttataatttgctgattaaaggagctagaaggttagaaaaaattcgtttttttcctttttattcaaaggcagataaaaaaggaaaatacatagccattataggacttggaagcaatatagaagatgaaaaaaaacgctttcggagtttatttaggcttttaatgcaagataaacgcttgcaagtattgcaaacatcgccatttttgattaataaagcttttggctttgaagagcaaaaagactttactaatgcagtgattgttgtaagcacaagtttgcacgcaagagcacttttaaaagttttgtttttttatgagtttaaattcaaaagaaaaagaacttttaaaaatgctcctagaacgcttgatttggatttgttgtatttttcaaaaaaagcgcgtaaagatgagtattgcacagtgcctcatgtgggggtaaatgatagaattagcgtaactttgcctttgggcttgttaagataaggaaaaatatgggacaattgattcatacttttacagttgaaagcacagatgagattatacctaaggttaagcaagattatggcgataaagctttgatagtaactaataagcaaattcgtccaaaaaccatcaatcaaaagcctttgtatgaggttatagtagcgattgaagaagctgattatgaagagcatttaaaacaaaataatttacctatgccaccaaagaaaaaaccaaatacagcaagttttcctgaggctaaaattcaagctccaaaacttgaagatgaaaaaaaagaagaagatgtagtgcttgatttttcttcaaaagctaagcaaaaacctattaatccttacttaaatacaagcaaaaaagatgataattttttaaatttaaaaaacaaactttctcaagttagttcagaaattagcaaggtttcaaactatcaagatttttctatgccaaatccaaattatgataaaaaaattgaagcctttgaaaagcaaatgaataagcttaatgataaaatgaatttgcttgtggatatgatgtgggatgataaggcagatttacgcaaagaattagctataccacctgagtttgcaagtatttataagcaagctaaggcaagtggcatgcaagaagcgcatttagaagcgattatgaaggcgactattgaaaatatgccaagcactatgaaagcaaatcaagaagcagtgcaaaggtatttttactcacttttgcgtaatatgcttccatgtcgtttagaaagtgaaattaaaaagcaaaaaatcatgatgttagtaggcccaacaggagtgggtaaaactactactttagctaaacttgcttttcgctatgcttatggagatagacgctataaaaccggtattataactcttgatacgtatagaataggcgcagtagagcaacttttccaatatgctaagatgatgaaacttcctattattgatagcatagagccaaatgacttagatgatgcgattagaagtttaaatacttgtgaggttattttagtagatacaaccggaaattcacagtatgataaagcaaaacttgaaaaaacaaaagaatttttatcgcattctaatgcgcaaattgatgtaaatttggtactttcagcaaatacaaaatatgaagatttattagaaacttataataatttttcatttttaaatatagacactttaatcattaccaaatttgatgaaacaaaagtatttggaaatgtattttctttactttatgaaactagcactccgatgagctttttttccataggtcaagaagtgcctgatgatatagaagtggctaatagtgactttttagtgcgttgtgtgttagaaggttttagaagggatgaaaatgagtaatcaagcagaaaaattaaaagatctagtaaaaaatgaaaactcaaatgtaaaacatactcattttatcgcagttactagcggtaaaggtggggttggaaaaagtacttttagtgcaaatttgggcaacatcctagctaaaaatggttataaagtagggctttttgatgcagatatagggcttgcaaatttagatgtgattttaaatgtgcgtgtagaaaaaaaccttttacatgttttaaagggcgaatgctcgctagaagatattttaatagaagtaaagccaaatttatggcttatcccaggtgagagtggcgatgaaattttaaaatacaatgataaaaacatttatgagagatttttaaatcaaacaagtattttagatgatttagactttttaatcattgatacaggagcaggtataggtggtaatataggaaatttcttagaaatgtctgatgaggttattgtcatcactgtgcctgatcctgctgcgattaccgatgcttatgctactataaaaaccacttcaaaaactaaagaaaatttattaatggtgtttaatgttgttaaaaatgaaaatgaggctttgagaatttttgataacattaaaaaagtagcagatattaacattaagcataatttaaatttagaatttttaggatttttaggtcaaagtaaagatattagttctagtattaaaaaaagaactttatttagcgatgatgacactaatgcaagtgatgagctaaaaaccatagcttctaagcttttatataggttggaacaaaaagtgcttaataatgtgggagataaaagcattatgagttttttcaaaaagcttttggatcgtttttagattgagggaaaaagatgagaccagagaattttgttgctttttttactgtttgtggtttttttataggattaatgtttaccatagttaatatagaagatgcagtagagatagttgtatatacttgtttgattacttttatattttatgtgttaatccatatagtcattatgatttttgtagatgttaataaaattagcggtagaagctttaataaagaaaaatacgaaaatgaaaataatagttttatagcagaattagccgcaagagaaaagaaaatggattacttgcttgaaaaacttcaagaagagcgtgaagaccttaaaaagcttgaaagctcttcaaaaagaaaagtaaaacatgcagccgcataatgcctatgcttctacgctaaaaaaagaacaagatgacttagtcatctcttatatgccagcattaagagctatggcttttaggcttaaagagcgtttgcctgctagtattgatgtaaatgatttaattagtattggtgtagaagagatgatcaaactctcacgccgttatgataaagaacaaaatgataatttctggggctttgcaagaaaaagagttaatggggctatgcttgattatctaagaagccttgatgtaatgagcagaagcaatagaaaaatcatcaaagatattgatgctattatagatgagttttatcaagaaaatgaaaaagaacctgatgatgagtatttagcacaaagactaaatttagaagtggaaaaggtgaaagaagcaagagcagctcatgctatatcgcttgttatgcctttggatgaacagctaaattgctttaatgatagcaacatcatagagcaaatagaaaaagaagaattaatagaaaaaatcaacgcagttttggaagaatttaaagaaagagaaaagcttgtaatacagctttattattatgaagaattaaatttaaaagaaatcgcagagattttagagattagcgagtcaagaatttcacaaattcataagcgtttgcttaagaagattagagaaaggctagtttaatggctgagatactttcccaagaagaaattgatgctcttttagaagttgttgatgatgatagcgatgagagtacagctacatcaaaactagaagaaatagaagataaaagagatatagtagtatatgattttaagcgtccaaatagggtttctaaagaacagcttcgttctatcaaagggattcatgataaattagcaagaaatcttgcttctcaaatttcatctatgatgagaagtatagttgagattaaactacattcagtggatcaaatgacttatggtgagtttttgatgtctttaccttcgccaacaagctttaacgttttttcgattaaacctttagatggaaactgtgttttagagattaatccaagtattgctttccctatgatagatagacttttgggtggtcaaggggaaagttttgacaccttaagagagcttacagaaatcgaacttaatttgcttgattctattttgcgtattattatgcaaagacttaaagaaagctggatgaatgttacagaaatttatccaagtgttgaagcaaaagaatcaagtccaaatgttgtgcaaattgtttctcaaaatgagattgttatcatggtggtaatggagattatcatcggaaattcaagcggtatggtaaatatttgttatcctgttgtgcatttggaaagtattttgagccgtttggcaaatcgtgatattatgatgggtgaaacttcagctaaaaagtcaagaaataaagagcttaaaaccttgatcggccgtgctgaggtaatttatgaagctatgcttggtaaaacttttatcaatgtaaatgaatttttagatttaaaacaaggggatattttaaagcttgatagaagtgcagatgataaagctatagtagctattgataaaaaagaagtatttttagctcaagtgggacttcatagatttagaaagtcaattaaaatcttagaacttatcaaaactgataaagatgagattaaagaaatgcttgaaaaatatgaagatgaaagaagagcaaaagcaaattcgtatgatgataatgaagaactagaagaggaagacgatgatcaatgattttttaggcatattcgtcaatgaatgtgtaagtacaatagaaggtttaacaggaaaaagtgctgaatttagcgagtattatgagtatgatgtaaattctcaagattctatgactccaccattagttagcgctacttttagcgttaataatgaaatgaaaatcaaaatcctagccagtgcggttttaatgagtgcaattggtgagtggatgatgggagaagaagaaatttccaaaaacagtgagctaaatgaagatgaaatggacgctgctaaagaagctatacaaaatatcatttcagcattttctacaaccttaggcgcacaaaaagaaattccaaaaatggagtttagtctagaaaattgtgaatttgttgcagatagcttagaacttggtggttttcataaactatatttatacaatgtaaaaatagctgatttagaagaaaaaatttctttagtatttgatgagaaaatttataagattttaaccaaaactgacttagaagaaatcgtagcaacaaatgaagatcatacgcaagatcataaagccttggctaatgtagaagagctaagaaatatcggtttgatcatggatgtacgcttacctataagagtgcgtataggtagtaaaaaaatgcttttaaaagatgttttaactatggatataggttcggttatcgagcttgatcaattagcaaatgatcctttagaaattttaataggcgataaaaaaattgcttatggagaagttgttatcgtagatggaaactttggagtgcaaattactgagataggctctaaaaaagaaagattagaacaactaagatgaaagaatatatcattgaggatgttacctatcttaaagaattagaaaaaattcaaaaaggcataactttttttggttctgctaggttaaaagaagacaatgagtattgtattttggcttcaaaattagctcaaaagttagcagatcttggttatagtatcatcagtggtggtggcggtggcattatgcaagctgctaattatggcgctatgcaaagtcaaactccacatttaaaatcttttggatttaatatacatttaccatttgagcaaaaagcaaacgactttttagagtataatatcacttttaagagcttagccattcgcaaaatggctcttattcaaaagagtctagcttttgtgattttcccaggcggctttggaacattagatgaattttttgaaattcttactcttaaacaacttagttttaaaaaagatgttcctattattttagttgggcaaaaattttggcaacctcttgatgaatttatcaaaacttctttgctagaacttggaactatatctaaaaatgatgagttaaagtatagtataagtgatgatttagatgaaattataagaatgataaaggaaaaagatgaaaattcttgttgcaatgagtgggggtgtagatagtactgtaactgcttataagttaaaacaagcaggacatgagatcataggttgttatatgaagcttcatggaaaagctaattaccatgaagaaaatatacaaaaagttgaaaaagttgctaaatttttagacattaaataccatattttagacttacaagaagattttaaaaatcaagtttatatgccttttgttaatacctacaaagaaggcaaaacgccaaatccttgcgctttgtgtaatcgctttattaagcttggcaagcttttagaatttgctaagagtttgggttgtgaaaaattagccacaggtcattatgcaaggatagaaaatggtttgattaaaactgcggttgatgagagtaaggatcaaagctattttttagcaaatgcagataaagaggctttggagtatttgattttccctcttggagagataaaaaaagaagatgtgaaaaaatttgcttctacaatcgatgttttaaaatcttttgcaacacaaaaggaaagttctgagatttgttttgtggaagatacttatgtgcaagttttagatcagtttatggatactaaaattccaggtattgtaagagatagtagcggtaaagaagtaggaaaacacgaaggttatatgcactataccataggtaaaagaagaggttttgaggtgcgtggggctcatgagccacattttgtattaaaaattgatcctaaaaaaaatgaaatcatagtaggtaaaaaagaagagcttaggataagtgaatttaagcttgataatattaatttatttatcgatgctaaagaaatagattgtgaagtaaaaatacgctatagatcaagatcaaccccgtgtaaagttttgattaatgaagataagagtgcaaaaatcatcttacaagagcctgtttatgggcttgctagcgggcaaatggcagtattttatgataaagatttggttcttgctagtggatttataaaataatgctaaagtttgatgtttttaaatagcaggagttaaaaatttagttttgtaaaattattttactattaagtggtagcttgaaattaatttcttattttaatcttttttcaagagtaaggccatcatactcggtggctttttaaaatctgttttagaaattttattatataaatttaatataagatgtataaaaattttatataattttaactataacagttaaatcaacaaagagtaatattatgaggatattaggttttgatataggaattaattctataggttgggctttcgtagaaaacgatgaactaaaagattgtggagtaagaatttttaccgaggctgaaaatccatcaaataaagaatctttagccttgcctagacgcaatgcaagaagttctagaagacgtttaaaaagaagaaaagcaagattggttgctatcaagcgtattcttgcaaaagaattaaaactaaacttcaaagattatgtagcagctgatggagagctgccaaaagcttacgaagggaagttaacaagcatttatgagctaagatataaagcattgattcaaaagttagaaacaaaagacctagcaagagtgattttgtatatagcaaaacatcgtggctacatgaacaaaaacgaaaaaaaatcaaacgacgccaaaaaaggaaaaattttaagtgctttaaaaaataatgctttgaaattagaaaactatcaaagtgttggagaatatttttataaagaatttttccaaaaatataaagaaaatactaaaaatttcatcaagatccgcaataccaaagataattataataattgtgttttatcaagtgacttagaaaaagaactaaagcttatcttagaaaaacaaaaagaatttggctataactatagtgaagattttataaatgaaattcttaaagtcgcattttttcaaagacctttaaaagatttttcacatttagtgggagcttgtactttttttgaggaagaaaagcgagcttgcaaaaattcatatagcgcttgggagtttgtggctttaactaagattatcaacgaaataaaaagcttggaaaaaataagcggagagattgtaccaactcaaacaataaatgaagttttaaatctcattttagataaaggaagtatcacatataaaaaatttagatcttgtatcaatttgcatgaaagtattagttttaaaagtcttaaatacgataaagaaaacgctgaaaatgcaaaattaattgactttagaaagttagtagaatttaaaaaagctttaggagtgcattctcttagtagacaagagttggatcaaatatctacgcatattaccttaataaaagataatgttaaacttaaaactgttttagaaaaatacaatttaagcaatgagcaaatcaataatttacttgaaattgaatttaatgattatattaatctcagttttaaagcacttggcatgatccttcctttgatgagagagggaaaaagatactatgaagcatgtgaaattacaaatttaaaaccaaaaacagttgacgaaaaagaagatttccttccagctttctgtgatagtatatttgcgcacgagcttagtaatcctgttgtaaatagagctataagtgagtatagaaaggtcttgaatgctttgcttaaaaaatatggcaaagtacataaaattcatttagaattggcaagagatgtagggcttagcaagaaagcaagagaaaagattgaagaccaacaaaaaaacaataaagccattaatgattgggctttaaaggagtgtgaaaacatagggattaaggcaagtgctaaaaatattttaaaattaaaactatggaaagaacaaaaagaaatttgtatttatagtggcaataaaatatccatagaacatttaaaagatgaaaaagccttagaagttgatcatatatatccttattcaagaagttttgatgattcattcataaacaaggttttggtttttaccaaagaaaatcaagagaaacttaataaaacaccttttgaagcttttggaaaaaacatagaaaagtggagtaaaattcaaacactagctcaaaatcttccttataaaaagaaaaataaaattttagatgaaaatttcaaagacaaacaacagcaagatttcatcagtagaaatttaaacgacacaagatatatcacaactttaatagctaaatatacaaaagagtatttaaattttttacctttaagtgaaaatgaaaatgcaaatttaaaaagtggggaaaaaggaagcaaaattcatgttcaaaccatcagcggtatgcttacatcagttttaagacatacttggggttttgataaaaaagatagaaataatcatcttcaccatgcacttgatgctattatcgttgcatacagcacaaattctatcataaaagctttttcagattttaggaaaaatcaagagcttctaaaagcaagattttatgctaaagagcttacaagtgataattataaacatcaagttaaattttttgaaccttttaaagactttagggaaaaaattttaagtaaaatcgatgaaatatttgtctcaaaaccacctagaaaaagagtaagaagagctttacatgaagatgctttttattctgaaaataaaattatcgataaatgtagctacaattctaaagaaggcttacaaatagcgctaagctgtggaagagttagaaaaataggcacaaaatatgttaaaaatgatactatgataagggttgatatctttaaaaagcaaaacaaattttatgctatacctatttatgctatggattttgccttaggaattttgccaaataaaatagtgatcactggtaaagataaaaataacaatccaaaacaatggcaaacaatagatgaaagttatgaattttgtttttctttgtataaaaatgatttgattttgttgcagaaaaaaaatatgcaagaagctgaatttgcttattataatagttttgatattggttcttctagtatttgtgttgaaaaacatgataataaatttgaaaatttaacagacaatcaaaaattattattttctaaggcagaggaaggaaaagtaaaaacaaaaggtttaggaattcaaaatttaaaaatatttgaaaaatacattataacccctcttggggataaaataaaagcagattttcaaccaagagaaaatatatctttgaagacaagtaaaaaacatggcttatgatgaagcttttaaaagtgtattgatcgcaaatcaagcaaaactaagtcttgagctaaatcatcttgttataaaacaagatgataaagaagctagaatttttctaaaagatattaattttattatattagaatctttacaagcaagtattacctcaagcttgcttagtgctttggctaaatataaaattatacttttaacttgtgatgaatctcacaatataaatggaattttttctccatttttaggacattttataagtgcaaaagtagctaaaaaacaaattgcggtaagtttgcaaagaaaagcgattttatggcaaaagattattaaaaacaaatttcaaatcaagcttatattttaaaaattaccaatcattctaaagaagccaaagaacttttaaatatggttaaaaatgtaaatttaaacgactctaaaaacttagaatcaactgcagctgctttatattttaaaacgttatttggtaaagattttacaagaaatgatatatgttttataaactcaggattaaaccatggttatgctattataaggtcgcttatcgttagggcagtttgcataagcgggcttttgccatggcaaggtataaaacatgataatatttataatgattttaatctttgcgatgatttgatagaagtttttagaccgttgattgatttgtgtgtatttaagctaaaagatacaaaagatagtgaatttttagacaaggaaacaaagcaaaaattaattggtattttgcaagaagaagtggtttttgaaaataaatcttatcctttaaatagagctataaatttttacgtgcaaaattttaaaaatgctttattagaagatgatgagctgatgatggtaaatttatatgatagaagataaatttatgagagttttattgatgtttgatatgcccaccaaaagtaaaaaggatcaaaaaaacgcaaataaatttagaaactcattgataaaacttggatttttcatgatgcaatttagtgtgtatgtgaaaatttgtaaaggatcggtttcggcaaaaacaacgataaaatcgatagagaaaattttaccaccttatggaaatataagagttttaaccataacagaaaaacagtttgataatatgcaaattcttttaggcggagcttcttttaatgaaaaaatgaatgatgataaaaatctagttttatttgaatatgatgaaaaaagtaaagattttaaatatggcaatgaaaaaataaacaaagaaaggaaaaaaaccaagtttatacaacctagtttatttgaattttaatggttttaaagggattgtaaccctgcgtggatgaccaaaaaccacttattttagtctctttttaaatttctttagcaagaattatagcatattttagatctttttccatagaaaaacacctagttttctttatttgataaagatctattttatcataaagaaatttaaaaagagactaaaacttaattaacatagtgctacaaaagtgcataattttatcataaagaaatttaaaaagagactaaaaccgtatagcaaatacaattagaattattgttattttactctaaagaaaattagaaaatagcttcacaaatttatgaagctaaaatatctccataatgcttatatcaaaccacaaaagatcaaatttaagtaaaattccataaatcacagcgctaaataatcccgcgaaaattcctgctaaaacatcatctagcattacccctaaaccgcctttggtttttttgtcaattttacctatgatagaaggttttgtgatatcaaaaaatctaaacaaaacaaaagaaagtaaaaaagtaaaaacactttgtccgcaaattgctaaagctaaaaacacccctacaacttcatctataacgatgtgtttatcatcgtgtttgcctgtttgtttttcatactgatcgatgatttttatagagattaaaaaaagtaaaatagcaagtaagattaaagtttctacgcctaaataccttaaaataaaaaaagcagggattagcgctgctatcgtgccaaaagttcctggagctttattaacactacctgaataaaaaaaagttaaaaatagtttttgcatgattacaccatatatgacatttgatgaagttttataagttgctcataaaattctttatcgcttcgatattctaaaataccatgcgtagggaaaagattgctatagatattttgtttattatgaaagcgatttggaaaaagctcagataaaatcaaagctgaaatttctcttcttataaaaactgctggtggaatgataccaagtctgagtaaattttttaaagaatcgccatggtatttcatatgatgatgagctccatgcgggcatgatttagtgcttactatcattttgcactcatcgcaaaatacaaattcaggaagtatggttacttctatattataatcttttgcaaaatcatcaagcacagtaaaggctctgttttgattaaaatacattccaagtcctgcgtgattttgccctacaaaaagtttattacagtcaaaacttttagctaaagcacattcaagaactggatttaaatgtgaggcaaaaattttgatattatgtaaaggtatgagtaaaaccctagaagatggtaagtaattttgtgcaaaaacatcaaaacaacgctttttaagttttaagctcaaaccgttattttcataagattctataaggaaaataatcactagatcagattgctctatagcccatcttaaaattctctcatgcgctctgtgaaaagggtcaaaacttgaaacaatggcggtaatattagaagggtttaatctttttttgattttttcaaaatcttctttaatagctttgatatggttatgataaatttcaaattccccactaatgcaagtttttccaaaatcttggattaaacaagcattaggtctaaaaatatcattgctgtttttatcattttcaaatttactttctaaaatgatatgtcctatgattttatcattgcagataaagtctattttatcgccaacttttgcattttttaaaactgtattattctcttcagtgctagcgggtgcaaaggttagagtataaggaattttttgattatgaattattccagtagctaggacttcatctctttctttttggttcattaatttagtaaaagaaccaaaaattccttctttgataaagcataaaacctcgtattcttcctctgagattataatgctattttttctttgtaatgccatattttttccttttttcccataaagactttcttgaaattcctaactttttagataaatccgtatcaggaaagacgttttgataactaatgataatgtgtttaacataatcatcaatggttaaaattccattgctttcaaagcttttttcatcttcgcctagctctaaaatttgaaaatcactatgttcaatattcgcacttgtatgtataataacagctttttttaaagcaagatttaacaccttttctttttccaaaggttttaaggtttgaaaattgactaaataatataaagaattatccttaaaaatcttatctaaattttgttgatgtgaaagatctatgtatatatttgcgatattgtgctcattagtataattaaatacaaaatgatctgcaaaaatttgattattagtttttaaaatcaaaggcaatttgaattttttataatcaaaagttggtagctttgctgtttcaaatttatgttttaaataagattgataagtatgatttaatatgcttatttttttaaattcttgaaaatgctttattttacgcattaattcttctatcatgaaaggcttttgtatataatcactcgcaccagcttttaatggtgctaaaacagtatctgagcttatgtaagatataagtaaaataatgattttatgcttaaaaatttctataatatgttcaaaattagccatgctagtagaaagcaaaataacctcataatcatgatgagcaagttcattaacatttgcgataatatcacaatcataacctatagaattaagctttgagcctatactttgggctaaataaaattcattttctactattaaaactttcataatttcatccaatcaaaatattttaaatttacacttgctaaaaccgcaattccttcttttcttcctacaaatcctagatgttctgtggtggtggctttgatattgattttatttggtgtggtttttaatgttttagcgatattaaaagtaatagcttctttaaaatctttcattttaggtgtttgagctatgatagtaacatcagcatttacaagttcaaaaccataattttgcaccaaagcataagcattttgcaataaaaacatagaatcagcatttttatactgcatatcattatctgggaaaagttcgccaatatctccaagccctgctgcacccaaaagcgcatcaattagcgcatgagctaatacatctccatcggaatgagcttttaaacccatactttcatgtacttttaccccacctaaaagcaaagctctttgctctccaaattcatgcacatcaaaaccatttccattaaaaatatcccaagatggttttggtaaatttaagctttttaaatcttctttaaaggtaatttttttagctaactcatcaccttgtacataccaaattttaccaccaatagcttgtatggctgtgctatcatcggtgaaatttgagctttgctctaaagctttttttagcatacttgtgcgtgaaagttgaggggtttgtatgagtttgattttatctctatcaatagcttcttgagcataaattgtagtatcgcttacttttaaaacaggcgtaatacaatcagctttgtcatgattttctatgatgttattaaaaagatttttagaaattaaaactcttgcaacatcactaaccaaaacatattcactctcaaccatgcttaaagcattgagtaaagattgtgctctagtcgcaccaccttggacaaatttatattcaggggcaaattttttcatataagaaatattaccagaagtaacaactatttgtttaaaaggataaaaagaacttaaatttttagtagcataaagccataaaggttgttcgcctagtcgtaaaaactgcttttttaccggagcattaaatcttgatgattctcccgcagatagcataatcaaggaaatatctaacatttgttacaccttaatttcttattaatgttacgatattatacaccataaaagccaaaatttatatttatgttagtagaattaatcattttaaataataaggagaaaaattgaaggaaaaaatcgaagaaagattaaaacaagttatatatccaggttttaaaaaagatatagttagttttggttttgtaaaaaaaattgaatcaaatgaaaatcaagcacatattgtagttgaaatcgtttcagctaatgctcaaattgcacaagagcttagactaaacatcgcaaatgctttaaaagatttaaatttagagcttaatttagaaatcattcaaccaaaaattcctgaagaaaaaagcaattcaagaagtggtaaaaatatcgctccacaaattaaaaatttccttatgatttcaagcggtaaaggtggagtaggtaaaagtactacaactttaaatttagcgatttctttggctaaaatgggtaaaagagtaggacttttagacgcagatatttatggaccaaatataccaagaatgctaggtgagagtaaaagcaaacccgaaattgtaggtcaaaaaattcgtcctattttatctcatggtgtttatatgatgagtatgggcgtgttaatagaagaaggaaaaggtttaatgtggcgtggttctatgatcatgaaggcaattgagcaacttttagctgatgtgctttggcctgaacttgatgtattattgcttgatatgcctccaggaacaggtgatgcacaaattaccttagctcaaagcgtgccagtgagtgcaggtgtgtgtgtaagtactcctcaagtggtatctttagatgatagcaaaagagcgctagatatgtttgaaaaattacacattcctgttgcaggtattatagaaaatatgagtggctttttatgtcctgataatggcaaagaatatgatatctttggtaaaggtaccacagaagaaatggcaaaagcttataagtgtgatgttttagctcaaattcctatcgaaatgagtgtaagagaaggtggagatagcggtaagcctgtaagtttttatatgcctgagagtgtaagttcaaaaagatatttgcaagctgctgaaaaaatttgggaatttatagaaaaagttaatcaagaaggtaaagtagataattcagctattcaacctgtaatgaatggcaaaagtgcgtgctcgcaataaggaggaaaaaatgccaatagaaagtaaagaagaatttttaaatttaatcaagcaaatcgaacaaaggattaattataaaaagcctaaagcttttgctatagcaagacttgatctaagtcaagttgatcctagtaaaaaacttcaagctaattttggtgtgattaattttgagcaaaattatgccgctgcagctgttatgtttgaagctttttttagaagaggggttgatgttgattttaatgaaagtgagtttgtggctactttgattaaagaagatttggattttgcacttgaatgctttgcaccatttttacaagagcaaggtcataaaaatatagaagcaatcaaagcagcaaaggaaaattttagagaaaatgctttttcttttgtttgtatttttgaagatgaggtaccaaaaagcttagaaagtgtgtatttgaaactttatttgctttccaataaaaaagtacctttaagaagcttaaatttaacaggtgcttttgggattttaccaaatgttgcatggagtgataataagcctattgatttagactttttaagagaaaatgagattgatttaaaaatgagtggaagatatccaagaattgattatgtggataaatttccaagatttttagctcatgttgttcctgaggataatactagaattttagaaagttctaaagtaagaatgggtgcggttttagctgcaggcactactataatgccaggggctgcttatgtgaattttaatgcaggtacaactggagcttgtatggtagaagggcgtattagttcttcagctgttgtgggtgaaggtagcgatgtaggaggtggtgcttctatacttggtgttttaagtggtacaagtggtaatgctattagcattggtaaagcttgtcttttgggtgcaaattcggttacgggaattcctttaggggataattgtatcgttgatgcgggtattgctgttttagaagggactaaatttgctttaaaaaatagagaagaacttcaaaaaatcaatcctgattttaaatttgataaagatatatataaaggtttagaattagcaggattaaatggtttgcattttagacaagattctcaaagtggagtgatgatagttgcttttaataaaaaggctgtaaaacttaatgaagatttacattaattcttagccattatgggttaagaattttaaataattcatgtagtttataaatacacacgctagggtgatgtttaatgcttcctgtatgtagtaaaatctctttgctattttttttataaagcttttgcacaaaattaaaattccaccatttgtaagttttgaaatttaaattatgggtggtatttatatgaaaatttatataagaatggtttttgaaattttgttttaaaccaggtgcttgaaaggcatagacttcttttgctgcgctaggaaaggttcttgcaaaagtttgagctagatatcctcctaaagaatgtcctatgatgatgagatttttatcaatggtgtatttttgtttgagttgattgtaaaaatattgcatggattgaatttggttttttggggttttgttaagtaaaatcaaaaaatcgctataaaaatctttaaaatcaaaacacaaaggatttaaatcacttcctgcaaaggctaaaatatagttttttctttttttatcataaataaaactagctctaaaacccattttagattgagggtgtgtttcgttgatggctcgagtatttcataattttttaaaaattttaaagctaaaaatgcattgtttaaaccacctacgtggattttttcttttttgtaaaaaggattggttaaagcttttataatggctttgtatttttgcaaaccttctttttgtaagctttggtttaaatatacattagcacaataagctaccaaactataatcatataatttttgcaataaatcgatatttttttcaaaatgagtgtgaagttttaataagagtagtttttcttgggaagttaaatttgttttttgacttaaagcaataaagctttgcaagtcaaaaaacattataaattcttacatagagcaagtattttggatagttgagttaagcatccaaagagctttttcatattttgcaatattttcttgagcaaatgctgctgttgtagtatcgcttgctttttcagcttcttcatttagttttttaaattcaaccaaaagatatttataatcttctctaataagctctaaaacttctactggagtaaagcaatctttttgaaccttaggtgcttttgcattttctaataaagtgtttgagcaaacgatagctttttctcctagttgtaaagctctctcagcgcaatcatcaaaaagctctgccatttcttcataagctttttctgtatattcatgaattgagaaaaattgtaaaccttttacattccagtgataattatgaaatttaatccataaactatgagcatccgcttgtaattgcaataattgttttgttactgacatgttatctccttttttatttttaaaattataacataaaattcttaaataataattattattattattatnnnnnnnnnncattacatcaccatcttggacgatgtaatctttaccttcaaggcgtagttttcctgcttctttagcaccgctttcacctttgcaagctatatagtcttcataagaaattacttcagctttgataaaacctttttcaaagtcattatgtatcacacttgccgcttttggtgctttccaacctctttgtatagtccatgatctaacttctatttgacctgctgtaaaataactaattagattaagctttgaaaatgctgtgcgtataactacttcaagtccgctactttctatacctaaagattttaaaaactcataattttcttcatcacttaatgctatcatttcttcttctatttttgagcaaagtttgataacttcatggcctgattttgctgcaaattctttaagattttttacaaattcattatcttctaaaagtgaattctcatccacatttgccccatatatcacttccttagccgaaagtaatcttagttcttttataagagcttgatagacttcatttttatttggaaatgaacttgcactattattttgatttaaatgctctaaaagctcattagctaaagctaagctttcttttgcacctttttcgttagcttttgcacctttggtgagtttttctatttttttgctaagttgctctatatctgctaatataagttctgtttctatgatttgtacatcacgcacaggatcgacactacctgcaacatgagtgatattttcatcatcaaaacaacgcacgatgtgtaaaatcatctcagtttcgcgtatattagacaaaaatttattacctaaaccttcacctttacttgctcctgctactaagcctgctatatctacaaattctatatttgagcgtatgattttttgcggattaacgatttttgccaactcttttaagcgatg

SEQ ID NO: 4041 - DNA, 22955 bp, synthetic construct
  misc_feature 1..22955: note = Synthetic
  source 1..22955: mol_type = other DNA
ctcctgaagccttaagagatagaattatagatgcaggagctaaacttgtagtaacggctgatggtgcttttcgtcgtggcaaaccttatatgttaaaacctgcagtagataaggctttaagtgaagggtgtgaaagtgtagaaaaagtacttatagttatacgcaataatgagcctatagaatatattaaaggaagggactatgtttataacgaacttgtgaaaaatgagtcttataagtgtgaacccgaaattatggatagtgaggatttgttgtttttgctttacacttcaggatcaacaggcaagccaaaaggagttatgcatgcaagtgcaggatatatactttgggcacaaatgactatggaatgggtttttgatattaaagattatgataattattggtgtagtgctgatgtgggttggattacaggacatacttatgtagtttatgggcctttagcatgtggagcaacgactataatgcatgaaggaactcctacttatccaaattctgggcgttggtggagaatgatagaagagtatcaaataagcaaattctacacttcgccaactgccataagaatgcttcatgctgatgcacctaatgagccaagaaaatatgatttaagtacgcttgaagtgcttggaacggttggagagcctatcaatcctagtgcttggaagtggttttatgatgaaatagggggaactaaaagtcctatagtcgatacttggtggcaaacagaaacaggtgggcatatgatcacgcctttaccaggcgccactcctttaaaaccaggttgtgccaccttgcctttgccagggatttttgcagaagttattgatgaagaaggcaataaaaaagatgaaggtgaagatgggttgctttgtataactaaaccttggccttcgatgattcgtggaatttggggcaatgatgaacgctatatagaaagttatttttctcaagctaaaaaagatggaaaagctgtatattttagtggcgatggtgctttttatgataaaaatggttatattaccatcacaggaagaacagatgatgtggttaatgttgcaggacatcgtataggaacggctgaaattgaaagcgctattgctaaacatccaagtgtagcagaatcagctgtagtgagtattttggatacgattaagggcgagtcattgtttgcttttgtggttttaagtcctgcatccagttgtgatcttggcggagctatagaaactttaaaagaacttaatgacattttaagagtagaaataggacctatagctaaaatagaaaaaattctttatactccagatttgccaaaaactagaagtggtaaaataatgagaagaattttaagaactatagcaagaggtgaagaaatcaaacaggatatttcaacacttgaagattctaaagtagtagaaaccattgttaaattagctaaggcagagtttgaataacaaggtaaaaagaactttgcctagttgcatgaaaattcataaaaataagctataatgataaaaaaataaaaggaaatttttatgcttcaaacttgtattttccctgcggcaggttatgggacgagatttttacctgcaacaaaaactttacctaaagagatgttacctatcttaaccaagcctttgatccattatggagttgatgaagctttagaagcaggaatggaaaatatgggatttgtcacagggcgtggaaaaagagctttggaggattattttgatatttcttatgaacttgaacatcaaatttcaggtacaaaaaaagaatacttacttgatgaaattcgctctttgatcaatcgttgtacctttacttttacaagacaaaatcaaatgaaaggcttaggtgatgcggttttaaaaggtagacctttggttggcgatgaagcttttggcgtaattttggctgatgatttgtgtgttaatgaagaaggcttaaatgttatggctcaaatggtaaaaatttatgaaaaatatcgctgcaccatcatagctgtgatggaagtaccaaaagagcaagtttcaaactatggagtaatttctggaaattttgtagaagaaaatcttatcatggttaattctatgatagaaaaaccaagtcctgatgaagctccaagtaatcttgctatcataggaagatatattttaactcctgatatttttggaattttagaaaatactaaagcgggaaaaaatggtgaagtccaacttaccgatgcgcttttaactcaagcaactaatggtatggttttagcttataaatttcaaggaaaacgctttgattgtggaagtgtagaaggctttgtagaagcgacaaattatttttacgagaaaagtaaatgttaaacaatacacttttttttaagcaaagtgaaattcacactataagttcttatgcaaatcgtattaatgatgaggtaaaaagtggagatatagggtattatcatcttattgatacaagtttgaatttaatcgatgagagtttggcttttatcaaagacaaagaacacataaaaaatatcgttttagtgggaatgggtggttcaagttgtggtgtaaaagccttgcgtgatatgctttttaatgaaaaaagcaaccaaagagaactttttatactcgataacacaagttcacattcttttaataagactttagaaaaaatcaagcttgaggaaagtttgtttttaatcatcagcaaaacaggtagtactatagaagttgtatcgctttttaaacttcttattgaacattttaaacttgatatgcaagaattaaaaaaatactttgtttttattaccgataaggattcaaaacttcatcaagaaggtgaaaatttaggtattaaatgcttttttatccctgcaaatgtaggaggtcgttttagcatactttcagccgtaggtatagttccgctttgtttttgtggctataatgccaaagctcttttagaaggagctaaagcttgttttgaagatttttttactcataaaaaagatgaaattttacaaaaagcctatcattattgcacacacaaaaatgccaatatcaatgtacttttttcatatagtgatgcttttaaaggctttaatgaatggtatatccagcttattgctgaaagtttaggtaaaaagcaaggctataaacgtataggtttaactcctattgcactcattggagcaagagatcagcatagttttttacaactcattatggatggacctaaaaataaaactgtaacttttttaaaaatcaaagacgctcaaaaagcacctattatccctgatattcattttaaatttttagattctttaagtaataaagtcaatcttcacgaacttttaaacgctcaatgtaatgcaactatgcacgctttaatcgctgaaaatttgagtgttgatgtgatagaacttgaaaaacttgatgcttggcatgcgggatatttgatgtattattatgaactttttacttcaacttgcggtgttatgctagggattaacacctatgatcaacctggtgtggaagttggaaagttgatcttaaaaaatatattaaattcttaatcaaaattcattaaaaaagagtataataattttaagttaaaattataataaaaatttttaattaataataattattatttaagaattttatgttataattttaaaaattaaaaaaaggagtcaatcatgtcagttacaaaacaattattacaaatgcaagcagatgctcatcatctatgggttaaatttcataattatcactggaatgtaaaaggtttgcaatttttttctatacacgagtacacagaaaaagcttatgaagaaatggcagaactttttgatagttgtgctgaaagagttttacaacttggcgaaaaagctatcacttgccaaaaagttttaatggaaaatgcaaaaagtccaaaagttgcaaaagattgctttactccgcttgaagtcatagaactgatcaaacaagattatgaatatcttttagcagaatttaaaaaactcaatgaagcagcagaaaaagaaagtgataccacaacagctgcttttgcgcaagaaaatattgcaaaatatgaaaaaagtctttggatgataggtgctactttacagggtgcttgcaaaatgtaatttaaggggctttatgccccaattatacaaactaggttataatatccttttttaaaggataaaattgaaagtacttaattttttttatgaaaatcaccctaaatttgaagtaagttatgaaagaaaaaatcaaatttcaaaaccaaatattatcataaaaggcccacgattttgtggtaaaaaaacacttatttttaattttttatctcaatttaaagcaagtgaaattttgtttttagatttatatgatacacgctttgaaaaacaaagtttagaaagacttgctgattttctgaatgaaaatttacaaattaaaattctttgcctttataatttggattttatccctaatttagaaaaaattaaaattcccatcatcttaagtacaaatataaaagatttaaatataaatgggtttgaagagcttgaacttgattattttgattttgaagaatttattagtgtaagtaagaaaaatttacctataaataatttagtaggtctttttttacaaagtggacgcagtaaatttggagaaaaaaacatacttctaagacaaagctttactcttttagaattagaaattttaaagtatttagctttaaatttgggtcagcaaatcagtatttctaagatatttatagaacttaaaaaaagattaaaaacttcaaaagatagtgtttatcaagctataaaaaaattagaaaatacttatgtgatctatactttaaaacatgatgaaaaaaaacttcaaaagatttattttaaagattttggcctaagaaataatctttgtatttcaaaggatttttcgcatttatttgaaaatttagttttaagcgagttgtttaaatttaaagaagattttttttataacaaatactttaacttttatagccaaatatctaaaattgcttatatttcaagtccaactttagatattgatttgattaaattacgtactaagaaaattttaccaaaggctttagaacttggaatttttcatgtgatttttatcactctttcaagcgaggatagtttttttgagcaaggggttaaatttgaagtcatatcttttgataaattttcacttggattttaggtgttatttgagtttgtatcgtatttttcaaggttgtatcgtttgatgatttttgtaataagattgatataatatcccttgcgttcagaataagaatctaaagttttaatagcctctagtcctgttatctctttgccttcgcttgcaaatttagctcttgcatcgcgaaacttttcataagcaaaatgacgatttaaatttaaaacataagagtaaacactatcttgcagactatcaaaaatcttaattttatgttttttatctggatgtcttaaatcaggaattaaacctttctcaccccaagtccattctccaaaaagattatttgcttctcttgcgaagcgacttgtacctgtagcactttcaactaaagcttgggctatacccatggattttggaattttttgaatacgttttttatattctgcaaaatcataaagattttcaatgcgatatttgttttttatcgtgataagtttttcaagatttgtttgatttgaagtcctaaagcctgttttgtaagcatctttaaaaaaggcttcaataaaagctctttcttgttcaatttttttaaagctttgatcaaacatttcattcatttttataaaaaaaatttgtcttttttgatctatatcaagtttgtaatattcctctccaaagccattttttagatcatcagcaaaaagtgggattagaaaaagactaagaaaaattataattggcttcaaaacaatactttacctttccttcaaaaaacaattcttcatttttatatgtaaacccaacctcttcaccacttttaggagttattttaactttattttgtacttttttatttaaaaatgccagataaaaacaagcccccattcctgtgccacaagctaaggtttcatcttcaactccgcgttcataggtacgaacttttaaatgattttcatctaaaatttttacaaaattaacattggcattatatttttgtctcattttttgacaaagtattgtatcaaattcatctaaattttgacaaaaatgcactagatgtggaactccagtgtcgcaaagttgccaagtttttcctaattcttcaaaagtattttgcacgctttttattttgcctaaagatacttcaactttatcttgatttacctttgcttttattattcctgcaccggttaaaaaactcatgttaggatttattttgttaatatgatgtgcaaaatgtgccgcagcccttgagccattgccacacatagcagcccttgagccatcgttattataaaattcccattcaaagtcgtatttttcatgaggcaatatcacgataaagccatccccacctatgccctcataacgattgcaaagttctttagctaaagcacttctatcttcttttctatcagcatttgttatgacaaaatcattcccacttgcacaatatttataaaatttcacatttttcctttagaaatttcttgtattactttaacacattcttgcctaaaatcgacataagaattagtatttttaatgataaaatctgcttttttaagtttttcttcaatatctatttgagaatcaagtctcacttttgcagcttctaagctgagcttatctctttgcatgattcttttaaggcttaattctttaggtgtgtaaattacaatgactttgcctaaattttcataagcaccgctttcaaaaaaaagaggaatttctacaaaaaaagctttattttctttatctagaatttgcatttgttctaaaattttagctcgaattttaggatgagtgaaattttctaaggtttttttagcttctttgttgttaaaaacaatttctccaaggatttttctatcgattttcttttcttttgtgagtaaattttttaagttaaagggagaaaaaatcttttcaagttctaaagcattttcatctaaaattttatgagcaattttatctgcgctaatgcttttaaagcctaaagaattcgctatttctataaaagtgcttttaccacaagcaattgaagcggttacaaaaaaagcatttttcatcttatgccttattaaaacttttttcgttaaaatacctttttagttcttaaaggaaaataaatgaaaatttcatatgaagatgcaggcgtaagtatagataatggaaatgcctttgtagaggctataaaacctttggttaaagaaacttttaatgataatgttgtaggcggaattggttcttttgctggtgcttttagaatgccaagcggttttaaaaagcctgtgattttaggtgcaacagatggagttggtaccaagcttcgcttggcaattgatgctaaaaaatatgatactataggacaagatttagtagcaatgtgcgtgaatgatttgatttgtaattttgctacgcctttgttttttctagattattatgctacagctaaacttgaagtagaagtagcaaaggctgttgtatcaggcattgccaagggatgtaagatggcaaattgtgcattaatcggcggagaaactgctgaaatgcctggaatgtatgcaaaagatgattttgatcttgcgggttttgcagtgggtatggctgaagaagatgagatcgatagaagtaaatttgttaaaaatggtgatattttattggcacttcctagttcaggacttcattcaaatggttattctttagctagaaaagtactttttgaaagtttaaaattaaaatttgatgacaagatagaggataaaaatttaattgatattttattagagcctacaaggatttatgtgcgtgattttcttacattaaagccttatattagtgctctagctcatattacagggggtggtttagtagaaaatttaccacgcgttttgcctcgtggcatgggtgcaactatacgcaaacaccatcttaaaactcctgaaattttttatattataggacaggctgtagaagaaagcgaaatgtatagaagctttaacatgggagtgggtttagtaatggttgtagatccttctaatgtaagtaaggttttagaaaattcagatgcctttattatcggcgaaatttgcattaatgaaggtattgttttagaatgaaaataaagcgtcatacgctttatttttttattttaagttctatttttgtagtgttttgttcttttggcaaaggattggtttgtgctagataaaaggctacaagtacatttacaagcatagcgataagtaaaagaggagtggtccgttttataatatccattggagctacttttgcaaatccagctaaagctatgattccgcctgctattggtgaagctgcgcgacctaaacaagatgcaatttctacaggtaaaactagagtaataggtgcaatgcctaatttcgtagctatatcaggagctagttttccaaaagcattaaaagcagcaattccacttcccataatcactgtggcaaaataaactaaaaagcttaaaatagctatactcaaaagaattccaaaccatgcaaaatttcctgttccaagatttgaaaccgcgttagcaaggatattaactccaccaagtgctttaatgccttcagcaaatactccagcggcgatgattatgcttacgactgagataaaaattttagccatagccttttaaaatcaccatcatatcttcgcctaattttctagcatttctgtgtcttgcaaattcaacaagaaaaactaaagaaattcttacaaaatttgcttcacaacatcgagcttgatagtaaaaaaatatgctataaataaaaatacaacaggtaaccaaggaaagagtatgtaaaaaagtagggcatttaggatcaatgatttgcggaatttcaacttcatcatttaaaacacctttttctttatctcttttatcaatccaagcaaaataaaaaggaatcaagatggcaataactacaacataggcaatcacactataaatttggtaatttaaaaaaagccctacgacattatcactttgtcctaccatatctgccatattgattgaatttccatcttttggatcataatcaagtgcaattaaagaaagcgcacatacagttgtaataggacggattttaagtgagattaaaacaggataaatacatgctaacaaaagcaatccagcatagctagaaatgacgatttttaaagccattccaataacaaaagttccacttaaaattaagtatttattttttgatttttcctgagggtttatttgctaaaaaagcaagttttgccgaagcattgatatgtttcatgtaagcagtaaagcctgccacactcatgataataagccctgctccagaaagctgacttttaaaagtcgctgtgataaaagataactatcaagtaaaacatttaaaagcttgtatactctctgcttggagcttttggtataggtgttcctgtgatataaaaagcaaaaataagcaagataatatttgaaagaaaaatacaaaaatgggatcgtatttttttgagtatatcataaaaattagcatagggtctcttgaatttacaataaattggattttatctaaatttttaaataaaaaatattttttatttaaaaattacttgttttttgtattataaaattaacatatatagtttggttactgaaaagtttatgtttgtttaaaaaaatgatttttgtattataattatacacaaatcataaatattaaaaaggatctagtgtggcaagaattttggcatttgatataggaataagctctattggctgggcatttagtgaaaatgatgagttaaaagattgtggagttaggatttttacaaaggctgaaaatcccaaaacaggagaatccttagccttgccaagacgccttgcaagaagtgctagaaaacgccttgctagacgcaaagcaaggctaaatcacttaaaacatttaatcgcaaatgaatttaagttaaattacgaagattatcaaagctttgatgaaagtttagccaaggcttataaaggatctttaattagcccttatgagttaagatttagagctttaaacgagcttttaagtaagcaagattttgcaagagtgattttacatattgcaaaaaggcgtggctatgatgatattaaaaatagtgatgataaagaaaaaggtgcgattttaaaagctatcaagcaaaatgaagaaaaactagcaaattatcaaagtgtgggcgagtatctttataaagagtattttcaaaaattcaaagaaaattccaaagaatttacaaatgttagaaataaaaaagaaagttatgaacgctgcatagcgcaaagttttttaaaagatgaattaaagcttatttttaaaaaacaaagagaatttggcttttctttttcaaaaaaatttgaagaagaggtgcttagtgtagcattttataaaagggctttaaaagatttttctcatttggtgggaaattgtagtttttttaccgatgaaaaaagagcgccaaaaaattcgcccttagcttttatgtttgtagcacttacaagaattatcaatcttttaaacaatcttaaaaatactgaaggaattttatatacaaaagatgatttaaacgcccttttgaatgaagttttaaaaaacggcactctaacttataaacaaacaaaaaagcttttgggcttaagcgatgattatgaatttaaaggggaaaaaggaacttattttattgagtttaaaaaatataaagaatttataaaagccttaggtgatcatagtttaagccaagatgatttaaatgaaatagcaaaagatattacccttataaaagatgagattaagcttaaaaaggctttagcaaaatatgatttaaatcaaaatcaaattgatagtttaagcaaattggaatttaaagaccatttaaatataagttttaaagccttaaaacttatcactcctttaatgcttgaaggtaaaaaatacgatgaagcttgtaatgagcttaatttaaaagtagcaatcaatgaagataaaaaagattttttacccgcatttaatgaaacttattataaagatgaggtaactaatcctgtggttttaagagcgattaaagaatacagaaaggtcttaaatgctttacttaaaaaatacggcaaagtgcataaaataaacattgaattagcaagagaagtaggtaaaaattacagccaaagagctaaaatagaaaaagagcaaaatgaaaactacaaggccaaaaaagacgccgaacttgaatgtgaaaaactaggcttaaaaataaatagcaaaaatattttaaaattaagattatttaaagaataaaaagaattttgtgcttatagtggagaaaagattaaaattagtgatttgcaagatgaaaaaatgcttgaaattgatcacatttacccttattctagaagttttgatgattcttatatgaataaagttttagtttttaccaagcaaaatcaagaaaaacttaatcaaaccccctttgaagcctttggcaatgatagtgcaaaatggcagaaaattgaagttttagcaaaaaatttacctactaaaaagcaaaaaagaattttagataaaaattacaaagacaaagagcaaaaagactttaaagatagaaatctaaacgatactcgctacatcgcaaggcttgttttaaactacactaaagattatttagattttttacctttaagcgatgatgaaaatacaaagttaaacgacacacaaaaaggctcaaaagtgcatgtagaagcaaaaagcggtatgcttacatcggctttaagacacacttggggctttagcgctaaggatagaaataaccatcttcatcacgccatcgatgcagtaattattgcttatgcaaacaactctatcgtaaaggctttttcagattttaaaaaagagcaagaaagcaacagtgcagaactttatgcaaaaaaaaatagtgaattagattataaaaacaaaaggaagttttttgagccttttagtggttttaggcaaaaggttttagataaaattgatgaaatttttgtctcaaaacctgagagaaaaaagccaagcggagctttacatgaagaaacatttagaaaagaagaagaattctatcaatcatacggcggaaaagaaggagttttaaaagccctagagcttggtaaaatccgcaaagtaaatggtaaaatagttaaaaatggcgatatgtttagagtggatatttttaaacacaaaaagacaaataaattttatgctgtgccaatttatactatggattttgctttaaaagtattaccaaataaagctgtagcacgaagtaaaaaaggtgagataaaagactggattttaatggatgaaaattatgagttttgcttttctttatacaaagatagtttgattttaattcaaactaaagatatgcaagagccagaatttgtttattataatgcttttacaagctctactgttagtttgattgtttcaaaacacgataataaatttgaaacgctaagcaaaaatcaaaaaatattgtttaaaaatgcaaatgaaaaagaagtaatcgcaaaaagcataggaattcaaaatctaaaagtatttgaaaaatacatagtttcagcacttggggaagttacaaaggctgagtttagacaaagagaagattttaaaaaatgagttacgatgaagcttttaaaacactgcttattagctctaatgccaagctaaatttagagctaaatcatcttgtgattaagcaagatgaaaatatagccaaattgtttttaaaagatataaatatcatcgttttagaaagcttacaagtaagcattagttccgcactttttaacgcttttgcaaggcataaaatcatcttgctaacctgcgatgaaactcatagtataaatggtgtttttactccttttttagggcattttcaaagtgcaaaaatcgcaaaagagcaaatgaatgtaagtgctcaaaaaaaggctattttatggcaaaaaatcattaaaaataaaatcctaaatcaagcctttatcttaaaaaaatacaataaaatagagcaaagcaatgagcttataaatttggctaaaaaagtaagcttaaatgatagtaaaaatattgaagctgttgcggcggcgctttattttaaaactttgtttgggacttctttttcaagagatgagctttgctttgaaaattctgctttaaattatggctatgcaatcattagggcttgtattattagagcagtttgtataagtgggcttttgccttggcttggcattaagcacgataatatttataattcttttgcgctttgtgatgatttgatagaagtgtttagggctagtgttgatgattgtgttttaaagcttaagggtgaaagtgagtttttaagcaaagatgacaaaagagcgttgattggcaatttacaaagcaaaatcaattttgatgggcaaaattatcctttaaacagagcgataaatcattatgtggcaaattttaaaaatgctttattgtatgaagatgaactaaagatagtgaaatttgatgattgaagataaatttatgcgcgtgcttttgatgtttgatgtacctactaaaagtaaaaaagagcaaaaactagcaagtaaatttagaaacaatcttataaaattaggttattttatgctgcaatttagcgtttatatgcgtatttgcaagggtttaagttctgcaaaaagttctattgaaaatgtaaaaaagattttgccaccttatggaaatgtaagggctttaatcatcactgaaaagcaatttgataaaatggagcttttgcttggtggcatagtttttaatgaaaaagttaataacgaaaccaatttaacactttttgatatagatagtcatggagaatttaaatacaaaaattcaaataatgaagaaatacaactaaacaaaaaacaagaaaaatatcatcagcaaaatttatttgaattttaaaagcggttttaggggattgtaaccccgcagagtcccgcaaactctttattttagtccctttttaaatttcttatgagattatagcataatttttgctatttttcatgaaaaaaccccgaaattttcattatctggtaaatatctattttaccataaagaaatttaaaaagggactaaaacagctactaatgaaaatgaaacaattttagaattttaccataaagaaatttaaaaagggactaaaacattaataccagcaaagataattctactaccattttaccataaagaaatttaaaaagggactaaaacaataatggctaaatatttcatgagaatggaattttaccataaagaaatttaaaaagggactaaaataaaccctagtggattgaaactccgctagggctaattactccactaaaaggaggttgcgaatttgaaacttattgaaatttagggttgattaaaatcgaaataaaattatttaaataattttaaggcataaagataatatccactaaactttcattttctaaaatttcacattcttttggcgccaccataagggcagctttattgttaagattgtttataatcgcactagagccttcttttttgccttcaagattggctaaaatgcgtccattttcaaactttatgttacaagcgacaaattccaaataaggtgtttttttcttgtaacttccttgtaaaaaggctttgcaaatatagtctttaggctgaagtaaccaagagtttaaaatctctcttgcgtaaagattaaacattaccatagccgagtaaggaaaacctggtaaggcgatgatgaatttttcattagccttagctattttgatatgtctacctggttttatgtcggctttatcgatgatgatttcgtattctttgatggctttttttaaaaagtcaaaatctcccatagaaaccccgcccgttgtaaccaaaatatcacaactttgcaaagcactttcaagggtggaaaaagtggctttctcatcatcttttaaaagaggaaaaacccttgtatcgcaatttaaatttttagctaaattagctatggcgatatgatttgaagagcggatttgagcaggattttccaaggcttctcctagatctttgatctcacttccactacttaaaacccctacaataggctttataaacacactaatgtgaaaaaatccaagttcagctaaaagagctatctcgctataatttaactttgtgccttttttgagtaaaatttcatcttttttatagttttctcctaccgcacgcacggcaaaagcttggggaacttttttttctataaaaagagtatcattttctatgcgtatattttcaacagggactaaagtatcgcttccttcgctcatgagtgagcctgtaaaggtttttacacaagtgccattttgtacgctaaattgtggcatagtgcccgcaggtgtgaggcctaaaatttttaaaggcttgtcttgatcttcaaatttgatcgcataaccatccatagccgaggttggaaattcaggctgatttttaggggcttttatgtcttgagctaaaatgcgtcctaaacactctgtaagagctattttttcaatcttttcataggttttgatatgagagtgtaaaatttttaaactttcttcataagacattagcatctttattccttcatactgatataaatttgagtcttgtttgttgtataaaattcaaaatctgtgtcaaattttctttggagacttgaatttttaaaaaattcattgatattttgccaaagttttggggcaatgatttcaggttttccagagtcttcaaaaagcatgtatttgccaccttttatacaaattttttcgcctttttcgtgaggatttttcatacccacacaaattttatactctaacttgtgagtgtttttataatcataatacacgctataaatttcatcgggcgcaccaaagatgctatgaaattttttccacaaaggaaaaattaaagagctgtttaaatcgctctcaagttcctcatcagttttaacgcttactccataaatactaaattcttctatttcttgtatcattttaaaagtcctgcaccgcaaagtttggttgatctttctttggcataaattctttctttgtttatcacatcatacttccaaatgggtgcacttgctttaaaatcttcaacaaattcattaagaagtttaagtcctaattttctttgtttgcttaaaattcctgcaaaatacgagctttcatgaaccgccacatcgcctatagagtgagcaaaaagcaagctaataccatcaaaatctactcttttttgccactcatcaaaccatttttttaaaagcggttcataaatatcaaaactaagtgcctcaatacctccttcttcacgcacaataccacaaaaagtcagtaaagcaccgcagtttttatccttggaaaattcataccattggctataaattttaggaatatctaaagagccttgataaagtgtaaaatgtttcatttagcctccacaaactggcggtaaaagtgctattttatcaccatcttttaacttggtgttttcatcaaaaatgatttcatcatttaaagatacagcacaaagttctagccattcttttaaactctcatctttttgcaaaatttcttttaattcttttaaattttttacttcaagttctaaattttctttatttatagggcctaaaaattccacttttaccattttattcctttacttctaaatttcccatcattcctaaatcttcatgttctaaaatatggcaatgatacattctaagtcctttaaaatcttgtttcattctaagtcttaactcttcattaggacgcacatttatagtatctctgaaggctctaaattcggctttttgaactttgccattgagttttgatgagatgagttcaaattgcgtgccgtgtatgtggaaaggatgatccatgtgagatttatttatcactatccagtcttcaactactccaagcttggagcttaaatcaatgcgttttaaatcatagcttttgccattgattaaaaacatagacgcaagagcgatttttaattcattttcactttttcccatcattccatgcatttgcatatgatcttcactcatgattatttctttaaattccttaggttcttctaaaggtttgaaaatttttaaattttttggaagttctaatttttctttttttaggctaatactagctaaaaatagggtattaggttcttcttctaccatcattttatccctatcataataagcactttctagtctaaattccccatcttttggagcgtcgattaaaacttctacacgagaagcaggacttaagaaaagttcttctttataaatagctttttctataagtccaccatcagtaccaacaagtataaacttagctccttgtatacgtaaatttaaatatcttgctgcagtagcattataaatgcgtatgcgttcgtttgtggcgagtttgattttaggtttgaattgtccattgatgagtacaaattctccttctctaccattaagccaatcatttaggttgttgtttggaatttgagcgttttcatcaagacgcaaatcgctaatcatcaaatctttttcttttaaatgacttaaagcatctttttttgctttgatcacaaaagcccctgctaaacccataaaaacttgtttagaagccgtataatgaggatgtggatgataccagtaagttcctgcgctatcttgaggaatttcaaaacgatatattctttcttctcctgctaagataggatcatgtgggcttccatcttgatcaggtggcacaggaacgccatgccaatgtatagttgtagcttctttgagtttgtttttgactaaaatttcaagtttatctccttcaaaaacttctatttttggagcaggcacgaggccattgtaagtataaaataaggtttttttacctttgataagctctatatgattttctttgatttctagggtagcacgaaaaatatttttttctttactttcatttttgagtaaaggcaaggcttttaaaatttctccttgggggaattgttttggatctaaaagctttaaattttttggagcaaagtttataaaagaagtatctaagtcatgatttatagaatgatttttatgcatggagtgcatatcgtgcataggatttgcataggctacacccatacttgctagagtaagtgcattaaattttaaaaaatttcttctattcattagtttttccttttgcttgattttttatattatagtcattatttttttagttttagtaaatatttattttgaaaatttggtttaattttgttatgattttagcaatttaatcaaggaaaaataatgttttatgaaaaaattcaaactccagcttatattttagaagaagataaattaagaaaaaattgtgagcttttagcaagtgttggtgaaaaaagtggtgctaaagtgcttttagctttaaaaggttttgctttttcaggagctatgaaaattgtcggagaatacctaaaaggttgcacttgtagcggactttgggaagcaaaatttgctaaagaatacatggataaagaaattcatacttattcgcctgcttttaaagaagatgaaataggtgaaatagccagtttatctcatcatatagtgtttaactctttagctcaatttcataaatttcaagctaaaacacaaaaaaattccttaggtcttcgttgtaatgttgaattttctctagccccaaaagaactttacaatccttgtggaagatactcaagacttggaattcgtgctaaagattttgaaaatgtggatttaaatgctatagaaggacttcattttcacgcactttgcgaagaaagtgctgatgctttagaggctgttttaaaggcttttgaggagaaatttggtaaatggatagggcaaatgaaatgggtgaattttggaggaggacatcacatcaccaaaaaaggctatgatgttgaaaaacttattgctttgtgtaaaaatttcagcgataaatatggtgtacaagtttatcttgaaccaggtgaagcagtgggttggcaaacaggaaatttggttgctagtgtagtagatatcatagaaaatgaaaaacaaattgctattttagatacttcaagcgaagcacatatgccagatactatcatcatgccttatacaagtgaagttttaaatgctagaattttagccacgagagaaaatgaaaaaatttcagacttaaaagaaaacgaattttcctatttactaaccggaaatacttgtttagcaggtgatgtaatgggagaatatgcctttgataaaaagcttaaaatcggcgataaaattgtttttttagatcaaattcattacaccattgtgaaaaacacaacttttaatggtataagacttccaaatctcatgcttttaaatgcaaaaaatgaacttcaaatgataagagaattttcttataaggattattctttaagaaattagtattatttataatttgcataaaatgttaattttatttggaagagaatcaaagatataaattttatgcaaagtattttattttttcaaatataaaatcaactcaaatatctaattttcaatactttggtatgatttttttaagattttaaatccttgtggaattttattgaaattcagtgatttttaaatcaaatagtattaagataaatcgatttaaaaatcggctttaaaatgaatattaggtatattttgcataatattcattcaagcaaaatttaaagctatttttgaaaattttgaatgcatgggggctttaatggatttggaaaaattaagattagctagaagtctttattatcaatgtctaggagagctttttgttttttcattttctgaagaaagattgtcaaaattacaagagtatttaaagacaatgcaagaatgtttatttgatgaaaatttaaaatcaaattttgatatcttgcttaagcatttagatgatgaaaattctatacaagcattttttaaagaatatgatttgctttttttaagtcttaaaaatagcattccaacgactttttcttacatagaagaaggttttgaaaattcaaatcctttactttgcgtgcgtcaaattttagtcaaaagtaaaataagacgcaatgaaaaattttttaaagaaagtgaagatagtgttggattttgtttattgttgatgagtgaatttttaaggcaaaatgaagatgatttagccaaagagctttttgaaaaagtgatcaataaaagcattgatgagtttttaggcgatgttttcatgaataaaaatgcgaatttatataaggaaattgcaagtattgcatcggcttttatggaatttgaaagactttgctttgaagtggaaaaacctgcaaaaataaattctaaaaaagtgcaaaacgatctatcgcgttcagaatttttaagaagagaagcaaataaacaaaggaggactcgtgaaaaatcgcagggaatttcttaaaaaatctgcttttgccttaggggctgctggagtgcttggtagcacgactttagctctagctaaagatgaagaaagaaaagatttggttaaaggtaaaagtaagaaaaaagaagtgctttttcaaagaagtgctaattgggaaaaatattatataaaggctgagtaatgtcaagtgtaggtgaaaatatcaagcttacgcgtcgttcttttcttaaaatggcagcactttcaagcctagcaacaccgttgcttgctagaagtgaaactttaagagaagcgagtgctgatgagcttaaagaagcgtatgaaggtagtaaaaaagtaaaaacagtttgtacagcctgttctgtaggctgtgggattattgcagaagtgcaaaaaggtgtttgggtgcgtcaagaaattgctcaagatcatcctgtgagttcaggtggacattgctgcaagggatctgatatgatcgatatggtgcgttcacatgtgcgtttaaaatatcctatgaaaaaagaaaatggagaatggaaacgcataagttatgagcaagctttaagtgagatcggagaaaaactagctgcttatcgtaaagaaaatcctgaaagtgttatgtttttaggttctgcaaaacttaataatgaacaagcttattatataagaaaatttgcagcattttttggaacgaacaatgtagatcatcaagctagaatttgacacagcgcaacagtcgccggtgtggcgaatacatttggttatggcgctatgacaaaccatcttggagacattcaaagaagtaaatgtatcattatcattggggcaaatccagcggtaaatcatcctgtgggttttagacatttcttaaaagcaaaagaaaaaggtgcaaagcttatcgttgtagatcctagatttacaaaaagtgcggcaaaagcggatatttatgcaagaattcgtccaggaaccgacattgctttcatgtatggaatgctaaaaatcatctttgatgaaggcttagaagatacaaaatatcttgatgaaagagtttttggaatcgataaaattcgcgaagaagcagcaaaatggacagccgaagaagtagaaaatgttacagggatctctaaagaacttttggtgcaaatcactcacgaagtagctaaaaacaaaccaactacgcttatttgggctatgggtttaactcaacacactgtaggaacttcaaatacacgtttagcacctattgtgcaaatggtgcttggaaatataggtaaatttggtggtggagttaatatcttacgcggacacgataatgttcaaggtgcttcagatatggcttgtttgagcgaaaatttaccaggttattatcctttaaatgaagcgacttggagatactatgccaaaatttggggtgtggattatgagtggcttttaggaaattttgtaagcaaagattggatgcataaaactgggctttcacttgctagatggtgggcagcggctttaaatggaaaagatggaaatgatgctatcgataatgcaggaacgcctttaaaagctttagtagttatgggaaatggtattacttcgactgcacaacaagtaaaagttaaagaaggtttggaagctttagagcttttagttttagccgatccttttgtaaatgaagcagggattattgcagaaagaaaagatggaatttatcttttacctgcagcaacacagtttgaaacaagcggaagtgtaacagcaacaaatcgtagcggacaatggagatttaaagttgtagatccactttatgaaagcatggaagatcaagaaattttatttgagcttgctaaaaaattaggtttttatgaagactttaccaagactttacgcgatgaaaaaggtgagattgtttggcctgaaaatgcaacaagagaaattgcaaaagcagttagaagtatagggcttaatggttggagtcctgaaaggcttaaaaagcatactttatactgggataaatttgatgaggtaactttagaaggaaaagacgaagttgctggcgagtattacgggcttccttggccttgttggagtgataagcacccaggttctcc

SEQ ID NO: 4042 - DNA, 22486 bp, synthetic construct
  source 1..22486: mol_type = other DNA
  misc_feature 1..22486: note = Synthetic
atctattttatcttttttgaatgaggctgaagcagttgcaaaatgtccagcttgttcaaaatcaagtttagtatctatacattcccataatcctttagagttttgtacccaaattttattatcgccgttatagcagatttcattgatattatcatcttttaaaaattctccaaaaaatttttgagtatatttatctagcgttattgacattctttttccttgtaagtttataaacttttgaaaaatcaatatcacgattaacataaacaccgaccaaatcaccttgatttttataaagtgtaggtttaatatcaatcattttttctagtgctgtatttgcgatttcttttgcagaatctcttgtattttcagtgtaattggcataattatttttattatctttacctgcaatttgatccgctaagatagccagtgaatcatctatcattgatagtaaaacagcagaaccaaatcgttttaagtaatgatgatctacccaaccttgaacgccacttgcacctaattcatcggtagcacctgaataaacagggataatgatattgttcggtgttctaatttcttgccaaattacaaataatctatccattccatcatccatttgtccagtattaaaagtttctgtaatagtgctacctttttcaattaaaagagtatttccattagcagaatagacatcatttgatacaatacaagcgattccacctttaatagaacttaccaatcttgtttttaaagcacagcctatgtaagttcctttaggtaatagtaaattttgatcaaattcgctaactttagcgattgtgggagtgaagacctctccaacaaaatctccattactaccaccttgtaaattattagagttttgtaaagaaccattttgtccaaactcaaacactgtgttaggtttttctccaaattcttccctgtttcctgtgccattatttccaaatccatcattattagatgaagcgacaacagtaactcctgcacctttaacaattctaggctttggaggtttgggttcaagtattaaatcttgtgtcggttttggtgattcttgtgcaattagttcatcaaatgttttttgtggaggaggtggaataaattcctttgttttaacactttgtgccaaatctttattatcttctttttgtacttcttcggtagttgtattgctacttaaaaatgattttaaaaaataaactaatattaaaactaataataatccacccacagcaaaaattacataagcttgtatctttctaagatgatttttttgatcgtgtaaatcacttgtatgattttcaaaatcattgtctaaattatcttgttctttatcttgcatacttattccttttagtttcattcgttttattttttatttatctctctttgaatattttcattggaggtttctcttgttttatctaaaggattttttgcatagccacgattaaaaataccaacgactttatcgccacttcttaacaagatttgtttagtaattttttgaattactaaaacttcataattgccatcttttttaatatgagtatttaaaatactttctttaccattatcatacatgaaaacagcaggaaaagttttagtattatcaaaaccaagatatgtaaaaacaccatcatcataagcaaaatttggacttatgtcttcacttcctttattaactttcatataaaaatcccaatttctagggatggtatttttatttaaatctgtgcgtattttctcttgctcttgagcttctaaaaattttttagttgcttctaagtctttttttggataagaaaaactgagtttataggtagcgttattattttggtttacaagttttaaatcgaatacataagtatttagatttgtaataacaattaggttagttttccaatcatgaggatttggatctaaaacgaattcttgtgatgcttgactctctcctatattattgttttcttgttgaacaagttgtgttttataagctttaggttttataaataaaagattgtctttttcaattaaatcccaaccttctgcaaaacctgtagcagtattgataattctttcatcgataccaaattctaaaacgctaacatagccattttttgcattaatttgaaatacatcgtttgcattataaattgcataagcaattcttttatcaaatgtagaagtttttggaatatttaaagcccaaataaaactacacaacaataaatttattaagattatttttttcattgtgccacctcgtcatcaattctataagttaatactttaaagcctaaaggatttaaaaatctgttttcttcactagcttttgctaagatatagtcataacttaatgttattacttttgttgcttgagttgttcctttggaagttaaattttttgtagtaataattgccctgactgtagcagttttcactccgttactttctcctaaaacaatacttaaaatttgaacacttacttcattggagttttttagaatttgatctcttgcattatcaccttcatataaagccctatattcatttgctactttttcagaactcattaattgagtaagtaaataatcttgatttaaaagatcataataatagccttctctagcttttacataagtgctaataaaatatttatctaatgcttcatttgctttaatttctttttcatcaagcatggttaaaatatcaaccattcctgtagtattgtctactcttattacataaggttctattgtttttaaaggagtaagtaaaacaacagctataatggaaataatggctataaaaatagaaataaaagcaataagccaagctcttttattacttttttcaattaagtatctaaaacttgcttcataatctattgcagtattaaactcatttttcatccatagttcctttatttaaatctttgttttgagtattaacaggaatccatcctgtttgattattaaaaaattcatcatatttaccctgatttttagtgctacaagcactaaaaaataaaacaccaagtaataaaataaaaattaatttagcctgcatttctagccctctcatacatttttttagcaaaactataaccgcctttagcactagccaaagtacctttggctgctaattttccaccagcttttgctgtatttacagtttttcctgcgactttgcctccagtccaacctgctaatctaccaacagggtttaaaacagaacctattactccgcccatagctccttccattgaaacatttgcaactttttcggcataaaattttgcagaaataatcataatgacaagaactaaagcggcaatgacaaagaaaatacttgtgcctaatacttcgtctcctgcttgagttacttttgcaaaatacttaatccaagttgatatttgctccataaaaacacccaaaaataagcctacaagcaaaatgactaaagtatttgaaagtaaaagtcctatccactgtgtaaaaacatttttagtggctttaaaaactaaaagccaaaatactataggggcggtgattacaagcagtgtttgtgtgaaggtagtaacaacaaagattgtaagtgcaggaactacagcaattgcaaatcctacataacaaagtagcattgctacaatagctaaaatagcacctccaacaccacttgatttagcccaaattatgtttgtaagttgtgccgtgtttgcatacatttcatctagtgttttatacatttgcgttccgcctcctgcccactcgtataatccatccattgttgaaattgttaaatctagccaaccccctaaatttaaggcaaaagtaatggcaacaagctttccaactatatccccagttaattctctaataggactttgacttctacccattaagacttcgtagcctttatacataatgactaaagtgataataatagaaagcaatacgctaagttctgcaaccttatcatttgtgcctacttgtcttatagcatcaacaatttgttgtatgctttcgcctagagtttgaaaaagatctaaattcatttgttgttcttaaaaaattccatagcactttctcgtggcttttgtaacgacttagaatattcttgcatagccatatcttctttaatttttctttggttttcataacttgcattggctaaatcaacttgatttttaaccatttgaatttttgccacttctaactgaatagcattgccaacatctgtgctttctttaatatctttggaatttactaatttatcttgcaacttttgaagtgtttggctaatcgtatccatttgttttgaagcttgattataggtttctacttgagcagcataagtgattaaattcattttgcaaatgtttttttctgattgacttaaaaaatcaaaattacatcgatcaaagctcgtatattttccaaaaatttcattacctttatcacttaaaaatttttgtggatctcttaatacatcattgtagaatgattgaatattttgcccagcttcagcaaaatctgaatatatttgtttaatatcttttagaaaagttactgaatctctaatgcctgtttttgataaaagttcatctttgtaagcttgaatttgtttttgatagtgtgctaccgtttcagtccatcttgaagcatctttagcccattctgccacttgtttagcgttttgtgtagccatttgctgatttgctgttacatcaactacaggaataccagcactaaatgctaagttaggcaaaactaataaggaagtaagaataagaatagattttttaaatttttggatataattttgtggggttagccatagggctgcaaccctgtggctagatttaacctcagaaaagaggtggttaaattgagttacacaaatctcatagttataattatactcctttgtataattatagtcaaggcttattagtcttgccccattttcatggggatgagatttccctatggctttattaacaccaaagatattttttttcattttttacctttcaaatgatttttcttgttttttgcaaagctctttatcaatagcttcatctaatgcttggtttatatcttcttgtaaaaaagaagatatagatttatgattgatataaaattcatatacttcatctaaaattatttctatttgatctgaattaagatcttccattgaagaacttttttcaaataaaaacaaagctttaatcagcttttcatgatttgaagtttctaattcttgtgctaattcttctacacttaaattttttatagacatttttatccttaaatcttaaaatacttgtgtttcttcagattctatatttgtgttttcataatcaatatttggctcttttggtgggacttgtggattttgtgttccattgtcatctttatcttttttgccaagccaataaaatttagatacaatcacacttaacattgttttagtctttccatcttcatcttgatattgattggatgataattctccactacacgcaaactgcgaaccttttttaatgtgcgttgatgcactttctgcacttttgccaaataaaacaataggtatccaagtcgtgctactttcttcattgcctctttcatttttccatcgcttagtaatggcaagagaattttttgcataaactcttccgctatttgtagcacctacttcaaaatcttttcctaagtatccgattagatttacattattcattgtttaactcctttttgttggtgtaatattttttcatcttttaaactccttatttatagatttaattgcatttgtttttttggtgctaaattcttctaattttgctttaaaatcatttgcagatttgtctttttgtggtatagtttgattgatagttgcagaaagtgcatttgcaccagatggatttttatccattagctccaatccattaagttggtgtgtagagagtgttggggtctctacctgcaacagattatctttattgtttaatctattaaactcttttattctttttttatttgcatgaaatatctcatttgttccactttcgttttttataactacatcagccatttttttatcatttatgatttttgctgctttaataatttcataatttcttttatctctatttgcatcaacaatgatttcaggttcgcttactactttattaattacttctttgacttcttgcatatccttaaacatttcaggatgatttgtatataatttttttaaatccgcaattgcttctttatctcctaaaagctctgataatctttcgcaaagttcaaaaatttctaattctttatcactcattgcaacttctttggatcttttggtgtgcgattatcaacaagataatttaaagaaaatacatttttagcttctttagaataagggttatctgtgataatcacactaactttgtaatcgttttgtggtaagtttggataaataagttccatcaaatctgttaagtatttgttagggcttttaatttctttttgtaaaagtttttgcatttcattaaaagcattgatgaattcgattttaaacttatccgcttttctacctgttagccccatagctataaatgagaaaccatcttttgtaagttgataatatggatattttctctctttgcctctgaaaccttctattttacgggttttaaatgaaagccgaaaattcggctcacaaaaatttttaatctcattattgttaaatttttcaccaatcaattctaaaatatgtttatgttgtttcccaaacactttagctatgtctaaacttgtgcaaaagatttgattattttgagtgccaaattgcacttcttgtttattaataatgactttattgctcattttttatctcctatgagtttttataaaattctttcagctctaatactttttcatcaagacttttattttcttgtgaaaaaatcttttctatagtgtctatatgtgctgttccagttgatagtatttttaaattttcattacctaatgagctaagatcaagagtgcaaatcactttttcatcttgtcttttaattaaaaattgtcttttggatggtttgaaacttttaagaatcatgtattcatcataacttaaacctattccattgacatattcttcttctttggcttttggattcggtaaaaaaaccattgttgctgattgttctataagagttgttgcatttttaagctttaaaaagtcttctacgctttgtgtagcaagtcttaaaaatccattctgtttcctaatagttttaaatttgtttttaacttcttcttgcacaatttcattttctagccacttccaagcttcatcaatatcaatacaaagtcttctaccatctgctaaactcattacacgccaaagaatgtaatagcttaatatccctgatacatctttatcatcaagaaattcagttccatcgattccaaataaattaatatcatcaggaaaatctaaattatcatattcattgtcaaaaacccagccaaattgtttgccttttttgaaaagtgctaaccttgatttaagagaattatcatcatctacattttcagttaaattttcaagtaataaagaaataggatattttctttcttctttttcaaaacctttcataagagaattaacagcattattgagcatttcttcttctctagttgtaagaatttcattatttctagttactaaaagtttcattagcgattgaagttgtcttatattttcttgtgtgctttcaaccatgaaaggattaaatcctgtaggcttaccattttcaatactaatatatctaccgccagcacaaagtatattgcctaaagcacctttatctttatctaaataaatggctgtaaattttctgttttcttcgggaatatcatcaggaaatgtatctttgctagcgtatttcatcatttgatctacaataaagttcataaacactgttttaccgccaccactttgtcctaaaatcaaagtatttgctaaaaagagttctccaaaatcatttttatttgcaccagaactttgatgaaaattaaaataataaggttgtttatttggtgtttttaaaatgctaacagcatcactccagcagtttttgtctcttttgcccatagaaaaattatgtagagcaattaaagatgaataattaatagatgagataagattaatgcgtgggcgtattgcaaaatttgatggtagttgcgaaaaaaatgtcgcaggtagggcgattgttgctaaggttaccccaaagcctaatccgttcatttctgtaataacgcaatttgcattatctttagcttctttgattgtatttccatatacaagaattgaaaaatgatatttgccaaaagagatttccccatttgtaagttgatccaaagcttcatctatttgctctacttgtgaaaatccatcatcttcagttgcaatgagttgttttttctgtttagatattgctgattttgcatccactctaggaataggagaaaagctttgagttatagtgtattccacatctaaatacattaggatatctaaaattcctgcaaaagtttcgtttgtataatctttaatttcaatgcatctagcaaatttttttgtgctatcattttggttaaattgaatagtatcgtgtccaaattgtatgttttgtaaattaccattaagatactgatctataggacttggtaatactcttataggattaaatttaccgctaatcaaataattataaaattctagttgttcagagtaggttttatcatctttggaatatgtttttaacctttttgggttaaaatctttaatatttgcttctagtctatcagcaaattcactaaatttagctagaaataggctaattgtttttcttttattttcaaaagaacttttcataaaagttgttttttctattttcacttttaaaggattgaaaataagagttaaatataaagaattttttctaagagttccttgcttaaaactctcataatattttctgtcaatttcttctaaaaaagcattattaaattttgaagttaatttgtcttcgatagaatatctacaattatgaaaataaaagcttacagattcgttagaaaaagatttaaaaagcatattcaaaagatcatttttaatatctagttcatcgtcttcttctgcttcaaaactaattcctccaatctcccaagttgtcattaaaagataatcttttgtaatgactacagaatcgtttattagcgatgaaaaaggaattaatttttcaaaattaggttctgcattaagtccgaaaacagatatttttggaaaattagaatttggcggcatttgtctataagagtttgtgctgtaagttttagctttataataattcttagacgcaggattagagaaaaatctcatttttaaaaacattaatcgaaaaataaagtcatctttttttgtcattgctttcataataaaaaaaataggaatagaaaagccaactaaaaaaatgttttgactataaaatgcaactaaaataatacttcccattgctataacaaaaggtgtcatcggaacgccaaaaatcatagggggacgcgttaagcctttaaaaagtggatttttctccatagctagtcctatttatgtaatgatataaccagctattgccgaagctgatccaaaaataacaccgccaatgaaaataggtgcaacttctctaagggtttgcccctgaaacataattttagatccaccccacataaatgcaattgtgagtagcacagctccaagtgcatacaaagcagtgcttaaattttccataaaggtattaactttatcaataccaccagcaccaaatgcaaaaataggactgattaaaattaatgataatagcctttttttcatccatatcctttcgttaaaaaattgagcaaattatcaaagtgtgggcgagtatctttataaagagtattttcaaaaattcaaagaaaattccaaagaatttacaaatgttagaaataaaaaagaaagttatgaacgctgcatagcgcaaagttttttaaaagatgaattaaagcttatttttaaaaaacaaagagaatttggcttttctttttcaaaaaaatttgaagaagaggtgcttagtgtagcattttataaaagggctttaaaagatttttctcatttggtgggaaattgtagtttttttaccgatgaaaaaagagcgccaaaaaattcgcccttagcttttatgtttgtaacacttacaagaattatcaatcttttaaacaatcttaaaaatactgaaggaattttatatacaaaagatgatttaaacgcccttttgaatgaagttttaaaaaacggcactctaacttataaacaaacaaaaaagcttttgggcttaagcgatgattatgaatttaaaggggaaaaaggaacttattttattgagtttaaaaaatataaagaatttataaaagccctaggtgatcatagtttaagccaagatgatttaaatgaaatagcaaaagatattacccttataaaagatgagattaagcttaaaaaggctttagcaaaatatgatttaaatcaaaatcaaattgatagtttaagcaaattggaatttaaagaccatttaaatataagttttaaagccttaaaacttatcactcctttaatgcttgaaggtaaaaaatacgatgaagcttgtaatgagcttaatttaaaagtagcaatcaatgaagataaaaaagattttttacccgcatttaatgaaacttattataaagatgaggtaactaatcctgtggttttaagagcgattaaagaatacagaaaggtcttaaatgctttacttaaaaaatacggcaaagtgcataaaataaacattgaattagcaagagaagtaggtaaaaattacagccaaagagctaaaatagaaaaagagcaaaatgaaaactacaaggccaaaaaagacgccgaacttgaatgtgaaaaactaggcttaaaaataaatagcaaaaatattttaaaattaagattatttaaagaacaaaaagaattttgtgcttatagtggagaaaagattaaaattagtgatttgcaagatgaaaaaatgcttgaaattgatcacatttacccttattctagaagttttgatgattcttatatgaataaagttttagtttttaccaagcaaaatcaagaaaaacttaatcaaaccccctttgaagcctttggcaatgatagtgcaaaatggcagaaaattgaagttttagcaaaaaatttacctactaaaaagcaaaaaagaattttagataaaaattacaaagacaaagagcaaaaagactttaaagatagaaatctaaacgatactcgctacatcgcaaggcttgttttaaactacactaaagattatttagattttttacctttaagcgatgatgaaaatacaaagttaaacgacacacaaaaaggctcaaaagtgcatgtagaagcaaaaagcggtatgcttacatcggctttagacacacttggggctttagcgctaaggatagaaataaccatcttcatcacgctattgatgcagtaattattgcttatgcaaacaactctatcgtaaaggctttttcagattttaaaaaagagcaagaaagcaacagtgcagaactttatgcaaaaaaaattagtgaattagattataaaaacaaaaggaagttttttgagccttttagtggttttaggcaaaaggttttagataaaattgatgaaatttttgtctcaaaacctgagagaaaaaagccaagtggagctttacatgaagaaacatttagaaaagaagaagaattctatcaatcatacggcggaaaagaaggagttttaaaagccctagagcttggtaaaatccgcaaagtaaatggtaaaatagttaaaaatggcgatatgtttagagtggatatttttaaacacaaaaagacaaataaattttatgctgtgccaatttatactatggattttgttttaaaagtattaccaaataaagctgtagcacgaagtaaaaaaggtgagataaaagactggattttaatggatgaaaattatgagttttgcttttctttatacaaagatagtttgattttaattcaaactaaagatatgcaagagccagaatttgtttattataatgcttttacaagctctactgttagtttgattgtttcaaaacacgataataaatttgaaacgctaagcaaaaatcaaaaaatattgtttaaaaatgcaaatgaaaaagaagtaatcgcaaaaagcataggaattcaaaatctaaaagtatttgaaaaatacatagtttcagcacttggggaagttacaaaggctgagtttagacaaagagaagattttaaaaaatgagttacgatgaagcttttaaaacactgcttattagctctaatgccaagctaaatttagagctaaatcatcttgtgattaagcaagatgaaaatatagccaaattgtttttaaaagatataaatatcatcgttttagaaagcttacaagtaagcattagttccgcactttttaacgcttttgcaaggcataaaatcatcttgctaacctgcgatgaaactcatagtataaatggtgtttttactccttttttagggcattttcaaagtgcaaaaatcgcaaaagagcaaatgaatgtaagtgctcaaaaaaaggctattttatggcaaaaaatcattaaaaataaaatcctaaatcaagcctttatcttaaaaaaatacaataaaatagagcaaagcaatgagcttataaatttggctaaaaaagtaagcttaaatgatagtaaaaatattgaagctgttgcggcggcgctttattttaaaactttgtttggtacttctttttcaagagatgagctttgctttgaaaattctgctttaaattatggctatgcaatcattagggcttgtattattagagcagtttgcataagtgggcttttgccttggcttggcataaagcacgataatatttataattcttttgcgctttgtgatgatttgatagaagtgtttagggctagtgttgatgattgtgttttaaagcttaagggtgaaagtgagtttttaagcaaagatgacaaaagagcgttgattggcaatttacaaagcaaaatcaattttgatgggcaaaattatcctttaaacagagcgataaatcattatgtggcaaattttaaaaatgctttattgtatgaagatgaactaaagatagtgaaatttgatgattgaagataaatttatgcgtgtgcttttgatgtttgatgtacctactaaaagtaaaaaagagcaaaaactagcaagtaaatttagaaataatcttataaaattaggttattttatgctgcaatttagtgtttatatgcgtatttgcaagggtttaagttctgcaaaaagttctattgaaaatgtaaaaaagattttgccaccttatggaaatgtaagggctttaatcatcactgaaaagcaatttgataaaatggagcttttgcttggtggcatagtttttaacgaaaaagttaataacgaaaccaatttaacgctttttgatatagatagtcatggagaatttaaatataaaaattcaaataatgaagaaattcaaataaacaaaaaacaagaaaaatatcatcagcaaaatttatttgaattttaaaagcggttttaggggattgtaaccccgcagagtcccgcaaactctttattttagtccctttttaaatttcttatgagattatagcataatttttgctatttttcatgaaaaaaccccgaaattttcattatctggtaaatatctattttaccataaagaaatttaaaaagggactaaaataaaccctagtggattgaaactccgctagggctaattactccactaaaaggaggttgcgaatttgaaacttattgaaatttagggttgattaaaatcgaaataaaattatttaaataattttaaggcataaagataatatccactaaactttcattttctaaaatttcacattcttttggcaccaccataagggcagctttattgttaagattgtttataatcgcactagagccttcttttttgccttcaagattggctaaaatgcgtccattttcaaactttatgttacaagcgacaaattccaaataaggtgtttttttcttgtaacttccttgtaaaaaggctttgcaaatatagtctttaggctgaagtaaccaagagtttaaaatctctcttgcgtaaagattaaacattaccatagccgagtaaggaaaacctggtaaggcgatgatgaatttttcattagccttagctattttgatatgtctacctggttttatgtcggctttatcgatgatgatttcgtattctttgatggctttttttaaaaagtcaaaatctcccatagaaaccccgcccgttgtaaccaaaatatcacaactttgcaaagcactttcaagggtggaaaaagtggctttctcatcatcttttaaaagaggaaaaacccttgtatcgcaatttaaatttttagctaaattagctatggcgatatgatttgaagagcggatttgagcaggattttccaaggcttctcctagatctttgatctcacttccactacttaaaacccctacaataggctttataaacacactaatgtgaaaaaatccaagttcagctaaaagagctatctcgctataatttaactttgtgccttttttgagtaaaatttcatcttttttatagttttctcctaccgcacgcacggcaaaagcttggggaacttttttttctataaaaagagtatcattttctacgcgtacattttcaacaggggctaaagtatcgcttccttcgctcatgagtgagcctgtaaaggtttttacacaagtaccattttgcacgctaaattgtggcatagtacccgcaggtgtgatacctaaaatttttaaaggcttatcttgatcttcaaatttgatcgcataaccatccatagccgaagttggaaattcgggctgatttttaggggcttttatgtcttgagctaaaatgcgtcctaaacactctgtaagagctattttttcaatcttttcataagttttaatatgagaatgtaaaatttttaaactttcttcataagacattaacattttttatccttttaaaagtcctgcaccgcaaagtttggttgatctttctttggcataaattctttctttgtttatcacatcatacttccaaatgggcgcacttgctttaaaatcttcaacaaattcattaagaagtttaagtcctaattttctttgtttgcttaaaattcctgcaaaatacgagctttcatgaaccgccacatcgcctatagagtgagcaaaaagcaagctaataccatcaaaatctactcttttttgccactcatcaaaccatttttttaaaagcggttcataaatatcaaaactaagtgcctcaatacctccttcttcacgcacaataccacaaaaagtcagtaaagcaccgcagtttttatccttggaaaattcataccattggctataaattttaggaatatctaaagagccttgataaagtgtaaaatgtttcatttagcctccacaaactggcggtaaaagtgctattttatcaccatcttttaacttggtgttttcatcaaaaatgatttcatcatttaaagatacagcacaaagttctagccattcttttaaactctcatctttttgcaaaatttcttttaattcttttaaattttttaccttaagttctaaattttctttatttatagggcctaaaaattccacttttaccattttattcctttacttctaaatttcccatcattcctaaatcttcatgttctaaaatatggcaatgatacattctaagtcctttaaaatcttgtttcattctaagtcttaattcttcattaggacgcacatttatagtatctctgaaggctctaaattcggctttttgaactttgccattgagttttgatgagatgagttcaaattgcgtgccgtgtatgtggaaaggatgatccatgtgagatttatttatcactatccagtcttcaactactccaagcttggagcttaaatcaatgcgttttaaatcatagcttttgccattgattaaaaacatagacgcaagagcgatttttaattcgctttcactttttcccatcataccatgcatttgcatatgatcttcactcatgattatttctttaaattccttaggctcttctaaaggtttgaaaatttttaaattttttggaagttctaaattttctttttttaagctaatactagctaaaaatagggtattaggttcttcttctaccatcattttatccctatcataataagcattttctagtctaaattccccatcttttgaagcatcgattaaaacttctacgcgagaagcaggacttaagaaaagttcttctttataaatagttttttctataagtccaccatcagtaccaacaagtataaacttagctccttgtatgcgtaaatttaaatatcttgccgcagtagcattataaatgcgtatgcgttcgtttgtggcgagtttgatttgaggtttaaattgtccattaatgagtacaaattctccttctctaccatttagccaatcatttaggttgttgttcggaatttgagcgttttcatcaagacgcaaatcgctaatcatcaaatctttttcttttaaatgacttaaagcatctttttttgctttgatcacaaaagcccctgctaaacccataaaaacttgtttagaagccgtataatgagaatgtggatgataccagtaagttcctgcgctatcttgaggaatttcaaaacgatatattctttcttctcctgctaagataggatcatgtgggcttccatcttgatcaggtggcacaggaacgccatgccaatgtatagttgtagcttccttgagtttgtttttgactaaaatttcaagtttatctccttcaaaaacttctatttttggagcaggtactagaccattgtaagtataaaataaggtttttttacctttgataagctctatatgattttctttgatttctagggtagcacgaaaaatatttttttctttactttcatttttgagcaaaggcaaggcttttaaaatttctccttgggggaattgttttggatctaaaagttttaaattttttggagcaaagttgataaaagaagtatctaagtcatgatttatagaatgatttttatgcatggagtgcatatcgtgcataggatttgcataggctacacccatacttgctagagtaagtgcattaaattttaaaaaatttcttctattcattagtttttccttttgcttgattttttatattatagtcattatttttttagttttagtaaatatttattttgaaaatttggtttaattttgttatgattttagcaatttaatcaaggaaaaataatgttttatgaaaaaattcaaactccagcttatattttagaagaagataaattaagaaaaaattgtgagcttttagcaagtgttggtgaaaaaagtggtgctaaagtgcttttagctttaaaaggttttgctttttcaggagctatgaaaattgtcggagaatacctaaaaggttgcacttgtagcggactttgggaagcaaaatttgctaaagaatacatggataaagaaattcatacttattcgcctgcttttaaagaagatgaaataggtgaaatagccagtttatctcatcacatagtgtttaattctttagctcaatttcataaatttcaaagcaaaacacaaaaaaattccttaggtcttcgttgtaatgttgaattttctctagccccaaaagaactttacaatccttgtggaagatactcaagacttggaattcgtgctaaagattttgaaaatgtggatttaaatgctatagaaggacttcattttcacgcactttgcgaagaaagtgctgatgctttagaggctgttttaaaggcttttgaggagaaatttggtaaatggatagggcgaatgaaatgggtgaattttggaggaggacatcacatcaccaaaaaaggctatgatgttgaaaaacttattgctttgtgtaaaaatttcagcgataaatatggtgtacaagtttatcttgaaccaggtgaagcagtgggttggcaaacaggaaatttggttgttagtgtagtagatatcatagaaaatgaaaaacaaattgctattttagatacttcaagcgaagcacatatgccagatactatcatcatgccttatacaagtgaagttttaaatgctagaattttagccacgagagaaaatgaaaaaatttcagacttaaaagaaaacgaattttcctatttactaaccggaaatacttgtttagcaggtgatgtaatgggagaatatgcctttgataaaaagcttaaaatcggcgataaaattgtttttttagatcaaattcattacaccattgtgaaaaacacaacttttaatggtataagacttccaaatctcatgcttttaaatgcaaaaaatgaacttcaaatgataagagaattttcttataaggattattctttaagaaattagtattatttataatttgcataaaatgttaattttatttggaagagaatcaaagatataaattttatgcaaagtattttattttttcaaatataaaatcaactcaaatatctaattttcaatactttggtatgatttttttaagattttaaatccttgtggaattttattgaaattcagtgatttttaaatcaaatagtattaagataaatcgatttaaaaatcggctttaaaatgaatattaggtatattttgcataatattcattcaagcaaaatttaaagctatttttgaaaattttgaatgcatgggggctttaatggatttggaaaaattaagattagctagaagtctttattatcaatgtctaggagagctttttgttttttcattttctgaagaaagattgtcaaaattacaagagtatttaaaaacaatgcaagaatgtttatttgatgaaaatttaaaatcaaattttgatatcttgcttaagcatttagatgatgaaaattctatacaagcattttttaaagaatatgatttgctttttttaagtcttaaaaatagcattccaacgactttttcttacatagaagaaggttttgaaaattcaaatcctttactttgcgtgcgtcaaattttagtcaaaagtaaaataagacgcaatgaaaaattttttaaagaaagtgaagatagtgttggattttgtttattgttgatgagtgaatttttaaggcaaaatgaagatgatttagccaaagagctttttgaaaaagtgatcaataaaagcattgatgagtttttaggcgatgttttcatgaataaaaatgcgaatttatataaggaaattgcaagtattgcatcggcttttatggaatttgaaagactttgctttgaagtggaaaaacctgcaaaaataaattctaaaaaagtgcaaaacgatctatcgcgttcagaatttttaagaagagaagcaaataaacaaaggaggactcgtgaaaaatcgcagggaatttcttaaaaaatccgcttttgccttaggggctgctggagtgcttggtagcacaactttagctctagctaaagatgaagaaagaaaagatttggttaaaggtaaaagtaagaaaaaagaagtgctttttcaaagaagtgctaattgggaaaattattatataaaggctgagtaatgtcaagtgtaggtgaaaatatcaagcttacgcgtcgttcttttcttaaaatggcagcactttcaagcctagcaacaccgttgcttgctagaagtgaaactttaagagaagcgagtgctgatgagcttaaagaagcttatgaaggtagtaaaaaagtaaaaacagtttgtacagcctgttctgtaggctgtgggattattgcagaagtgcaaaatggtgtttgggtgcgtcaagaaatcgctcaagatcatcctgtgagttcaggtggacattgctgcaagggatctgatatgatcgatatggtgcgttcacatgtgcgtttaaaatatcctatgaaaaaagaaaatggagaatggaaacgcataagttatgagcaagctttaagtgagatcggagaaaaactagctgcttatcgtaaagaaaatcctgaaagtgttatgtttttaggttctgcaaaacttaataatgaacaagcttattatataagaaaatttgcagcattttttggaacgaacaatgtagatcatcaagctagaatttgacacagcgcaacagtcgccggtgtggcgaatacatttggttatggcgctatgacaaaccatcttggagacatccaaagaagtaaatgtatcattatcattggagcaaatccagcggtaaatcaccctgtgggttttagacatttcttaaaagcaaaagaaaaaggtgcaaagcttatcgttgtagatcctagatttacaaaaagtgcagcaaaagcggatatttatgcaagaattcgtccaggaactgacattgctttcatgtatggaatgttaaaaatcatttttgatgaaggcttggaagatacaaaatatcttgatgaaagagtttttggaattgataaaattcgtgaagaagcagcaaaatggacagctgaagaagtggaaaatgttacagggatctctaaagaacttttggtgcaaatcactcacgaagtagctaaaaacaaaccaactacgcttatttgggctatgggtttaactcaacatactgtaggaacttcaaatacacgtttagcacctattgtgcaaatggtacttggaaatataggtaaatttggtggtggagttaatatcttacgcggacacgataatgttcaaggtgcttcagatatggcttgtttgagcgaaaatttaccaggttattatcctttaaatgaagcgacttggagatactatgccaaaatttggggtgtggattatgagtggcttttaggaaattttgtaagcaaagattggatgcataaaactgggctttcacttgctagatggtgggcagcggctttaaatggaaaagatggaaatgatgctatcgataatgcaggaacgcctttaaaagctttagtagttatgggaaatggtattacttcgactgcacaacaagtaaaagttaaagaaggtttggaagctttagagcttttagttttagccgatccttttgtaaatgaagcagggattatcgcagaaagaaaagatggaatttatcttttacctgcagcaacacagtttgaaacaagtggaagtgtaacagctacaaatcgtagtgggcaatggagatttaaagttgtagatccactttatgaaagtatggaagatcaagaaattttatttgagtttgctaaaaaattaggcttttatgaagactttaccaagactttacgcgatgaaaaaggtgagatcgtttggcctgaaaatgcaacaagagaaattgcaaaagcagttagaagtatagggcttaatggttggagtcctgaaaggcttaaaaaacatactttatactgggataaatttgatgaggtaactttagaaggaaaagacgaagttgcgggcgagtattatgggcttccttggccttgctggagtgataagcacccaggttctcctgtactttataataccgacattgaagtagcaaaaggtggtatgggctttagaaataattttggacttgagtatgaaggagagagtttgcttgctaaaaatgcacctttaaattcgcctattaatacaggttatccacaaattactaaagataatatagaaaaagttttaggtattactttaagtgctcaagaaaaagaaaaaatgggatcaacttggtcttatgatgatagcaatatcatagcaactaaatgtatagaaaaaggcatagttccttatggaaatgctaaagctagagctgtagtttggacttttaaagataaaattccactccaccgtgagcctttacattctccaagaaacgatttggtacaaaaatatccaagttttgaagatcaaaaagcactttatcgcgtggatactaaatttgtttctgtgcaacaagctaaggattattctaaagaattcccgcttaatcttgttaccgcaagacttgtgaatttaaatggtgcaggtatggaaaatagagcatctatgtatctaacgcgtttaacacctgaaatgttttgtgagatcaatcctgaattagcaaaagagcaagacattaaa

SEQ ID NO: 4043 - DNA, 22472 bp, synthetic construct
  misc_feature 1..22472: note = Synthetic
  source 1..22472: mol_type = other DNA
gaatgatagaagagtatcaaataagcaaattctacacttcgccaactgccataagaatgcttcatgctgatgcacctaatgagccaagaaaatatgatttaagtacgcttgaagtgcttggaacggttggagagcctatcaatcctagtgcttggaagtggttttatgatgaaatagggggaactaaaagtcctatagtcgatacttggtggcaaacagaaacaggtgggcatatgatcacgcctttaccaggcgccactcctttaaaaccaggttgtgccaccttgcctttgccagggatttttgcggaagttattgatgaagaaggcaataaaaaagatgaaggtgaagatgggttgctttgtataactaaaccttggccttcgatgattcgtggaatttggggcaatgatgaacgctatatagaaagttatttttctcaagctaaaaaagatggaaaagctgtatattttagtggcgatggtgctttttatgataaaaatggttatattaccatcacaggaagaacagatgatgtggttaatgttgcaggacatcgtataggaacggctgaaattgaaagcgctattgctaaacatccaagtgtagcagaatcagctgtagtgagtattttggatacgattaagggcgagtcattgtttgcttttgtggttttaagtcctgcatccagttgtgatcttggcggagctatagaaactttaaaagaacttaatgacattttaagagtagaaataggacctatagctaaaatagaaaaaattctttatactccaggtttgccaaaaactagaagtggtaaaataatgagaagaattttaagaactatagcaagaggcgaagaaatcaaacaggatatttcaacacttgaagattctaaagtagtagaaaccattgttaaattagctaaggcagagtttgaataacaaggcaaaaagaactttgccttgttgcatgaaaattcataaaaataagctataatgataaaaaaataaaaggaaatttttatgcttcaaacttgtattttccctgcggcaggttatgggacgagatttttacctgcaacaaaaactttacctaaagagatgttacctatcttaaccaagcctttgatccattatggagttgatgaagctttagaagcaggaatggaaaatatgggatttgtcacagggcgtggaaaaagagctttggaggattattttgatatttcttatgaacttgaacatcaaatttcaggtacaaaaaaagaatacttacttgatgaaattcgctctttgatcaatcgttgtacctttacttttacaagacaaaatcaaatgaaaggcttaggtgatgcggttttaaaaggtagacctttggttggcgatgaagcttttggcgtaattttggctgatgatttgtgtgttaatgaagaaggcttaaatgttatggctcaaatggtaaaaatttatgaaaaatatcgctgcaccatcatagctgtgatggaagtaccaaaagagcaagtttcaaactatggagtaatttctggaaattttgtagaagaaaatcttatcatggttaattctatgatagaaaaaccaagtcctgatgaagctccaagtaatcttgctatcataggaagatatattttaactcctgatatttttggaattttagaaaatactaaagcaggaaaaaatggtgaaattcaacttaccgacgcgcttttaactcaagcaaccaatggtatggttttagcttataaatttcaagggaaacgctttgattgtggaagtgtagaaggctttgtagaggcgacaaattatttttacgagaaaagtaaatgttaaacaatacgcttttttttaaacaaagtgaaattcacactataagttcttatgcaaatcgtattaatgatgaggtaaaaagtggagatatagggtattatcatcttattgacacaagtttgaatttaatcgatgagagcttgcaatttattcaagataaagagtatgtaaaaaatatcgttttagtgggaatgggaggttcaagttgtggtgtaaaagccttgcgtgatatgctttttaatgaaaaaagcaaccaaagagagctttttatactcgataacacaagctcgcattcttttaataagactttagaaaaaatcaagcttgaagaaagtttgtttttaatcatcagcaaaacaggtagtactatagaagttgtatcgctttttaaacttcttattgaacattttaaacttgatatgcaagaattaaaaaaatactttgtttttattaccgataaggattcaaaacttcatcaagaaggtgaaaatttaggtattaaatgcttttttatccctgcaaatgtaggaggtcgttttagcatactttcagccgtaggtatagttccactttgtttttgtggctataatgccaaagctcttttagaaggagctaaagcttgttttgaagatttttttactcacaaaaaagatgaaattttacaaaaagcctatcattattgtacacacaaaaatgccaatatcaatgtacttttttcatatagcgatgcttttaaaggctttaatgaatggtatatccagcttattgctgaaagtttaggtaaaaagcaaggctataaacgcataggtttaactcctattgcactcattggcgcaagagatcaacatagttttttacaactcatcatggatggacctaaaaataaaactgtaacttttttaaaaatcaaagacgctcaaaaagcacctattatccctgatattcattttaaatttttagattctttaagtaataaagtcaatcttcacgaacttttaaacgctcaatgtgatgcaactatgcacgctttaatcgctgaaaatttgagtgttgatgtgatagaacttgaaaaacttgacgcttggcatgcgggatatttgatgtattattatgaactttttacttcaacttgcggtgttatgctagggattaacacttatgatcaacctggtgtggaagttggaaagttgatcttaaaaaatatattaaattcttaatcaaaattcattaaaaaagagtataatgattttaagttaaaattataataaaaatttttaattaataataataattattatttaagaattttatgttataattttaaaaattaaaaaaaggagtcaatcatgtcagttacaaaacaattattacaaatgcaagcagatgctcatcatttatgggttaaatttcataattatcactggaatgtaaaaggtttgcaatttttttctatacacgagtacacagaaaaagcttatgaagaaatggcagaactttttgatagttgtgctgaaagagttttacaacttggcgaaaaagctatcacttgccaaaaagttttaatggaaaatgcaaaaagtccaaaagttgcaaaagattgctttactccgcttgaagtcatagaactgatcaaacaagattatgaatatcttttagcagaatttaaaaaactcaatgaagcagcagaaaaagaaagtgatactacaacagctgcttttgcacaagaaaatatcgcaaaatatgaaaaaagtctttggatgataggcgctactttacaaggtgcttgcaaaatgtaatttaaggggctttatgccccaattatacaaactaggttataatatccttttttaaaggataaaattgaaagtacttaattttttttatgaaaaccaccctaaatttgaagtaagttatgaaagaaaaaatcaaatttcaaaaccaaatattatcataaaaggcccacgattttgtggtaaaaaaacacttatttttaattttttatctcaatttaaagcaagtgaaattttgtttttagatttatatgatacacgctttgaaaaacaaagtttagaaagacttgctgattttctgaatgaaaatttacaaattaaaattctttgcctttataatttggattttatccctaatttagaaaaaattaacattcccatcatcttaagtacaaatataaaagatttaaatgtaaatgggtttgaagagcttgaacttgattattttgattttgaagaatttattagtgtaagtaagaaaaatttacctataaataatttagtaggtctttttttgcaaagtggacgcagtaaatttggagaaaaaaacatacttctaagacaaagcttcactcttttagaattagaaattttaaagtatttagctttaaatttgggtcagcaaatcagtatttctaagatatttatagaactcaaaaaaagattaaaaacttcaaaagatagtgtttatcaagctataaaaaaattagaaaatacttatgtgatttataccttaaaacatgatgaaaaaaaacttcaaaagatttattttaaagattttggcctaagaaataatctttgtatttcaaaggatttttcacatttatttgaaaatttagttttaagcgagttgtttaaatttaaagaagaatttttttataacaaatactttaacttttatagccaaatatctaaaattgcttatatttcaagtccaactttagatattgatttgatcaagctacgtgctaagaaaattttaccaaaggctttagaacttggaatttttcatgtgatttttatcactctttcaagcgaggataatttttttgaacaaggggttaaatttgaagtcatatcttttgataaattttcacttggattttaggtgttgtttgagtttgtatcgtatttttcaaggttgtatcgtttgatgatttttgtaataagattgatataatatcccttgcgttcagaataagaatctaaagttttaatagcctctagccctgttatctctttgccttcgctttcaaatttagctcttgcatcgcgaaacttttcataagcaaaatgacgatttaaatttaaaacataagagtcaacactatcttgcagactatcaaaaattttaattttgtgttttttatctggatgtcttaaatcaggaattaaacctttctcaccccaagtccattctccaaaaagattgtttgcttctcttgcgaagcgactggtacctgtagcactttcaactaaagcttgggctatacccatggattttggaattttttgaatacgttttttatattctgcaaaatcataaagattttcaatgcgatatttgttttttatcgtgataagtttttcaagatttatttggtttgaagtcctaaagcctgttttgtaagcatctttaaaaaaggcttcgataaaagctctttcttgttcaatttttttaaagctttgatcaaacatttcattcatttttataaaaaaaatttgtcttttttgatctatatcaagtttgtaatattcttctccaaatccactctttagatcatcagcaaaaagtgggattagaaaaagactaaaaaaaattataattggcttcaaaacaatactttacctttccttcaaaaaacaattcttcatttttatatgtaaacccaacctcttcaccacttttaggagttattttaactttattttgtacttttttatttaaaaatgccagataaaaacaagcccccattcctgtgccacaagctaaggtttcatcttcaactccgcgttcataggtacgaacttttaaatgattttcatctaaaatttttacaaaattaacattggcattatatttttgtctcattttttgacaaagtattgtatcaaattcatctaaattttgacaaaaatgcactagatgtggaactccagtgtcgcaaagttgccaagtttttcctaattcttcaaaagtattttgcacgctttttattttgcctaaagatacttcaactttatcttgatttacctttgcttttattattcctgcaccggttaaaaaactcatgttaggatttattttgttaatatgatgtgcaaaatgtgccgcagcccttgagccattgccacacatagcagcccttgagccatcgttattataaaattcccattcaaagtcgtatttttcatgaggcaatatcacgataaagccatccccacctatgccctcataacgattgcaaagttctttagctaaagcacttctatcttcttttctatcagcatttgttatgacaaaatcattcccacttgcacaatatttataaaatttcacatttttcctttagaaatttcttgtattactttaacacattcttgcctaaaatcgacataagaattagtatttttaatgataaaatctgcttttttaagtttttcttcaatatctatttgagaattaagtctcacttttgcagcttctaggctgagcttatctctttgcatgattcttttaaggcttaattctttaggtgtgtaaattacaatgactttgcctaaattttcataagcaccgctttcaaaaaaaagaggaatttctacaaaaaaagctttattttctttatctaaaatttgcatttgttctaaaattttagctcgaattttaggatgagtgaaattttctaaggtttttttagcttctttgttgttaaaaacaatttctccaaggatttttctatcgattttcttttcttttgtgagtaaattttttaagttaaagggagaaaaaatcttttcaagttctaaagcattttcatctaaaattttatgagcaattttatctgcgctaatgcttttaaagcctaaagaattcgctatttctataaaagtgcttttaccacaagcaattgaagcggttacaaaaaaagcatttttcatcttatgccttattaaaacttttttcgttaaaatacctttttagttcttaaaggaaaataaatgaaaatttcatatgaagatgcaggcgtaagtatagataatggaaatgcctttgtagaggctataaaacctttggttaaagaaacttttaatgataatgttgtaggcggaattggttcttttgctggtgcttttagaatgccaagtggttttaaaaagcctgtgattttaggtgcaacagatggtgttggtaccaagcttcgcttggcaattgatgctaaaaaatatgatactatagggcaagatttagtagcaatgtgtgtgaatgatttgatttgtaattttgctacgcctttgtttttcctagattattatgctacagccaagctcgaagtagaagtagcaaaggctgttgtatcaggcattgccaagggatgtaagatggcaaattgtgcattaattggcggagaaactgctgaaatgcctggaatgtatgcaaaagatgattttgatcttgcgggttttgcagtgggtatggctgaagaagatgagattgatagaagtaaatttgttaaaaatggtgatattttattggcactttctagttcaggacttcattcaaatggttattctttagctagaaaagtactttttgaaagtttaaaattaaaatttgatgacaagatagagggtaaaaatttaattgatattttgttagaacctacaaggatttatgtgcgtgattttcttacactaaagccttatatcagtgctctagcacatattacagggggtggtttagtagaaaatttaccacgcgttttacctcgtggtatgggtgcaactatacgcaaacatcatcttaaaactcctgaaattttttatactataggacaggctgtagaagaaagcgaaatgtatagaagctttaacatgggagtgggtttagtaatggttgtagatccttctaatgtaagtaagattttagaaaattcagatgcctttattatcggcgaaatttgcattaatgaaggtattgttttagaatgaaaataaagcgttaatacgctttatttttgtattttaagttctatttttgtagtgttttgttcttttggcaaaggattggtttgtgctagataaaaggctacaagtacatttacaagcatagcgataagtaaaagaggagtggttcgttttataatatccattggagctacttttgcaaatccagctaaagctatgattccgcctgctattggtgaagctgcacgacctaaacaagatgcaatttctataggtaaaactagagtaataggtgcaacgcctaattttgtagctatatcaggagctagttttccaaaagtattaaaagcggcaattccacttcccataatcactgtggcaaaataaactaaaaagcttaaaatagctatactcaaaagaattccaaaccatgcaaaatttcctgttccaagatttgaaaccgcgttagcaaggatattaactccaccaagtgctttaatgccttcagcaaatactccagcggcgatgattatgcttacgactgagataaaaatttcagccatagcttttaaaatcaccatcatatcttcgcctaattttctagcatttctgtgtcttgcaaattcaacaagaaaaactaaagaaatgcttacaaaatttgctgttacaacatcgagcttgatagtaaaaaaatacgctataaataaaaatacaacaggtaaccaaggaaagagtatgtaaaaaagtagggcatttaggatcaatgatttgcggaatttcaacttcatcatttaaaacacctttttctttatctcttttatcaatccaagtagaataaaaaggaatcaagatggcaattaactacaacataagtaatcacactataaatttgataatttaaagaaagtcctacgacattatcactttgtcctaccatatccgccatattgattgaatttccatcttttggaccataatcaagcgcaattaaagaaagcacacatacagctgtaataggacggattttaagtgagattaaaacaggataaatacatgctaacaaaagcaatccagcatagctagaaatgacgatttttaaagccattccaacaacaaaagttccatttaaaattaagtatttattttttgatttttcctgagggtttatttgctaaaaaagcaagttttgccgaagcattgatatgtttcatgtaagcagtaaagcctgccacactcatgataataaaccctactccagaaagctgacttttaaaaatcgctgtgataaaagataactatcaagtaaaacatttaaaaagcttgtatgctctctgcttggggcttttggtataggtgttcctgtgatgtaaaaagcaaaaataagcaagataatatttgaaagaaaaatacaaaaatgagattatattttagtatataataagcaacgacaattaccgctaaaagtgtagaacatatcataaaaattggcatgatttctcctaaagttattattagcttttattttagctaaaatttaactaataaatatttttcatttaaaattttacttattttttgcattataaaattaataatatgtatagtttggttactgaaaagtttatgtttgtttaaaaaaatgatttttgtattataattatacacaaatcataaatattaaaaaggatctagtgtggcaagaattttggcatttgatataggaataagctctattggctgggcatttagtgaaaatgatgagttaaaagattgtggagttaggatttttacaaaggttgaaaatcccaaaacaggagaatccttagccttgccaagacgccttgcaagaagtgctagaaaacgccttgctagacgcaaagcaaggctaaatcacttaaaacatttaatcgcaaatgaatttaagttaaattacgaagattatcaaagctttgatgaaagtttagccaaggcttataaaggatctttaattagcccttatgagttaagatttagagctttaaacgagcttttaagtaagcaagattttgcaagagtgattttacatattgcaaaaaggcgtggctatgatgatattaaaaatagtgatgataaagaaaaaggtgcgattttaaagctatcaagcaaaatgaagaaaaactagcaaattatcaaagtgtgggcgagtatctttataaagagtattttcaaaaattcaaagaaaattccaaagaatttacaaatgttagaaataaaaaagaaagttatgaacgctgcatagcgcaaagttttttaaaagatgaattaaagcttatttttaaaaaacaaagagaatttggcttttctttttcaaaaaaatttgaagaagaggtgcttagtgtagcattttataaaagggctttaaaagatttttctcatttggtgggaaattgtagtttttttaccgatgaaaaaagagcgccaaaaaattcgcccttagcttttatgtttgtagcacttacaagaattatcaatcttttaaacaatcttaaaaatactgaaggaattttatatacaaaagatgatttaaacgcccttttaaatgaagttttaaaaaacggcactctaacttataaacaaacaaaaaagcttttgggcttaagcgatgattatgaatttaaaggagaaaaaggaacttattttattgagtttaaaaaatacaaagaatttataaaagccctaggtgagcataatttaagccaagatgatttaaatgaaatagcaaaagatattacccttataaaagatgagattaaacttaaaaaggctttagcaaaatatgatttaaatcaaaatcaaattgatagtttaagcaaattggaatttaaagaccatttaaatataagttttaaagccttaaaacttatcactcctttaatgcttgaaggtaaaaaatacgatgaagcttgcaatgagcttaatttaaaagtagcaatcaatgaagataaaaaagactttttacccgcatttaatgaaacttattacaaagatgaagtaactaatcctgtggttttaagggcgattaaagaatatagaaaggtcttaaatgccttacttaaaaaatacggtaaagtgcataaaataaacattgaattagcaagagaagtaggtaaaaatcacagccaaagagctaaaatagaaaaagagcaaaacgaaaactacaaggccaaaaaagacgccgaacttgaatgtgaaaaactaggcttaaaaataaatagcaaaaatattttaaaattaagattatttaaagaacaaaaagaattttgtgcttatagtggagaaaagattaaaattagtgatttgcaagatgaaaaaatgcttgaaattgatcacatttacccttattctagaagttttgatgattcttatatgaataaagttttagtttttaccaagcaaaatcaagaaaaacttaataaaaccccctttgaagcctttggcaatgatagtgcaaaatggcagaaaattgaagttttagcaaaaaatttacctactaaaaagcaaaaaagaattttagataaaaattacaaagacaaagagcaaaaagactttaaagatagaaatctaaacgatactcgctacatcgcaaggcttgttttaaactacactaaagattatttagattttttacctttaagcgatgatgaaaatacaaagttaaacgacacacaaaaaggctcaaaagtgcatgtagaagcaaaaagcggtatgcttacatcggctttaagacacacttggggctttagcactaaggatagaaataaccatcttcatcacgccatcgatgcagtaattattgcttatgcaaacaactctatcgtaaaggctttttcagattttaaaaaagagcaagaaagcaacagtgcagaactttatgcaaaaaaaattagtgaattagattataaaaacaaaaggaagttttttgagccttttagtggttttaggcaaaaggttttagataaaattgatgaaatttttgtctcaaaacctgagagaaaaaagccaagtggagctttacatgaagaaacatttagaaaagaagaagaattctatcaatcatacggcggaaaagaaggagttttaaaagccctagagcttggtaaaatccgcaaagtaaatggtaaaatagttaaaaatggcgatatgtttagagtggatatttttaaacacaaaaagacaaataaattttatgctgtgccaatttatactatggattttgctttaaaagtattaccaaataaagctgtagcacgaagtaaaaaaggtgagataaaagactggattttaatggatgaaaattatgagttttgcttttctttatacaaagatagtttgattttaattcaaactaaagatatgcaagagccagaatttgtttattataatgcttttacaagctctactgttagtttgattgtttcaaaacacgataataaatttgaaacgctaagcaaaaatcaaaaaatattgtttaaaaatgcaaatgaaaaagaagtaatcgcaaaaagcataggaattcaaaatctaaaagtatttgaaaaatacatagtttcagcacttggggaagttacaaaggctgagtttagacaaagagaagattttaaaaaatgagttacgatgaagcttttaaaacactgcttattagctctaatgccaagctaaatttagagctaaatcatcttgtgattaagcaagatgaaaatatagccaaattgtttttaaaagatataaatatcatcgttttagaaagcttacaaataagcattagttccgcactttttaatgcctttgcaaagtataaaattatcttattaatctgcgatgaaactcatagtataaatggcgtttttactccttttttagggcattttcaaagtgcaaaaatcgcaaaagagcaaatgaatgtaagtgctcaaaaaaaggctattttatggcaaaaaatcattaaaaataaaatcctaaatcaagcctttatcttaaaaaaacacaataaaatagagcaaagcaatgagcttataaatttggctaaaaaagtaagcttaaatgatagtaaaaatattgaagctgttgcggcggcgctttattttaaaactttgtttggtacttctttttcaagagatgagctttgctttgaaaattctgctttaaattatggctatgcaatcattagggcttgtattattagagcagtttgcataagtgggcttttgccttggcttggcataaagcacgataatatttataattcttttgcgctttgtgatgatttgatagaagtgtttagggctagtgttgatgattgtgttttaaagcttaagggtgaaagtgagtttttaagcaaagatgacaaaagagcgttgattggcaatttacaaagtaaaatcaattttgatgggcaaaattatcctttaaacagagcgataaatcattatgtggcaaattttaaaaatgctttattgtatgaagatgaactaaagatagtgaaatttgatgattgaagataaatttatgcgtgtgcttttgatgtttgatgtgccaactaaaagtaaaaaagagcaaaaactagcaagtaaatttagaaataatcttataaaattaggttattttatgctgcaatttagtgtttatatgcgtatttgcaagggtttaagttctgcaaaaagttctattgaaaatgtaaaaaagattttgccaccttatggaaatgtaagggctttaatcatcactgaaaagcaatttgataaaatggagcttttgcttggtggcatagtttttaacgaaaaagttaataacgaaaccaatttaacgctttttgatatagatagtcatggagaatttaaatataaaaattcaaataatgaagaaattcaaataaacaaaaaacaagaaaaatatcatcagcaaaatttatttgaattttaaaagcggttttaggggattgtaaccccgcagagtcccgcaaactctttattttagtccctttttaaatttcttatgagattatagcataatttttgctatttttcatgaaaaaaccccgaaattttcattatctggtaaatatctattttaccataaagaaatttaaaaagggactaaaacagcattaaacaaaaatccacacattagtttattttaccataaagaaatttaaaaagggactaaaataaaccctagtggattgaaactccactagggctaattactccactaaaaggaggttgcgaatttgaaacttattgaaatttagggttgattaaaatcgaaataaaattatttaaataattttaaggcataaagataatatctactaaactttcattttctaacatttcacattcttttggcaccaccataagggcagctttattgttaagattgtttataatcgcactagagccttcttttttgccttcaagattggctaaaatgcgtccatttttaaactctatattgcaagcgacaaattccaaataaggtgtttttttcttgtaacttccttgtaaaaaggctttgcaaatatagtctttaggttgaagtaaccaagagtttaaaatctctcttgtgtaaagattaaacattaccatagccgagtaaggaaaacctggtaaggcgatgatgaatttttcattagccttagctattttgatatgtctacctggttttatgtcggctttatcgatgatgatttcgtattctttgatggctttttttaaaaagtcaaaatctcccatagaaaccccgcccgttgtaaccaaaatatcacaactttgcaaagcactttcaagggtggaaaaagtggctttctcatcatcttttaaaagaggaaaaacccttgtatcgcaatttaaatttttagctaaattagctatggcgatatgatttgaagagcggatttgagcaggattttccaaggcttctcctagatctttgatctcacttccactacttaaaacccctacaataggttttataaacacactaatgtgaaaaaatccaagttcagctaaaagagctatctcgctataatttaaccttgtgccttttttgagtaaaatttcatcttttttatagttttctcctaccgcacgcacggcaaaagcttggggaacttttttttctataaaaagagtattattttctatgcgtatattttcaacagggactaaagtatcgcttccttcgctcatgagtgagcctgtaaaggtttttacacaagtgccattttgtacgctaaattgtggcatagtacccgcaggtgtggggcctaaaatttttaaaggcttgtcttgatcttcaaatttgatcgcataaccatccatagccgaggttggaaattcaggctgatttttaggggcttttatatcttgagctaaaatgcgtcctaaacactctgtaagagctattttttcaatcttttcataagttttgatatgagaatgtaaaatttttaaactttcttcataagacattagcattttttatccttttaaaagtcctgcaccgcaaagcttggttgatctttctttggcataaattctttctttgtttatcacatcatacttccaaatgggcgcacttgctttaaaatcttcaacaaattcattaagaagtttaagtcctaattttctttgtttgcttaaaattcctgcaaaatacgagctttcatgtatcgctacatcgcctatagagtgagcaaaaagcaagctaataccatcaaaatctactcttttttgccactcatcaaaccatttttttaaaagcgattcataaatatcaaaactaagtgcctcaatacctccttcttcacgcacaataccacaaaaagtcagtaaagcaccgcagtttttatccttggaaaattcataccattggctataaattttaggaatatctaaagagccttgataaagtgtaaaatgtttcatttagcctccacaaactggcggtaaaagtgctattttatcaccatcttttaacttggtgttttcatcaaaaatgatttcatcatttaaagatacagcacaaagttctagccattcttttaaactctcatctttttgcaaaatttcttttaattcttttaaattttttacttcaagttctaaattttctttatttatagggcctaaaaattccacttttaccattttattcctttacttctaaatttcccatcattcctaaatcttcatgttctaaaatatggcaatgatacattctaagtcctttaaaatcttgtttcattctaagtcttaactcttcattaggacgcacatttatagtatctctgaaggctctaaattcggctttttgaactttgccattgagttttgatgagatgagttcaaattgcgtgccgtgtatgtggaaaggatgatccatgtgagatttgtttatcactatccagtcttcaactactccaagcttggagcttaaatcaatgcgttttaaatcatagcttttgccattgattaaaaacatagacgcaagagcgatttttaattcattttcactttttcccatcattccatgcatttgcatatgatcttcactcatgattatttctttaaattccttaggttcttctaaaggtttgaaaatttttaaattttttggaagttctaatttttctttttttaggttaatattggctagaaatagggtattagattcttcttttaccatcattttatccctatcataataagcactttctagcttaaaattcccatcttttggagcgtcgattaaaacttctacacgagaagcaggacttaagaaaagttcttctttataaatagctttttctataagtccaccatcagtaccaacaagtataaacttagctccttgtatgcgtaaatttaaatatcttgctgcagtagcattataaatgcgtatgcgttcgtttgtggcgagtttgattttaggtttaaattgtccattgatgagtacaaattctccttctctaccatttagccaatcatttaggttgttgtttggaatttgagcgttttcatcaagacgcaaatcgctaatcatcaaatctttttcttttaaatgacttaaagcatctttttttgctttgatcacaaaagcccctgctaaacccataaaaacttgtttagaagccgtataatgaggatgtggatgataccagtaagttcctgcgctatcttgaggaatttcaaaacgatatattctttcttctcctgctaagataggatcatgtgggcttccatcttgatcaggtggcacaggaacgccatgccaatgtatagttgtagcttctttgagtttgtttttgactaaaatttcaagtttatctccttcaaaaacttctatttttggagcaggcacgaggccattgtaagtataaaataaggtttttttacctttgataagctctatatgattttctttgatttctagggtagcacgaaaaatatttttttctttactttcatttttgagtaaaggcaaggcttttaaaatttctccttgggggaattgttttggatctaaaagctttaaattttttggagcaaagtttataaaagaagtatctaagtcatgatttatagaatgatttttatgcatggagtgcatatcatgcataggatttgcataggctacacccatacttgctagagtgagtgcattaaattttaaaaaatttcttctattcattagtttttccttttgcttgattttttgtattatagtcattatttttttaactttagtaaatatttattttgaaaatttggtttaattttgttatgattttagcaatttaatcaaggaaaaataatgttttatgaaaaaattcaaaccccagcttatattttagaagaagataaattaagaaaaaattgtgagcttttagcaagtgttggcgaaaaaagtggtgctaaagtgcttttagctttaaaaggttttgctttttcaggagcgatgaaaattgttggagaatacttaaaaggttgtacttgtagcggactttgggaagcaaaatttgctaaagaatacatggataaagaaattcatacttattcgcctgcttttaaagaagatgaaataggtgaaatagccagcttatctcatcatatagtgtttaactctttagctcaatttcataaatttcaagctaaaacacaaaaaaattccttaggtcttcgttgtaatgttgaattttctctagccccaaaagaactttacaatccttgtggaagatactcaagacttggaattcgtgctaaagattttgaaaatgtggatttaagtaccatagaaggacttcattttcacgcactttgcgaagaaagtgctggtgctttagaagctgttttaaaggtttttgaagagaaatttggcaaatggatagggcaaatgaaatgggtgaattttggaggaggacatcacatcactaaaaaaggctatgatgttgaaaagcttattgctttgtgtaaaaatttcagtgataaatacggtgtgcaagtttatcttgaaccaggcgaagcggtgggttggcaaacaggaaatttggtggctagtgtagtagatatcatagaaaatgaaaaacaaattgctattttagatacttcaagcgaagcgcatatgccagatactatcatcatgccttatacaagtgaagttttaaatgctagaattttagccacaagagaaaatgaaaaaatttcagacttaaaagaaagcgaattttcctatttgcttactggaaatacttgtttagcgggtgatgtaatgggagaatacgcctttgataaaaagcttaaaatcggcgataaaattgtttttttagatcaaattcattacaccattgtgaaaaacacaacttttaatggtataagacttccaaatctcatgcttttaaatgcaaaaaatgaacttcaaatgataagagaattttcttataaggattattctttaagaaattagtattatttataatttgcataaaatgttaattttactcggaagagaatcaaagatgtaaattttatgcaaagtattttattttttcaaatataaaatcaactcaaatatctaattttcaatactttggtatgattttttaatattttaaatccttgtggaattttattgaaattcagtgatttttaaatcaaatagtattaagataaatcgatttaaaaatcggctttaaaatgaatattaggtatattttgcataatattcattcaagcaaaatttaaagctatttttgaaaattttgaatgcatggaagctttaatggatttggaaaaattaagattagctagaagtctttattatcaatgtctaggagagctttttgttttttcattttctgaagaaagattgtcaaaattacaagagtatttaaagacaatgcaagaatgtttatttgatgaaaatttaaaatcaaattttgatatcttgcttaagcatttagatgatgaaaattctatacaagcattttttaaagaatatgatttgctttttttaagtcttaaaaatagcattccaacgactttttcttacatagaagaaggttttgaaaattcaaatcctttactttgcgtgcgtcaaattttagtcaaaagtaaaataagacgcaatgaaaaattttttaaagaaagtgaagatagtgttggattttgtttattgttgatgagtgaatttttaaggcaaaatgaagatgatttagccaaagagctttttgaaaaagtgatcaataaaagcattgatgagtttttaggcgatgttttcatgaataaaaatgcgaatttatataaggaaattgcaagtattgcatcggcttttatggaatttgaaagactttgctttgaagtggaaaaacctgcaaaaataaattctaaaaaagtgcaaaacgatctatcgcgttcagaatttttaagaagagaagcaaataaacaaaggaggactcgtgaaaaatcgcagggaatttcttaaaaaatccgcttttgccttaggggctgctggagtgcttggtagcacaactttagctctagctaaagatgaagaaagaaaagatttagttaaaggtaaaagtaagaaaaaagaagtgctttttcaaagaagtgctaattgggaaaattattatataaaggctgagtaatgtcaagtgtaggtgaaaatatcaagcttacgcgtcgttcttttcttaaaatggcagcactttcaagcctagcaacaccgttgcttgctagaagtgaaactttaagagaagcgagtgctgatgagcttaaagaagcttatgaaggtagtaaaaaagtaaaaacagtttgtacagcctgttctgtaggctgtgggattattgcagaagtgcaaaatggtgtttgggtgcgtcaagaaatcgctcaagatcatcctgtgagttcaggtggacattgctgcaagggatctgatatgatcgatatggtgcgttcacatgtgcgtttaaaatatcctatgaaaaaagaaaatggagaatggaaacgcataagttatgagcaagctttaagtgagatcggagaaaaactagctgcttatcgtaaagaaaatcctgaaagtgttatgtttttaggttctgcaaaacttaataatgaacaagcttattatataagaaaatttgcagcattttttggaacgaacaatgtagatcatcaagctagaatttgacacagcgcaacagtcgccggtgtggcgaatacatttggttatggcgctatgacaaaccatcttggagacatccaaagaagtaaatgtatcattatcattggagcaaatccagcggtaaatcaccctgtgggttttagacatttcttaaaagcaaaagaaaaaggtgcaaagcttatcgttgtagatcctagatttacaaaaagtgcagcaaaagcggatatttatgcaagaattcgtccaggaactgacattgctttcatgtatggaatgttaaaaatcatttttgatgaaggcttggaagatacaaaatatcttgatgaaagagtttttggaattgataaaattcgtgaagaagcagcaaaatggacagttgaagaagtggaaaatgttacagggatctctaaagaacttttggtgcaaatcactcacgaagtagctaaaaacaaaccaactacgcttatttgggctatgggtttaactcaacatactgtaggaacttcaaatacacgtttagcacctattgtgcaaatggtacttggaaatataggtaaatttggtggtggagttaatatcttacgcggacacgataatgttcaaggtgcttcagatatggcttgtttgagcgaaaatttaccaggttattatcctttaaatgaagcgacttggagatactatgccaaaatttggggtgtggattatgagtggcttttaggaaattttgtaagcaaagattggatgcataaaactgggctttcacttgctagatggtgggcagcggctttaaatggaaaagatggaaatgatgctatcgataatgcaggaacgcctttaaaagctttagtagttatgggaaatggtattacttcgactgcacaacaagtaaaagttaaagaaggtttggaagctttagagcttttagttttagccgatccttttgtaaatgaagcagggattattgcagaaagaaaagatggaatttatcttttacctgcagcaacacagtttgaaacaagcggaagtgtaacagcaacaaatcgtagcggacaatggagatttaaagttgtagatccactttatgaaagcatggaagatcaagaaattttatttgagcttgctaaaaaattaggtttttatgaagactttaccaagactttacgcgatgaaaaaggtgagattgtttggcctgaaaatgcaacaagagaaattgcaaaagcagttagaagtatagggcttaatggttggagtcctgaaaggcttaaaaagcatactttatactgggataaatttgatgaggtaactttagaaggaaaagacgaagttgctggcgagtattacgggcttccttggccttgttggagtgataagcacccaggttctcctgtgctttataataccgacattgaagtagcaaaaggtggtatgggctttagaaacaattttggacttgaatatgaaggagagagtttacttgctaagaatgcacctttaaattcacctattgatacaggttatccacaaattactaaagataatatagaaaaagttttaggtattactttaagtgctcaagaaaaagaaaaaatgggatcaacttggtcttatgatgatagcaatatcatagcaactaaatgtatagaaaaaggcatagttccttatggaaatgctaaagctagagctgtagtttggacttttaaagataaaattccactccaccgtgagcctttacattctccaagaaacgatttggtgcaaaaatatccaagttttgaagatcaaaaagcgctttaccgcgtggatactaaatttgtttctgtgcaacaagctaaggattattctaaagaattcccgcttaatcttgttactgcaagacttgtgaatttaaatggtgcaggtatggaaaatagagcatctatgtatctaa

SEQ ID NO: 4044 - DNA, 22085 bp, synthetic construct
  source 1..22085: mol_type = other DNA
  misc_feature 1..22085: note = Synthetic
caaattctacacttctccaactgccataagaatgcttcatgctgatgcgcctgatgagccaagaaaatatgatttaagtacgcttgaagtgcttggaacggttggagagcctatcaatcctagtgcttggaagtggttttatgatgaaatagggggaactaaaagtcctatagtcgatacttggtggcaaacagaaacaggtgggcatatgatcacgcctttaccaggtgctactcctttaaaaccaggttgtgccaccttgcctttgccagggatttttgcagaagttattgatgaagaaggcaataaaaaagatgaaggtgaagatgggttgctttgtataactaaaccttggccttcgatgattcgtggaatttggggtaatgatgaacgctatatagaaagttatttttctcaagctaaaaaagatggaaaagctgtatattttagtggcgatggtgctttttatgataaaaatggttatattaccatcacaggaagaacagatgatgtggttaatgttgcaggacatcgtataggaacggctgaaattgaaagcgctattgccaaacatccaagtgtagcagaatcagctgtagtgagtattttggatgcgattaagggcgagtcactgtttgcttttgtggttttaagtcctgcattcagttgtgatcttggcggagctatagaaactttaaacgaacttaatgacattttaagagtagaaataggacctatagctaaaatagaaaaaattctttatactccaggtttgccaaaaactagaagtggtaaaataatgagaagaattttaagaactatagcaagaggtgaagaaatcaaacaggatatttcaacacttgaagattctggagtagtagaaaccattgttaaattagctaaggcagagtttgaataacaaggcaaaaagaactttgccttgttgcatgaaaatttataaaaataagctataatgataaaaaaataaaaggaaatttttatgcttcaaacttgtattttccctgcggcaggttatgggacgagatttttacctgcaacaaaaactttacctaaagagatgttacctatcttaactaagcctttgatccattatggggttgatgaagctttggaagcaggaatggaaaatatgggctttgtcacagggcgtggaaaaagagctttagaggattattttgatatttcttatgaacttgagcatcaaatttcaggtacaaaaaaagaatacttacttgatgaaattcgctctttgatcaatcgttgcacctttacttttacaagacaaaatcaaatgaaaggtttaggtgatgcggttttaaaaggtagacctttggttggcgatgaagcttttggtgtaattttggctgatgatttgtgtgtcaatgaagaaggcttaaatgttatggctcaaatggtaaaaatttatgaaaaatatcgctgcaccatcatagctgtgatggaggtaccaaaagaacaagtttcaaactatggagtaatttctggaaattttgtagaagataatcttatcatggttaattctatgatagaaaaaccaagccctgatgaagctccaagtaatcttgctatcataggaagatatattttaactcctgatatttttggaattttagaaaatactcaagcaggaaaaaatggcgaaattcaacttaccgacgcgcttttaactcaagcaaccaatggtatggttttagcttataaatttcaagggaaacgctttgattgtggaagtgtagaaggctttgtagaggcgacaaattatttttacgagaaaagtaaatgttaaacaatacacttttttttaagcaaaatgaaattcacactataagttcttatgcaaatcgtattaatgatgaggtaaaaagtggagatgtagggtattatcatcttattgacacaagtttgaatttaatcgatgagagtttgcaatttattcaagataaagaatatgtaaaaaatatcgttttagtgggaatgggaggttcaagttgtggtgtaaaagccttgcgtgatatgctttttaatgaaaaaagcaaccaaagagatctttttatactcgataacacaagttcacattcttttaataagactttagaaaaaatcaagcttgaagaaagtttgtttttaatcatcagtaaaacaggtagcactatagaagttgtatcgctttttaaacttcttattgaacattttaaacttgatatgcaagaattaaaaaaatactttgtttttattaccgataaggattcaaaacttcatcaagaaggtgaaaatttaggtattaaatgcttttttatccctgcaaatgtaggaggtcgttttagtatactttcagccgtgggtatagttccgctttgtttttgtggctataatgccaaagctcttttagaaggagctaaagcttgttttgaagatttttttactcgcaaaaaagatgaaattttacaaaaagcctatcattattgtacgcataaaaatgccaatatcaatgtacttttttcatatagtgatgcttttaaaggatttaatgaatggtatatccagcttattgctgaaagtttaggtaaaaagcaaggctataaacgtataggtttaactcctattgcactcattggtgcaagagatcagcatagttttttgcaactcatcatggatggacctaaaaataaaactgtaacttttttaaaaatcaaagacgctcaaaaagcacctattatccctgatattcattttaaatttttagattctttaagcaataaaatcaaccttcatgaacttttaaacgcccaatgtgatgcaactatgcacgctttaattgctgaaaatttaagtgtcgatgtgatagaacttgaaaaacttgacgcttggcatgcgggatatttgatgtattattatgaactttttacttcaacttgtggtattatgctaggaattaatacttatgatcaacctggtgtagaagttggaaaattaatcttaaaaaatatattaaattcttaaaaaatatattaaattcttaatcaaaattcattaaaaaagagtataatgattttaagttaaaattataataaaattttttaattaataataattattatttaagaattttatgttataattttaaaaattaaaaaaaaggagtcaatcatgtcagttacaaaacaattattacaaatgcaagcagatgctcatcatctatgggttaaatttcataattatcactggaatgtaaaaggtttgcaatttttttctatacatgaatacacagaaaaagcttatgaagaaatggcagaactttttgatagttgcgctgaaagagttttacaacttggtgaaaaagccatcacttgccaaaaagttttaatggaaaatgcaaaaagtccaaaagttgcaaaagattgctttactccacttgaagtcatagaactgatcaaacaagactatgaatatcttttagcagaatttaaaaaactcaatgaagcagcagaaaaagaaagtgatactacaacagctgcttttgcacaagaaaatatcgcaaaatatgaaaaaagtctttggatgataggtgctactttacaagatgcttgcaaaatgtaatttaaggggctttatgccccaattatataaattaggttataatatccttttttaaaggataaaattgaaagtacttaattttttttatgaaaatcaccctaaatttgaagtaagttatgaaagaaaaattcaaatttcaaaaccaaatattatcataaaaggcccacgattttgtggtaaaaaaacacttatttttaattttttatcacaatttaaagcaagtgaaattttgtttttagatttatatgatacacgctttaaaaaacaaagtttagaaagacttgctgattttttgaatgaaaatttacaaattaaaattctttgcctttataatttggattttattcctaatttagaaaaaattaaaattcctatcattttaagtacaaatataaaagatttaaatgtaaatgggtttgaagaacttgaactcgattattttgattttgaagaatttattagtgtaagtaagaaaaatttacctataaataatttagtaggtctttttttgcaaagtggacggagtaaacttggagaaaaaaacattcttctaaggcaaaattttactcttttagaattagaaattttaaagtatttagctttaaatttgggtcagcaaatcagtgtttctaagatatttatagaactcaaaaaaagattaaaaacttcaaaagatagtgtttatcaagctataaaaaaattagaaaatacttatgtgatctatactttaaaacatgatgaaaaaaaacttcaaaagatttattttaaagattttggcctaagaaataatctttgtatttcaaaggatttttcacatttatttgaaaatttagttttaagtgagttgtttaaatttaaagaagaatttttttataataaatactttaacttttatagccaaatatctaaaattgcttatatttcaagtccaactttagatattgatttgattaaactacgtgctaagaaaattttatcaaaggctttagaacttggaatttttcatgtgatttttatcactctttcaagcgaggataatttttttgaacaaggggttaaatttgaagtcatatcttttgataaattttcacttggattttaggcgttgtttgagttcgtatcgtatttttcaaggttatatcgtttaatgatttttgtaataagattgatataatatcccttgcgttcagaataagaatctaaagttttaatagcctccaatcctgttatctctttgcctccgcttttaaatttagctcttgcatcgcgaaacttttcataagcaaaatggcgatttaaatttaaaacataagagtcaacactatcttgcagactatcaaaaattttaattttgtgttttttatctggatgtcttaaatcaggaattaaacctttctcaccccaagtccattctccaaaaagattgtttgcttctcttgcgaagcgactggtacctgtagcactttcaactaaagcttgggctatacccatggattttggaattttttgaatacgttttttatattctgcaaaattataaagattttcaatgcgatatttgttttttatcgtgataagtttttcaagatttgtttgatttgaagtcctaaagcctgttttgtaagcatttttaaaaaaggcttcgataaaggctctttcttgttcaatttttttaaagctttgatcaaacatttcattcatttttataaaaaaaatctgtcttttttgatctatattaagtttgtaatattcctctccaaagccactctttagatcatcagcaaaaagtgggattagaaaaagactaagaaaaattataattggcttcaaaacaatactttacctttccttcaaaaaacaattcttcatttttatatgtaaaccccacctcttcaccacttttaggagttattttaactttattttgtacttttttatttaaaaatgccagataaaaacaagcccccattcctgtgccacaagctaaggtttcatcttcaactccgcgttcataggtacgaacttttaaatgattttcatctaaaatttttacaaaattaacattggcattatatttttgtctcattttttgacaaagcattgtatcaaattcatctaaattttgacaaaaatgtactagatgtggaactccagtgtcgcaaagttgccaagtttttcctaattcttcaaaagtattttgcacgctttttattttgcctaaagatatttcaactttatcttgatttacctttgcttttattattcctgcaccagttaaaaaactcatgttaggatttattttgttaatatgatgtgcaaaatgtgccgcagcccttgagccattgccacacatagcagcccttgagccatcgttattataaaattcccattcaaagtcgtatttttcatgaggcaatatcacgataaagccatccgcacctatgccctcataacgattacaaagttctttagctaaagcacttttatcttcttttctatcagcatttgttatgacaaaatcattcccacttgcacaatatttataaaatttcacatttttcctttagaaatttcttgtattactttaatacattcttgcctaaaatcggcataagaattagtatttttaatgataaaatctgcttttttaagtttttcttcaatatctatttgagaatcaagtctcgcttttgcagcttctaagctaagcttatctctttgcatgattcttttaaggcttaattctttgggtgtgtaaattactatgactttgcctaaattttcataagcaccgctttcaaaaaaaagaggaatttctacaaaaaaagctttattttctttatctagaatttgcatttgttctaaaattttagctcgaattttaggatgagtgaaattttctaaggtttttttagcttctttgttgttaaaaataatttctccaaggatttttctatcgattttcttttcttttgtgagtaaattttttaagctaaagggagaaaaaatcttttcaagttctaaagcattttcatctaaaattttatgagcgattttatctgcactaatgcttttaaagcctaaagaattcgctatttctataaaagtgcttttaccacaagcaattgaagcggttacaaaaaaagcatttttcatcttatgccttattaaaacttttttcgttaaaatacctttttagttcttaaaggaaaataaatgaaaatttcatatgaagatgcaggtgtaagtatagataatggaaatgcctttgtagaggctataaaacctttggttaaagaaacttttaatgataatgttgtaggcggaattggttcttttgctggtgcttttagaatgccaagtggttttaaaaaacctgtgattttaggtgcaacagatggggttggtaccaagcttcgcttggcaattgatgctaaaaaatatgatactatagggcaagatttagtagcaatgtgtgtgaatgatttgatttgtaattttgctacgcctttgtttttcctagattattatgctacagccaagcttgaagtagaaatagcaagggctattgtatcaggcattgccaagggatgtaagatggcaaattgcgcattaattggcggagaaactgctgaaatgcctggaatgtatgtaaaagatgattttgatcttgcgggttttgctgtgggtatggccgaagaagatgagattgatagaagtaaatttgttaaaaatggtgatattttattggcacttcctagttcaggacttcattcaaatggctattctttagccagaaaagtactttttgaaagtttaaaattaaaatttgatgacaagatagagggtaaaaatttaattgatattttattagaacctacaaggatttatgtgcgtgattttcttacactaaagccttatatcagtgctctagctcatattacagggggtggtttagtagaaaatttacctcgcgttttacctcgtggtatgggtgcaactatacgcaaacatcatcttaaaactcctgaaattttttatactataggacaggctgtagaagaaagcgaaatgtatagaagctttaatatgggagtaggtttagtaatggttgtagattcttctaatgtaagtaagattttagaaaattcagatgcctttattatcggcgaaatttgcattaatgaaggtattgttttagaatgaaaataaagcgtcatacgctttatttttgtattttaagttctatttttgtagtgttttgttcttttggcaaaggattggtttgtgctagataaaaggctacaagtatatttacaagcatagcgataagtaaaagaggagtggttcgttttataatatccattggagctacttttgcaaatccagctaaagctatgattccgcctgctattggtgaagctgcacgacttaaacaagatgcaatttctataggtaaaactagagtaataggtgcaacgcctaattttgtagctatatcaggagctagttttccaaaagcattaaaagcagtaattccactttccataatcactgtggcaaaataaactaaaaagcttaaaatagatatactcaaaagaattccaaaccatgcaaaatttcctattccaagatttgaaaccgcgttagcaaggatattaactccaccaagtgctttaatgccttcagcgaatactccagcggcgatgattatgcttacgactgagataaaaatttcagccatagcttttaaaatcaccatcatatcttcacccaattttctagcatttctgtgtcttgcaaattcaacaagaaaaactaaagaaatgcttacaaaatttgctgtcacaacatcgagcttgatggtaaaaaaatacgctgtaaataaaaatacaacaggtaaccaaggaaagagtatgtaaaaagtagggcttaggatcaatgatttgcggaatttcaacttcatcatttaaaacacctttttctttatctcttttatcgattcaagcaaaataaaaaggaatcaagatggcaataactacaacataggcaatcacactataaatttggtaatttaaaaaaagccctacgacattatcactttgtcctaccatatctgccatattgattgaatttccatcttttggaccataatcaagtgcgattaaagaaagcacacatacagctgtaataggacggattttaagtgagattaaaacaggataaatacatgctaacaaaagcaaaagcaatccagcatagctagaaatgacaatttttaaagccattccaacaacaaaagttccacttaaagtcaagtatttatttttgattttcctaagggtttatttgctaaaaaagcaagttttgccgaagcattgatatgtttcatataagcagcaaaacctgccacactcatgataataagtcctactccagaaagctggcttttaaaagtcgctgtgataaaagcatagctatcaagtaaaacattcaaaaagcttgcatgttctctgcttgaggcttttggtataggtgttcctgtgatgaaaaagcaaaaataagcaagataatacctgaaagaaaaaatacaaaaatgggattgtattttttgagtatataataagcaacgacaattaccgctaaaagtgtagaacatatcataaaaattggcatgatttcttctaaatttattattagcttttattttattttagctaaaatttaactaataaatatttttcatttaaaattttacttattttttgtattataaaattaataatatgtatagcttggttactgaaaattttatgtttgcataaaaaatgatttttatattataattataaacaaatcataaatatcaaaaaggatctagtgtggcaagaattttggcatttgatataggaataagctctattggctgggcatttagtgaaaatgatgaattaaaagattgtggagttaggatttttacaaaggctgaaaatcctaaaacgggagaatccctagccttgccaagacgccttgcaagaagtgctagaaaacgccttgctagacgcaaagcaaggctaaatcacttaaaacatttaatcgcaaatgaatttaagttaaattacgaagattatcaaagctttgatgaaagtttagctaaggcttataaaggttctttaattagtccttatgagttaagatttagagctttaaatgagcttttaagtaagcaagattttgcaagagtaattttacatattgcaaaaaggcgtggctatgatgatattaaaaatagcgataatgaagaaaaaggcaagattttaaagctatcaagcaaaatgaaaaaaaactagcaaattatcaaagtgtgggcgagtatctttataaagagtattttcaaaaattcaaagaaaattccaaagaatttataaatgttagaaataaaaaagaaagttatgaacgctgcatagcacaaagttttttaaaagatgaattaaaacttatttttaaaaaacaaagagaatttggcttttctttttcaaaaaaatttgaagaagaagtgcttagtgtagcattttataaaagggctttaaaagatttttctcatttggtgggaaattgtagtttttttactgatgaaaaaagagcaccaaaaaattcgcccttagcctttatgtttgtaacacttacaagaattatcaatcttttaaacaatcttaaaaatactgaaggaattttatatacaaaagatgatttaaacacgcttttaaatgaagttttaaaaaacggcactctaacttataaacaaacaaaaaagcttttgggcttaagtaatgattatgagtttaaaggagaaaaaggagcttattttattgagtttcaaaaatacaaagaatttataaaagccctaggtgagcatagtttaagccaagatgatttaaatgaaatagcaaaagatattacccttataaaagatgagattaaacttaaaaaggctttagcaaaatatgatttaaatcaaaatcaaattgataatttaagcaaattggaatttaaagaccatttgaatataagttttaaagccttaaaacttatcactcctttaatgcttgaaggtaaaaaatacgatgaagcttgtaatgagcttaatttaaaagtagcaatcaatcaagataaaaaagattttttacccgcatttaatgaaacttattataaagatgaagtaactaatcctgtggttttaagggcgattaaagaatatagaaaggttttaaatgccttacttaaaaaatacggtaaagtgcataaaataaacattgaattagcaagagaagtaggtaaaaattacagccaaagagctaaaatagaaaaaaagcaaaatgaaaactacaaggccaaaaaagacgccgaatttgaatgtgaaaaactaggcttaaaaataaatagtaaaaatattttaaaattaagattatttaaagaacaaaaagaattttgtgtttatagtggggaaaagattaaaattagtgatttacaagatgaaaaaatgcttgaaattgaccatatttacccttattctagaagttttgatgattcttacatgaataaagttttagtttttaccaggcaaaaccaagaaaaacttaataaaaccccctttgaagcctttggcaatgatagagtaaaatggcagaaaattgaagttttagcaaaacatttacctactaaaaagcaaaaaagaattttagataaaaattacaaagataaagagcaaaaagactttaaagatagaaatctaaacgatactcgctacatcgcaaggcttgttttaaactacactaaagattatttagattttttacctttaagcgatgatgaaaatacaaaattaaacgatacacaaaaaggctcaaaagtgcatgtagaagcaaaaagcggtatgctaacatcggctttaagacgcacttggggctttagcactaaggatagaaataaccatctccatcacgccatcgatgcagcaattattgcttatgcaaacaactctatcgtaaaggctttttcagattttaaaaaagagcaagaaaataacactgcagaactttatgcaaaaaaaattagtgaattagattataaaaacaaaaggaagttttttgagccttttagtggttttaggcaaaaggttttagataaaattgatgaaatttttgtctcaaaacctgagagaaaaaagccaagtggagctttacatgaagaaacatttagaaaagaagaagaattctatcaatcatacggcggaaaagaaggagttttaaaagccctagagcttggtaaaatccgcaaagtaaatgtaaaatcgttaacaatggcgatatgtttagagtggatatttttaaacacaaaaagacaaataaattttatgctgtgccaatttataccatggattttgctttaaaagtattaccaaataaagccgtggtgcaaggtaaagataaaaagtcaggtcttataaaagattggattttaatggatgaaaattatgagttttgcttttctttatacaaagatagtttgattttaattcaaactaaagatatgcaagagccagaacttgtttattatgaaaggctaaataactcaaatgctagcctaactgtttcaaaacacgataataaatttgaaacgctaagcaaaaatcaaaaaatattgtttaaaaatgcaaatgaaaaagaagtaatcgcaaaaagcataggaattcaaaatctaaaagtatttgaaaaatacatagtttcagtacttggagaagtgacaaaggctgagtttagacaaagagaaaattttaaaaaatgagttacgatgaagcttttaaaacactgcttattggctctaatgccaagctaaatttagagttaaatcatcttgtgattaagcaagatgaaaatatagccaaattgtttttaaaagatataaacatcatcgttttagaaagcttgcaagcaagccttagttccgcactttttaacgcttttgcaaagcataaaatcatcttgctaacctgcgatgaaactcatagtataaatggtgtttttactcctttttagtgcattttcaaagtgcaaaaatcgcaaaagagcaaatgaatgttagtgctcaaaaaaaggctattttatggcaaaaaatcattaaaaataaaatcctaaatcaagcctttgttttgaaaaaacacaataaaatagagcaaagcaatgagcttataaatttggccaaaaaagttaagcttaaatgatagtaaaaatattgaagctgttgcggcggtgttgtattttaaaactttgtttggtgcttctttttcaagagatgagctttgctttgaaaattctgctttaaattatggctatgcaatcattagagcttgtattattagagcagtttgcataagtgggcttttgccttggcttggtataaagcatgataatatttataattcttttgcactttgtgatgatttgatagaagtgtttagggctagtgttgatgattgtgttttagaacttgtgggtgaaagtgagtttttaagcaaagatgacaaagagccttaattagcaatttacaaagcaaaatcaattttgatgggcaaaattatcctttaaatagagcgataaatcattatgtggcaaattttaaaaatgctttattgtatgaagatgaactaaagatagtgaaatttgatgattgaagataaatttatgcgtgtgcttttgatgtttgatgtgcccactaaaagtaaaaaagagcaaaaactagcaagtaaatttagaaacaatcttataaaattaggttattttatgctgcaatttagcgtttatatgcgtatttgcaagggtttaagttctgcaaaaagttctattgaaaatgtaaaaaagattttgcccccttatggaaatgtaagggctttaatcatcactgaaaagcaatttgataaaatggagcttttgcttggtggcatagtttttaacgaaaaagttaataatgaaactaatttaacgctttttgatatagatagtcatggagaatttaaatacaaaaattcaaataatgaagaaattcaaataaacaaaaaacaagaaaaatatcatcagcaaaatttatttgaattttaaaagcggttttaggggattgtaaccccgcagagtcccgcaaactctttattttagtccctttttaaatttcttatgagattatagcataatttttgctatttttatcaaaaaaccctgaaattttcattatctggtaattatctattttaccataaagaaatttaaaaagggattaaaaactctagtggattgaaactccgctagggctaattactccactaaaaggaggttgcaaatttgaaacttattgaaatttagggttgattaaaatcaaaataaaattatttaaataatttttaaggcataaagataatatccactaagctttcattttctaaaatttcacattcttttggcactaccataagagcggctttattgttaagattgtttataatcgcactagatccttcttttttgccttcaagattggctaaaatgcgtccatttttaaattccacattacaagcgacaaattccaaataaggtgtttttttcttgtagcttccttgtaaaaaggctttgcaaatatagtctttaggctgaagtaaccaagagtttaaaatctctcttgcgtaaagattaaacattaccatagctgagtaaggaaaacctggtaaggcgataatgaatttttcattagccttagctattttgatatgtctacctggttttatgtcagctttatcgatgatgatttcgtattctttgatggctttttttaaaaagtcaaaatcccccatagaaactccgcctgttgtaatcaaaatatcacaactttgcaaagcgctttcaagggtggaaaaagtggctttttcatcatcttttacaagaggaaaaacccttgtatcgcaatttaaatttttagctaaattagctatggcgatatgatttgaagagcggatttgagcaggattttctaaggcttctcctagatctttaatctcatttccactacttaaaacccctacaataggctttataaacacactaatgtgaaaaaatccaagctcagccaaaagagctatctcgctataatttaactttgtgccttttttgagtaaaatttcatcttttttatagttttctcctactgtacgcacagcaaaagtttggggaacttttttttctataaaaagagtatcattttctacgcgtacattttcaacagggactaaagtatcgcttccctcactcatgagtgagcctgtaaaggtttttacacaagtaccattttgcacgctaaattgtggcatagtgcccgcaggtgtgagacctaaaatttttaaaggcttatcttgatcttcaaatttgatcgcataaccatccatagccgaagttggaaattcgggctgatttttaggggcttttatgtcttgagctaaaatgcgtcctaaacactctgtaagagctattttttcaatattttcataagttttaatatgagagtgtaaaatttttaaactttcttcataagacattaacattttttatccttttaaaagtcctgcaccgcaaagtttggttgacctttctttgacataaattctttctttgtttatcacatcatacttccaaatgggtgcacttgctttaaaatcttcaacaaattcattaagaagtttaagtcctaattttctttgtttgcttaaaattcctgcaaaatacgagctttcatgtaccgctacatcgcctatggagtgagcaaaaagcaaggtaataccatcaaaatctactcttttttgccactcattaaaccatttttttaaaagcggttcataaatatcaaaactaagtgcctcaatgcctccttcttcacgcacaataccacaaaaagtcagcaaagcaccgcagtttttatccttggcaaattcataccattggctataaattttaggaatatccaaagaaccttgatagagtgtaaaatgtttcatttaacccccacaaactggtggtaaaagtgctattttatcaccatcttttaactcagtgttttcatcaaaaatgatttcatcgtttaaagatacggcacaaagttctagccattcttttaaactctcatctttttgcaaaatttcttttaattcttttaaattttttacctcaagttctaaattttctttatttatggggcctaaaaattccacttttaccattttattcctttacttctaaatttcccatcattcctaaatcttcatgttctaaaatatgacaatgatacattctaagccctttaaaatcttgtttcattctaagtcttaattcttcattaggacgcacatttatagtatctcttaaggctctaaattcagctttttgaacttttccattgagttttgatgagatgagttcaaattgcgtgccgtgtatgtggaaaggatgatccatgtgagatttgtttatcactatccagtcttcaactactccaagcttggagcttaaatcaatgcgttttaaattatagcttttgccattgattaaaaacatagacgcaagagcgatttttaattcgctttcattttttcccatcataccatgcatttgcataggatcttcactcatgattatttctttaaattccttaggttcttctaaaggtttgaaaatttttaaattttttggaagttctaatttttctttttttaggctaatatcagctaaaaatagggtattaggttcttcttttaccatcattttgtccctatcataataagcactttctagcctaaattccccatcttttggagcatcgattaaaacttctacgcgagaagcaggacttaagaaaagttcttctttataaatagctttttctataagtccgccatcagtaccaacaagtataaacttagctccttgtatgcgtaaatttaaatatcttgccgcagtagcattataaatgcgtatgcgttcgtttgtggcgagtttgattttaggtttaaattgtccattgatgagtacaaattctccttctctaccatttagccaatcatttaggttattgtttggaatttgagcgttttcatcaagacgcaaatcgctaatcatcaaatctttttcttttaaatgacttaaagcatctttttttgctttgatcacaaaagcccccgctaaacccataaaaacttgtttagaagcggtataatgggggtgcgggtgataccagtaagttcctgcgcaattttgtggtaaagtaaagcggtaaattctctctctccctgctagaataggatcatgaggattgccatcttgatcaggtggcactgggagcccgtgccaatgaatcgtggttggttctttgagtttatttttaacaagaatttctatagtatctccctcataaacttctattttaggtccagggataagatcattataggtatagaatttggttttaaaacctttaataatttctaattgactttctttaatttctatagtggctctaaaaaaatttttttctttgctttcatttttaagaagttttaaggcatttagattttgatgagctggaaattttttttcatctattaaattgacatttttgcttaattttataaagcttgtatctatatttgagggatttgttaaattcatagaatgcatgttatgcatattgtgagaatttgcagcataagctatacttgcactagcacctgttaaaatattaaattttaaaaattgtcttctattcattacttatcctttttgcttaggttttttgtaggttttttgattatattatttaaaatttacatgttagtaaatgttaaaatatgcattatgaaatatttttattaaggtaatgaaatgtttgattttgatgtgaaaactccagcttatattttagaagaagataaattaagaaaaaattgtgagcttttagcaaatgttggcgaaaaaagtggtgccaaagtgcttttagctttaaaaggttttgctttttcaggagcgatgaaaattgtcggagaatacctaaaaggttgtacttgtagcggactttgggaagcaaaatttgccaaagaatacatggataaagaaattcatacttattcacctgcttttaaagaagatgaaatcgatgaaatagccaatttatctcatcacatagtgtttaactctttagctcaatttcataaatttcaagttaaaacacaaaaaaattccttaggtcttcgttgtaatgttgaattttctctagccccaaaagaactttacaatccttgcggaagatactcaagacttggaattcgtgctaaagattttgaaaatgtggatttaagtaccatagaaggacttcattttcacgcactttgcgaggaaagtgctgatgctttagaagctgttttaaaggtttttgaagagaaatttggcaaatggatagggcaaatgaaatgggtgaattttggaggaggacatcacatcaccaaaaaaggctatgatgttgaaaaacttattgctttgtgtaaaaatttcagtgataaatatggcgtacaagtttatcttgaaccaggtgaagcagtaggttggcaaacaggaaatttggtggctagtgtagtagatatcatagaaaatgaaaagcaaattgtcattttggatacttcaagcgaagcacatatgccagatactatcatcatgccttatacaagcgaagttttaaatgctagaattttagccacaagagaaaatgaaaaaatttcagacttaaaagaaaacgaattttcctatttgcttactggaaatacttgtttagcgggtgatataatgggagaatatgcctttgataaaaagcttaaaatcggcgataaaattatttttttagatcaaattcattataccattgtgaaaaacacaacttttaatggcataagacttccaaatctcatgcttttagaccgtaaaaatgaacttcaaatgataagagaattttcttataaggattattctttaagaaattagtattattctataatttgcataaaatgttaattttacttgaaaaagaatcaaagacataaattttaagcaaagtattttattttttcaaatataaaatcaactcaaatatctaattttcaatactttagtatgattttttaagattttaaatccttgtggaattttattgaaattcagtgatttttaaattaaatagtattaagataaatcgatttaaaaatcggctttaaaatgaatattaggtatattttgcataatattcatttgaacaaaatttaaagctatttttgaaaattttgaatgcatgagggctttaatggatttggaaaaattaagattagctagaagtctttattatcaatgtctaggagagctttttgttttttcattttctgaagaaagattgtcaagattacaagaatatttaaagacaatgcaagaatgtttatttgatgaaaatttaaaatcaaattttgatatcttgcttaagcatttagatgatgaaaattctatacaagcattttttaaagaatacgatttgctttttttaagtcttaaaaacagcattccaacgactttttcttatatagaagaaggttttgaaaattcaaatcctttactttgcgtgcgtcaaattttagtcaaaagcaaaataagacgcaatgaaaaattttttaaagaaagtgaagatagtgttggattttgtttattgttaatgagtgaatttttaaggcaaaatgaagatgatttagccaaagagctttttgaaaaagcgattaataaaagcattgatgagtttttaggcgatgttttcatgaataaaaatgcgaatttatataaggaaattgcaagtattgcatcggcttttatggaatttgaaagactttgctttgaagttgaaaaacctgcaaaaataaattctaaaaaagtgcaaaacgatctatcgcgttcagaatttttaagaagagaagcaaataaacaaaggaggactcgtgaaaaatcgcagggaatttcttaaaaaatccgcttttgccttaggggctgccggagtgcttggtagcgcgactttagctctagctaaagatgaggaaagaaaagatttgattaaaggtaaaagtaagaaaaaagaagtgctttttcaaagaagtgctaattgggaaaattattatataaaggctgagtaatgtcaagtgtaggtgaaaatatcaagcttacgcgtcgttcttttcttaaaatggcggcactttcaagcctagcaacaccgttgcttgctagaagtgaaactttaagagaagcgagtgctgatgagcttaaagaagcttatgaaggtagtaaaaaagtaaaaacagtttgtacagcctgttctgtaggctgtgggattattgcagaagtgcaaaatggtgtttgggtgcgtcaagaaatcgctcaagatcatcctgtgagttcaggtggacattgctgcaagggatctgatatgatcgatatggtgcgttcacatgtgcgtttaaaatatcctatgaaaaaagaaaatggagaatggaaacgcataagttatgagcaagctttaagtgagatcggagaaaaactagctgcttatcgtaaagaaaatcctgaaagtgttatgtttttaggttctgcaaaaatgagcaatgaacaagcttattatgtgcgtaaatttgcagccttttttggcaccaacaatgtagatcatcaagctagaatttgacacagcgcaacagtcgccggtgtggcgaatacatttggttatggcgctatgacaaaccatcttggagacattcaaagaagtaaatgtatcattatcattggggcaaatccagcggtaaatcatcctgtgggttttagacatttcttaaaagcaaaagaaaaaggtgcaaagcttatcgttgtagatcctagatttacaaaaagtgcagctaaagcggatatttatgcaagaattcgtccaggaactgacattgctttcatgtatggaatgctaaaaattatctttgatgaaggtttagaagatacaaaatatcttgatgaaagagtttttggaatcgataaaattcgtgaagaagcagcaaaatggacggccgaagaagtagaaaatgttacaggaatttctaaagaacttttagtacaaatcactcacgaagtagctaaaaacaaaccaactacgcttatttgggctatgggtttaactcaacacactgtaggaacttcaaatacgcgtttagcacctattgtgcaaatggtacttggaaatataggtaaatttggtggtggagttaatatcttacgcggacacgataatgttcaaggtgcttcagatatggcttgtttgagcgaaaatttacctggttattatcctttaaatgaagcgacttggagatactatgccaaaatttggggtgtggattatgagtggcttttgggaaattttgtaagtaaagattggatgcataaaaccggactttcacttgctagatggtgggcagcagctttaaatggtaaagatggaaatgatgctatcgataatgcaggaacgcctttaaaagctttagtagttatgggaaatggtatcacttcgactgcacaacaagtaaaagttaaagaaggtttggaagctttagagcttttagttttggctgatccttttgtgaatgaagcaggcattatcgcagaaagaaaagatggaatttatcttttacctgcagcaacacagtttgaaacaagcggaagtgtaacagcaacaaatcgtagcgggcaatggagatttaaagttgtagatcctttatatgaaagcaaagaagatcaagaaattttatttgagcttgctaaaaaattaggtttttatgaagactttaccaagactttacgcgatgaaaaaggtgagatcgtttggcctgaaaatgcaacaagagaaattgcaaaagcagtcagaagtataggacttaatggttggagtcctgaaaggcttaaaaagcatactttatactgggataaatttgatgaggtaactttagaaggaaaagacgaagttgcaggtgaatattacggacttccttggccttgttggagtgataaacatccaggttctcctgtgctttacaatactgatattgaagtagcaaaaggtggtatgggctttagaaataattttggacttgaatatgaaggtgaaagtttattagctaaaaatgcacctttaaattctcctattaatacaggctatccacaaataaccaaagataatatagaaaaagttttaggtatcaccttaagtgcagaggaaaaagctaaaatgggctctacttggtcttatga

SEQ ID NO: 4045 - DNA, 22010 bp, synthetic construct
  source 1..22010: mol_type = other DNA
  misc_feature 1..22010: note = Synthetic
gaaaatttagaaaaaagcattgaaagtaatgcaaaatataattaccatacttccttaatattttttagagtaaaagaagaaattcttgagcaaacttatactcaaaaagaaaaaaatgcttttttaaaaggtgtgtgtagaatttttagtaaaaatgtctcttcaagcgatatagtagcccattgtggaaataatatttttgctatgatgatttctcatacaaatttagaaaaagcacaagaaatatgtaataaaattttagaatctttagaaaattcaaattttttcctaacagataaagaaatagatgtagatgttgaagtggctataagtgctattaatcaagatagcaagggtgaagaattaatagaaaaatgcattgaagctttaaaagattcaggaaaaaatttagaaccctttataatagtggaaaaagaaaaatgataagaaagataattacctatcccaatccaagattatttttagagtcaaaaaaagtagaaaattttgataaagatttgcatatacttttagatgatatgtatgaaacaatgatagctaataagggtgtaggcttagctgctattcaagttgatgtgccaattagagctttgcttgtagatattggtgatgaagaaggtgagcaaaaagaagataaacaaactcttttagaaattattaatcctattataacacctttagatgatgaaaaaatttcttgcaatgaaggttgtttaagcataccaggtttttatgaagatgtaatgcgttataaaaatatacaacttgattatcaagataggtttggaaaaccacaaagtttgcaagcacatgattttttagcagtggctattcaacatgaagttgatcatcttgatggacatttgtttatagaaaaactttcttttttaaaacgccaaaaatttgataaagactttaagaaaaaatccaaaaagaacaaatgaaaaaactaaaatgtgcaagtttttctacagagcttgatattatcgatgtagaatcaactttcacaagaggtttgccaggttttagtatagtgggtcttgcaaattctaccattaaagaaagtacagaaagagttaaggcaactttactaagtcgaaatttcaatttcccagcacaaaaaatcactatcaatcttagtccatcagatatccctaaaaatggctctcattttgatttggctattgcgattttgattttatttcaaaaagaaaatttagatgacttttttgtttttggagaacttggtttagatgggagtattaaaagtactgctagtttattttctatcttgctttttttaagtgcaaaagtacaaaatgccaaagtagtagtaccaaaagctattgcacaaaaagcttcgatgatacctaacttaacaatctatgctttggaaaatttagctcaagctatggatttttttaaagaaaaaaattatgagaattatcatataaataatgcccatcctttgtttgaaaatgccatagaaattaataatcaaaaatatataaaaaattctatttatccttatgattttaaagaagttaagggtcaagaaaatgctaaatttgcttgtataatagcagctttgggtatgcataatgttttatttgaaggtagtccaggtagtggtaaaagtatgtgtgctaaaagacttcctttcatcatgccaccacaaagtttgaaagaaattttagctcaaaatgcctataaatcattaaattctttagacgatgattttagtgctagtagggtttttagaagtcctcatcatacaagtactagggctagtatttttggtggaggaacaaaaaatgccaagataggagaaatagcacttgcaaatggaggagttttgttttttgatgagttcccccatttttcaaaacaaattatagaaagtttaagagagccgctagaggattttaaaattcttatttcaagagttaataccaaagtgatttatgaaactaaatttttatttgcttgtgcgcaaaatccttgcccttgtggaaatttattttctaaaagtcttgcatgtcgttgccaagagatagaaattaaaaaatataaaaataaaatttcatctcctattttagacagaattgatctttatgtagctatggatgagatttcgcatgaagataaaacaagtttaagctctgaacagatgggtgaaatggtttttaaaggatttttatttcaaaagcaaagaaaacaagaagaatttaatgctaaattaaatgatgagcagctgaaacaattttgtattttagattctactgcgaatgaaattttacaaaaggctataaattcatataatctttctcaaagaggggtaaataaaaccataaaagtagcaagaaccattgcagatttagagcaaagtgagttgatcttaaaaactcatattttaaaagcattaagttttagaatgagaactacataggagaaaaaatggataacaaaagtgtggcgatctttattgatgcagaaaatattccttcaaaatatgcaaaatctatttttgatatcgcttctgattatggagaaatcgttataaaacgaatttatggagattggacacaaaaaaatatacaaaattggaaagaacaaatcgcacaatattctatcatcgctatgcaacaatttaattttatagctaataaaaactcaagtgatatgtacttaatcactgagattatgagttttttttatgaaaaagatattgatatttttgtcattgtttcaagtgatagtgattatactagtttaatccaaaggcttaaagagggcaaaaagcaagttataggtatgggtttaaaacaagctgtaaaatcttatgtgaattcttttagtgaatttttttatttagatcaagatgaatctaaagaaaaagtattaagcactaaagaatatatcaaagatttaatcaatatcacagaagccttaatagaagaaaaaggccgtgctgaatatgctcaaattcgcaccaatatgaatagaaagcacgcaaattttatccctcaaaattttggttttaaaaattttagagcattagtaaaagagtttttaccacaaatgaaacaatttaaagaaggtaatgaaaaaaatatttattttcttattgaaaaaataaaggcttaaaatggaaaatatcttgatagcctttttagctgttgtaattttagcttttatatggtatgtgtttaaaagccaaaaagaaaaagcaaaattggagtttttaaaccaaagtaatatagccttgcaaaatcaacttgctaatttagagcttgaaaaaactacactcatggaaaaaaattccaaacttttagatgaaaaaatattatatttatctaaaaatgaggctttagaagcaaaattagctcaaaaagaacaaactcagcaagaacttttaaatatacatttaaaagagcgtgcgaatttaaaagaagaatatactcaaactttaataaaactagaagaaaaatacaaacaaggtttagtagaattaaaacaagaattagaacaaaatttacaaaaacaaaatgctaatattttaagccaaaacaaacttatgcttaatgaggatacaaaaaaaatcttagaagaaattttcttgcctgtgaaaaaaagtgttaaagaatacaatgaaagactaaattcaaatgaagttagtcttaaaactcatattgataatatgtttaaatttagccaaaatatgacagaaaatgcagataggttagctaaaattttaaagggtgataaaaaaattcgtggtaattttgcagaattgcaactaaaatcagttttagaaaatagtggcttagtagagggtgtgcagtataaattgcaagagagatttcaagatgagggtaaaacctatattcctgatgcggttgtgtttttagataaacaaaaaagtataatcatagatgcaaaattttctttgccaagtgattttacttttgaagatattagtcaaaatacctgtcttgatttagcttataatctaaaatcaaggattgatgagttaaccaaaaagccttatatgcagtatgataaacacacttatgagtttgttttgctttttataccttatcaaaatatcttagatttgattttaaatgtagatcttgaaatttatcaatacgcttacaaaaaaaaggtttatttaactacgccaaatactctttttatggcactaaatacgataaatatttcatggaaaaatatacaaagtaatgaaaatatcctaaaagcttttgatgagcttggcaaatttcatgataaatttgcaggtgttttagatgattttgaaaaaatcaaagaaaacattaaaagattaaactcaaatgtagataatatgcaaacaaaacttactcatggaagtggaaatatcgcttcaagagtgataaagcttaaagagctaggcgctaaaacccaaaagcttataaaatgtgagatgagcgatgaaagcagtatttaaagataatgtttcttatgaaaaagagcttgttgaaaaaggtttggatgagtttttaatgatggaaaatgcaggtatagaacttgcaaatttgattaagaaaaaaagcaaaaacataaaaaatgctaaaattttatttttgcttggtactggtggaaatggagctgatgggcttgtggctattagacacttaaaaaaagcttttgcttatgttatgccatataaaaaaagtacaatgtttatcaagcaagagcaaattttgaaaaatgtaggttttaattttttaaaaaaagaacctaaatttaaagattttgacatcatagttgattgtgtttttggaagtggtttaaataaagctttagatgaaaatttacaaagaatttttaaaaaaattactaaaagtaaggctttaaaaatagcttgtgatattcctagtgggcttggacaagagccatgttttaaggctgattacactctttgcatgggagtgattaaagaaattttgctagaagattttgcaaaagaatttgtaggtaaaattaaaattgcgaatttgggtttaaaaccttatatgcaaaatacttcgagttttttactagaaaaaaaagatttaaaactcattacaaaaaagattaactcaaataaaggtgattttggccatgtttatatttttgccaataaaagcgcaggtactctagctggacttggtgctttagagtttggagcggggcttgtatctttagtggctaaagaaagcttttcgcctttgattatgttaaaagatgatattgaaggtaaaataaatgcagctgctataggtatgggacttgataatttaagtattttaaaagatgaaagattaaaaaacattcctttagtcttagatgcaaattgctttcaaagtgaaaatttgctttcatatcttaatagagaagatgttgttttaacccctcatcctaaagagttttctatgcttttaaaactttgttttaatgaggatgtaagtgtagaagaaattcaaaacaatcgctttttttatgcaagaaaatttagttttaaattccaatgtgttttggtgttaaaaggggccaatcccatcatcgctcaaagagaaaaactttttgtagtaaattgtggcaatgaagctttggcaaaaggtggaagtggggatgtgctaagtggtatgatagcagctttacttggagctaaatttaatgctttagaggctgctaaaaatgcggtattagcccatgctttggtggctaaaaattataagaaaaataaaattagttttgatgctttaaaattaataaaggggttaaaatgcttataaaattagcagttttatttagtggtaatggaagtaatttggaaaatattttagaaaaattacataaaaaaacctttggtaaaaatacctttgaagtggttttgtgtgtatgcaataaaaaagaagcttatggtatacaaagagctttaaaatatggtcttgataccaagatcatagaacatgaaaaatttacttcaagagaagaatttgacgcagaattagtaaaaattataaaagaaagtcaagtagatttgactatcctagcaggatttatgcgaattttaagtcctgttttcactcaaaatataaaggctattaatcttcatccttctttgcttcctttattcaaaggcgctcatgctatcaaagaaagctatgaaagtgatatgaaagtagcaggcattagcgtgcattgggttaatgaagaacttgatggtggtaaaatcattgctcaaaaagcttttgagaaggctaagttaaactttgaagagtttgaagataaaattcatcagctcgaacatacacttttacctgaaaccattgtaaaaatttttgaaaatgattaatttttcatcattataattacgcttttgtttaaggaaggtaaatgtttgaatggatttttagtgtagatgcttgggtggtattacttactcttacagctttggagattgtactaggtattgataatatcatttttctagcgattttagtttctaaattaccaccagaacatagagataagggtagaattttaggtcttgcttttgcgatgattactagaattttattgttattgtctttattttgggtgatgaaacttgtcacacctttatttagcatattaggcaatgaaatttcaggtagggatttggtgcttttacttggagggttgtttttaatagttaagtcaattaaggaaatcaaagaaagtataatgcaccaagaggaaagccaaagcaatataaaaattagcaataaactttgggttgtagtagctgaaatagccgtgatagacatagtattttctcttgatagtgttattactgctgtgggcattgctcaagatatagaaattatgattattgctgttattgttgcagttttagttatgctttttgcttctaaaccaattgcagattttgtagaaaaatatccaagtattaaaatcttagctttagcatttttagtaatgataggctttgttttagtatgtgaaagttttgatattcatatagataaagcatatatttatatagctatggctttttctttgatagttgaaattttaaacatcatttcacaaaaaaaacaaacaaataattcttaaaatatttagcattttttatgctaaatatttttttatcttgacttttaatatttttttatgtagaataacgctttatttttgtacatcggggtgtagcgcagtctggttagcgcacttggtttgggaccaaggggccgaaggttcgaatcctttcaccccgaccatttttataaatggtgagtgtagctcagtcggttagagcatcagattgtggtcctgagggtcgtgggttcgattcccatcactcaccccatcagcgctcgtagctcaactggatagagcgacagacttcggatctgtaggttatgggttcgattcctatcgggcgcaccataagcctattgttactttatttttatgcgctcatagctcagctggatagagcaacggccttctaagccgtaggtcagaggttcgaatcctcttgagcgtaccacttttgcggatgtggtgaaattggcagacacgccagacttaggatctggtgcagcaatgcgtgaaggttcaagtcctttcatccgcaccaccatgctttaaagctactttctaaaatttttaaaaaactcagggagcggttttggtagcggtttttttctcaaaaattaatttttaatactccatattaaaataatataattcatcattataatctaaaaaagaaattcatttttataaaaatatttaaaaaaagaataaaataaaaaatacattttacttttttatattcaatttgctaattcattctctatttctttttttattataaagaagacagtataaactaaatacattataatttatttattttattcataaggcttaaaattagttaaaccattaaaacatatgaaattttataattattagtattggtaaaataatggtttctcagctttttaggttttttgcttttagggttaagcaaatattattttatacacttcttaatctttttatcaaaaatataaaaaaatattttaatttaaaattattataaaattatattacttagtatttttaagcttgcgattagctggagctgtgatccttttatgattttaataaattataaggaggtaatcatgattgatattaaaataaaaattaatctgattttatcttttttgttttgtgtaaaaataaaatttattttagttggatcgctagcttaaaaatactctcattttttcttaaaatatatcttcattttattaaagttataaaaaaatatccaaaaaaatccaagttaattttttcaaaaaatcttacctttttttgttttgatgaaaagtctagtaaaatggaaattttaagctgtattttaaagctttatttttggaattttacagattaaaatttataaaaaaatagcccattttaagataatcactactccgtgctaagcagatatgccattttcgttacctttaatgtaaaaaagtatatatttcgtatatttttccgcaatataaaaataattcactacttcatacttatgtagatatatcattttcattacctttagcctaaaaagtatatatttcgtatattttgataaatttttggtgtattttttatggattttaataaaatttgttatttttgtaaaaaataatcgtacacctatacattacttcgtaagtatatattatatgttttcgttacctttagtgtttttttttgagatttgctgtgtttttttaaaaaatgaaaatgttatgattttataatttttgtatgataaaatattataaatttttgttaaaaaaaggcaagttattctgtgtttaaaaatatatttttcaaaaaaactgtattagctgataatcctaaagatgagataaaactagatgaaactcctacgcaaaacaaaagtgatagattagaaaaaataattcacacttgggtagtaaattgcactaaatattctttaaaaaatccttatgatacaagacgcattaacagaaaaaatggctgtatcaaatttgtcttaagaatctttaaagaaactaaaaatgaaggtgctttaattggcattagctcttcactttatgataaatataaaaatctttataaatcaaaactcgctagagtaaagcaatcaagtaaaataaaaagcttacaagaaaaatatcctgatttagatattatcaatgcctataaatatgccatattaagcaataaatgcgctttattaaatgaagatattgaagactttgaaaatattataaagattttattgcaattaaataccgctaaaaacaaacaaaaataagcttaaaatcaaaaatctactataaagcaatatcaacatagtattaaataattaaaatcgatttatgagcttgttttgttagattatgtcaaggaagtggtgttttagttattatttgtgtaattttggcaagctcgaacggatcttacttgccgtgacgatcgtgtattatagcaattttatttttaaaaatccacatagtatatctatctataatatttagcactttttactatcttttttttaaaacatattgcaatggagttttataatttaaggctaaatgtgacaagaagtattgcaaactactagccacttagacatatcttgcattaaatcctttaagatctgtaaaaaaataaatctttataataattagaaatcttcttttaaacttctattttctttcaaatttgcttcattgcaaatttattgtttatcttttatcaaaacgttttctcacaaaaataataataattttatttgtttttagtgtttttttacattattttttgtaaatttataataaaacataaatgcttgtttaaggattaaaagatgaaagttataggttttgatataggaattaattctataggctgggcttttgtagaaaacgatgagttaaaagattgcggagttaggatatttacaaaagctgaaaatccgaaaaataaggaatctttagccttgcctagacgcaatgcaagaagttctagaaaacgccttaaaagaagaaagttgagattaattgctataaagcatattcttgcaaaagaattaaaattaaactacaaagattatatagcaaacgatggagatctgccaaaagcttacgaaggaaagctaacaagcatttatgaactaagatataaagcattgactcagaaattagaagctaaagatttagcaagagtgattttgcatatagcaaaacatcgtggctacatgaacaaaaacgaaaaaaaatcaaacgacgttgaaaaaggaaaaattctaagtgctttaaaaaataatgctttgaaattagaaaattatcaaagcgttggagaatatttttataaagaatttttccaaaaatataaagaaaacactaaaaatttcatcaagattcgcaataccaaagataattacaataattgtattttagcaagtgatttagaaaaagaactaaagcttatcttagaaaaacaaaaagaattcggctataactatagtgaagattttataaatgagattcttaaagttgcattttttcaaagacctttaaaagatttttcacatttagtaggagcttgtactttttttgaggaagaaaagcgagcttgcaaaaattcatatagtacttgggagttcgtggctttaactaagattattaacgaaataaaaagcttggaaaaaataagcggagagattgtatcaactcaaataatagatgaagttttaaatctcattttagataaaggaagtattacatataaaaaatttagatcttgtattaatttgcatgaaagtattagttttaaaagtcttaaatatgataaagaaaatgctgaaaatgcaaaattaattgattttagaaagttagtagaatttaaaaaagctttaggggaacactctcttagtagacaagagttagatcaaatatctacgcatattactttaataaaagataatgttaagcttaaaactgctttagaaaaatataatttaagcaatgagcaaatcaataatttactcgaaattgaatttaatgattatattaatctcagttttaaagcacttaatatgatacttcctttgatgagagagggaaaaagatatgatgaagcatgcgagattgcaaatttaaaaccaaaaacaaccaaccaaaaacatgatttccttccagctttttgcaatagtatatttgtacatgagcttagcaaccctattgttaatagagctataagtgagtatagaaaggtcttaaatgctttgcttaaaaaatatggcaaagtacataaaattcatttagaattagcaagagatgtaggacttagcaagaaagcaagagaaaaaatagaaaaagaacaaaaagaaaatcaatcaatcaatgcttgggctttaaatgagtgtgaaaacatgggacttaaggtaaatgctaaaaatattttaaaattaaaattatggaaagaacaaaaagaaatttgtatttatagtggcaataaaatatccatagaacatttaaaagatgaaaaagccttagaggttgatcatatatatccttactcaagaagttttgatgattcattcatgaacaaggttttggtttttaccaaagaaaatcaagaaaaacttaataaaacaccttttgaagcttttggaaaaaatatagaaaaatggaataaaattcaaacattagctcaaaatcttccttataaaaagaaaaataaaattttagatgaaaatttcaaagataaacaacaacaagattttattgatagaaatttaaatgacacaagatatattgcaactttaataactaaatatacaaaagaatatttaaatttttttacctttaaatgaaaatgaaaatataaatttaaaaagtggggaaaaaggaagtaaaatccacgttcaaactgtcaatggtatgctcacatctgttttaagacacacttggggttttgataaaaaagatagaaataatcatcttcatcatgcacttgatgctgttatagttgcttatagtacaaactcaatcataaaagctttttcagattttaagaaaaatcaagagcttctaaaagcaagattttacgctaaagagcttacaagtgataattataaacatcaagttaaattttttgaaccttttgaagggtttagagaaaaaattttaagcaaaatcaataaaatatttgtttcaaaaccacctagaaaaagagcaagaggtgctttgcataaagaaactttttattctgaagatgaaatgattaaaaaatataattctaaagaaggtttaaatatagcattaggctgtggaaaaataaggaaaataggtacaaaatatgttgaaaatgatactatggtaagggttgatatcttcaaaaaacaaaacaaattttatgctatacctatttatactatggattttgccttaggaattttgccaaataaaatagtggtcattggtaaagataaaaataacaatccaaagcaatggcaagaaatagacggaagttatgaattttgtttttctttgtataaaaatgatttaattctgttacagaaaaaagatatgcaagaagctgaatttgcttattataacggttttggtatcagtacatctagtatttgtgttgaaaaacacgataataaatttgaaaatttaacacctaatcaaaaattattattttctaatgcaaaagaaggaagtgttaaggttgaaaatttagggattcaaaatttaaaagtatttgaaaaatacattataacccctcttggagataaaataaaagcagattttcaaccaagagaaaatattgctttaaaatcaagtaaaaaaaatggcttatgatgaagcttttaaaagcgtattgatcgcaaatcaagcaaagctaagtcttgaattaaatcatcttgtaataaaacaagatgataaagaagctagaatttttctaaaagatattaattttgttatattagaatctttacaggcaagtattacttcaagtttgcttagcgctttagctaaatacaaaattatacttttaacttgtgatgaatcccataatataaatggaattttttctccatttttgggacattttataagtgcaaaagtagctaaaaaacaaattgcggtaagtttgcaaagaaaagcaattttatggcaaaagattattaaaaacaaaatttcaaatcaagcttatattttaaaaattaccaatcattccaaagaatccaaagaacttttaaatatggctaagaatgtaaatttaaacgactctaaaaacttagaatcaactgcagctgctttatattttaaaactttatttggtaaagattttacaagaaatgatatatgttttataaattcaggattaaactatggctatgctattataaggtcgcttatcgttagggctgtttgtataagtgggcttttgccgtggcagggtataaaacacgataatatttataatgattttaatctttgtgatgatttgatagaagtttttagaccattgattgatttgtgtgtatttaagctaaaagatacaaaagatagtgaatttttagacaaggaaacaaagcaaaaattaattggtattttgcaagaagaagtggtttttgaaaataaatcttatcctttaaatagagctataaatttttacgtgcaaaattttaaaaatgctttattagaagatgatgagctgatgatggtaaatttatatgatagaagataaatttatgagagttttattgatgtttgatatgcccacaaaaagtaaaaaggatcaaaaaaacgcaaataaatttagaaactcattgataaagcttggatttttcatgatgcaatttagtgtgtatgtgaaaatttgtaaaggatcagtttcgacaaaaacaacgataaaatcgatagagaaaattttaccaccttatggaaatataagagttttaaccataacagaaaaacaatttgataatatgcaaattcttttaggcggagcttcttttaatgaaaaaataaatgatgataaaaatctagttttatttgaatatgatgaaaaaactcaagattttaaatatagtaatgaaaaaacaaataaagaaaggaaaaaaaccaagtttatacaacctagtttatttgaattttaatggttttaaagggattgcaaccctgcgtggataaccaaaaaccacttattttagtctctttttaaatttctctagcaagaattatagcatattttaggtttttttctatagaaaaaaaacctagttttctttatttgataaagatctattttatcataaagaaatttaaaaagagactaaaactacgtgaatgttaataatgtgatatctaaattttatcataaagaaatttaaaaagagactaaaactgatagcaatgatgatactatatttattgtattttatcataaagaaatttaaaaagagactaaaactaaatactttcataggtatataaaaaatcaattttatcataaagaaatttaaaaagagactaaaactacatggaaagtatagtaagtaatacctttattttatcataaagaaatttaaaaagagactaaaactggctgatgaaacattaaaagaggcgatgaattttatcataaagaaatttaaaaagagactaaaactaggctataatgttatttttcaaacaactcattttatcataaagaaatttaaaaagagactaaaacaataagtgctgatactgcttttagtaaaagattttatcataaagaaatttaaaaagagactaaaacttctattgctcgtgctatattctcatctttattttatcataaagaaatttaaaaagagactaaaaccaaatcatagcaaaccctgcattctttctaattttatcataaagaaatttaaaaagagactaaaacttatggaaatgataagaactcacaaacaagattttatcataaagaaatttaaaaagagactaaaacgaaaagaattacagcctagcaatgaaccttattttatcataaagaaatttaaaaagagactaaaacctctgttagcgtagctccattaatgtatttattttatcataaagaaatttaaaaagagactaaaacttgtttcctatatcgtatttgtcgtataaaattttatcataaagaaatttaaaaagagactaaaactggcatttcaagtatgtaatttaatgcacaattttatcataaagaaatttaaaaagagactaaaacaaacatacaactaagcttaaattttattgtattttatcataaagaaatttaaaaagagactaaaaccatatacaaattaatcaataatatctaaaattggttttttctttagccaaaacaatttaaatatttatgagtaagttttttgtcttttttacaattttggtttaatttatataattgatcttcctcaaatttatcatttattcctgcttcagcaagttctaactgttctttgtgaaattcttcatcatctttaaaagcttcaaaactttttatccataatgcttttctctgttttatatattcttcgtttttaaacatacctatccttttgttttattatttaattttgcttatttaatttttccaagataatttcaaaagaaatttcgcttgcactcattaaaaatcctaagctaataatataaagaatatatcaaaaattaactttgtaacttataaatataaaagttttgtatttttattttatgtaattataaatagatattatattacactaaggaaagcatgagtgtgttttatttatcgtgagctaaaaatttacaaaatcaataatttttaaactattataaaactacttacaccgttcaatattttaaaataaacaacttgtggaaaatttaaatatgatgaaattttaatttagataaaaaataaaatacaataggatacttttttacttcaaatatatggtcttaagataatttaaataaaattttgtcgatttattaaattattacagaactatagtaaaaatttaagtttttgaaatattataattaaataatataaaaaatttattggctaaaaattttggaaatgcgacatgaaaaaaataaaagaaaaattaacaagcttttttatgaaatttattttctatttaaaaatatctaacattaacaatcaaaaagcaaagcaatataaattttcaattccgtgcaatgatatagatagtgacgaaatagaaacattaaaatatgcgattgacaaaaaagatgtaaaaaatatagcgatctatggagaatatggtgcaggaaaaaccagtcttgtaaaatcttttgaaaataaatattcaaacaaaaaactgagtagtcgtttaggtgggtataaaattttagacatttccttagcatcatttggaaatataaatagcgaaacagaaacaatagaaaaaataatattagaacagatattttatagagttgaaaaatccaaaattcctttatctaaattcaaaagaataactaaagtaactcatacaaaaacccttttaatttttatatctttttcttttttggtattttcttatttttttatgtttaacgaatattttaaaaaaattttagagtgtaattttgatatatcaaattataatactcatattatatattttttgtgtgttatagatttttctattttatatttttatttttttaatatattatcaataattaaaaatagtgctataaataaaattactggtaaagatattgaaatttctcaaattgatgaaaaatccttactaaataaatatttagatgagattttatatttttttgaaaaaaataaatttcaaatagttgtttttcaagacttagatagatttaaaaaaattgatatttttacaaaacttagacaattgaattattttttaaataattatgatggtataaaatacaagataacttttttatatgcaattagaccttccatattaaaagatattgaagaaagaactaaattttttgactttattttgataaaaataccatatataaactcccataattcaaaagaaaaattaatacaatattttaaagaagctaaaatacttataaataatgacttattaaaatatatttctttgtatacttataacataagaataataaatcacatatataatgaatttttattctacagagacaccattcacattcatcaagacagtgagttagaaaatacaaagctttttgctttgcttgtgtataaatttttcaatgtagaagaattttcaaaattagaaaaaagtgaaggcgatttgtataatatattaaattctaaaagcaaatacattaatttgaaaaaagataaattattattggaattgaataaaataaaaagccattacatagaagaaatatttcatactaccaagtattcttatattgatatagatgatactagacattcgaatagtaattcgattagtgatgatttgtttattgatattgttgaaaataataaagaaatatatgctattgattattatagcaataaagttagggtaatcacatcagaattaaatgaaaaatataaaacagaaattaataaaataaaaaaagctaaagatgaactatccaatacttcaataaaagatttatatgactatattgattttaaaaatattgagaaaaacaattatgcagatatgataaaatattttatcaagcaaggttatatagatgaagattataaacaatatatgtcaaattttacatatcacaatctaacagataatgatagagaatttgtttttagcattaaacacagaaaagagaatttggggtttgactatgacctttctaatatagatgaaattttagataatttaaaactagacgatctaacccataattccatgttaaatatacagttctttttacatattattaaaaatcataaaaaatatagtcgagaatttaatattttttataagtttttgcaaaataccaatcctttggaattttacaaaattttattagataaaaattgtaaagatgtaattaattatatgattgaaaatattaatgatttttggggagtaattgaaaattttaaggagaaagaaaaatatttaaaagatattattagaatggcctcaaaaactaatctaaatgtaatttttgaaaataaaaatatgcaaatttatttttctgaaatatattcattatcatttatagatctaaaagacaaagaagtttccaaaaatattattgatattattaaaaaatttaaaatcaaatttaaaaagttaagtgataataaaatacatttcgaactatatcaatatattattaaaaacaatagttatgaaataaatattgatcttttaaaaacattattttttgataagaatgagaataataagtttgataaaaaaaattacacattttttaaagaactagaaaataacgaaccattcaattatattaaagaaaatttaagtgaatacataaaaaatgtatttttaaaattagaaaataatatcaatgaaaatgaagagatagtaatagaacttataaataacaatatagatgaagtattaaagaaagaggtaattaaaaagcaagaatgtaaattttcttctcttgataacatcaataataaaaatttacaaaattttatagtggaacaaaataaactaatttgcaactttaaaaatataaattttttattagacttagggcttgattttaatttaatagttaatttttatatacaaaattcagagaatatggaaagtgatattttaatcaaatgctgtgaattgttgttatccagcaaaaacaagaattctaaattaatacaatttgcctataaaaaatttcaagataaaaagaattttaatgaagatataatcaaatatataattcaaaatcttgatagacttgatcaaaaaattaccttcttatataaaaaaatagatcatttaagcgatcaaaatatattatatattcttaatgatcttggtggtgaatatgctagtattgcacttttagatggaagacatacaaaaataatatgcaaggaatataatcaaaaacttttggataaactaaaagaaagacaacttataactaattatgaatgcgaaaatggattctataaaattagaaaaaataaagaaaaatagattaaacatatttgtattaaaatgctatcaccatataaataacaaaaaaggaaataaaatgggacaatatattgtattagcctttgcaataacagttgccatatttgtgacattttatgactttgataaagataaaaaaaccgataataataaaaaataattgattttgatattttattattagaagcatgtttatatcttttagcttttattttttattgctagataatatataaaataaaaattttaaaaagcattatttataaaaatacctgcgaaacaatcttaagattcatggaatctattggcgtaggattatttgtaaatagtctttatggtttgcaaatgggcgatagttgcactatcatcgatctttcttaaagattgatcttttttttaaaagaaaataagagagaatggatggttataatatagctattttaatcggcgctatcactcttatttttggtgcattggttttagtagctcattattttaacgataaatacattaatgaaaataaaagctaatctttagcttttaacacactctataagttgggagtaataaaacagaaataaaatattgtcttagtgttgcaactaaatatgatctagatcctttcttacgccaagtattttttgttcctcgtagggcaaaagttacaaaaaatggtaaagatgtgtgggttgaaaaaatagaacctttagtgagtagagatgagctttttagctattgctcacaaaagcggaaaatttggtggtattcgttcttatagtgagattaaaaactatccaaaattagtgaataatcaatggcaatacactcaagatttggttgcaatttgtgaagtttatagaactgatacaaataagccttttatagttgaagttgcatatagtgaatatgtgcaaaaaaacattgaaaatgcctacaatctagtataaaatataaaatagcttaatataagttaaatacaaaagcttgatatatagaataaatagcctataacaaattgtgttataatgacaaaggattaaatatgcaaggaaatattatggcccagcaaaaagagtatatacttaatgaaagttttaaagctttattagaaagtattttttctaatcctgaacaatcacaaaaattaattaaagcttttgaagaacttgttaatggtagagcagctactccaagattggattttgaaaatcttaaaaatcaaactacagaagaaataagataagagcttgtaagtaaagatttatttcaatcagagattaaaagattggaaagtttaatttattctgaagttgcaagactagaaggaattattaacaccaaaatagctgaagttaaaactgaattctcagaacaaatttctagcgctaagcaaaaagcactttattggcttttaggtactgcagtagcaactacagtaactatactttcaagcatttggattatgatgaattttatgttagaaaacttaaaataaaaattatttaaagtttttactatatcttgttgatatacaattttatagttaggataacatagttatcctatgaatttaagtaatgtttttcatataatcataaattaaagctgttcgactaataataaaattctcaaaatcatcattacataaatattcaaccatatcttttgttataaaatgtgtttctaaatctttaaaaaattgttcttgttgattatcttgtatttttttatttagcaactcttttatatatgtgcttggatttttattattgattttattattagattcttttgtaataagtgctatatttgctatattattaattatattatcattagatgagataaaatttttagatatctcttttcttatattagaatttataggaaaaatatgatgttcttctaaaaattcactaaacttcttagaaactgtttgcttttattatcactcttgatcttctggtttaaaacctattatttttgccattatacccctatagctttcaaaactattcattgcttgcatattgctaactctaagaagtctaactttgtgatcttgtttgtaaaaaactttaaaaacacaaccactttctttgtgttttactatatcatctaaaccacacttttctataaactcataatctttagcaaaaacttcattttccacatcaaataaatcttgagaatagccattaggattagctggatcataagtataagaacttactacacattctctcatagctttttgtatttcttcttgggataatttttccatagtgttttcctttttttatttttatagtgatataaatgacttaatgtgtaattatggatttttattaacttgattaatttaacttcaattatttaaaacaactcactatgagaacctatattaatacaggttaaaataagcttatcatcttgtttttgataaattaagagtaaatcaggttttacatgacactctctaagctctttaaattcaccttttagtttatgatctttgtattttctttcaagagtttcattgttagataagcgataaactatttcatctaccaaatctttttcttttagcgttagcttcttgtaatttttcttgtattcttttaaaactctaatttcatatttcacgcatagcctt

SEQ ID NO: 4046 - DNA, 21929 bp, synthetic construct
  source 1..21929: mol_type = other DNA
  misc_feature 1..21929: note = Synthetic
ccctgcggcaggttatgggacgagatttttacctgcaacaaaaactttacctaaagagatgttacctatcttaaccaagcctttgatccattatggagttgatgaagctttagaagcaggaatggaaaatatgggatttgtcacagggcgtggaaaaagagctttggaggattattttgatatttcttatgaacttgaacatcaaatttcaggtacaaaaaaagaatacttacttgatgaaattcgctctttgatcaatcgttgtacctttacttttacaagacaaaatcaaatgaaaggcttaggtgatgcggttttaaaaggtagacctttggttggcgatgaagcttttggcgtaattttggctgatgatttgtgtgttaatgaagaaggcttaaatgttatggctcaaatggtaaaaatttatgaaaaatatcgctgcaccatcatagctgtgatggaagtaccaaaagagcaagtttcaaactatggagtaatttctggaaattttgtagaagaaaatcttatcatggttaattctatgatagaaaaaccaagtcctgatgaagctccaagtaatcttgctatcataggaagatatattttaactcctgatatttttggaattttagaaaatactaaagcgggaaaaaatggtgaagtccaacttaccgacgcgcttttaactcaagcaaccaatggtatggttttagcttataaatttcaaggaaaacgctttgattgtggaagtgtagaaggctttgtagaagcgacaaattatttttacgagaaaagtaaatgttaaacaatacacttttttttaagcaaagtgaaattcacactataagttcttatgcaaatcgtattaatgatgaggtaaaaagtggagatatagggtattatcatcttattgatacaagtttgaatttaatcgatgagagtttggcttttatcaaagacaaagaacacataaaaaatatcgttttagtgggaatgggtggttcaagttgtggtgtaaaagccttgcgtgatatgctttttaatgaaaaaagcaaccaaagagaactttttatactcgataacacaagttcacattcttttaataagactttagaaaaaatcaagcttgaggaaagtttgtttttaatcatcagcaaaacaggtagtactatagaagttgtatcgctttttaaacttcttattgaacattttaaacttgatatgcaagaattaaaaaaatactttgtttttattaccgataaggattcaaaacttcatcaagaaggtgaaaatttaggtattaaatgcttttttatccctgcaaatgtaggaggtcgttttagcatactttcagccgtaggtatagttccgctttgtttttgtggctataatgccaaagctcttttagaaggagctaaagcttgttttgaagatttttttactcataaaaaagatgaaattttacaaaaagcctatcattattgcacacacaaaaatgccaatatcaatgtacttttttcatatagtgatgcttttaaaggctttaatgaatggtatatccagcttattgctgaaagtttaggtaaaaagcaaggctataaacgcataggtttaactcctattgcactcattggcgcaagagatcagcatagttttttacagctcattatggatggacctaaaaataaaactgtaacttttttaaaaatcaaagacgctcaaaaagcgcctattatccctgatattcattttaaatttttagattctttaagtaataaagtcaatcttcacgaacttttaaacgctcaatgtgatgcaactatgcacgctttaatcgccgaaaatttgagtgttgatgtgatagaacttgaaaaacttgacgcttggcatgcgggatatttgatgtattattatgaactttttacttcaacttgcggtgttatgctagggattaacacttatgatcaacctggtgtggaagttggaaagttgatcttaaaaaatatattaaattcttaatcaaaattcattaaaaaagagtataatgattttaaattaaaattataataaaaatttttaattaataataattattatttaagaattttatgttataattttaaaaatcaaaaaaggagtcaatcatgtcagttacaaaacaattattacaaatgcaagcagatgctcatcatctatgggttaaatttcataattatcactggaatgtaaaaggtttgcaatttttttctatacacgagtacacagaaaaagcttatgaagaaatggcagaactttttgatagttgtgctgaaagagttttacaacttggcgaaaaagctatcacttgccaaaaagttttaatggaaaatgcaaaaagtccaaaagttgcaaaagattgctttactccacttgaagtcatagaactgatcaaacaagattatgaatatcttttagcagaatttaaaaaactcaatgaagcagcagaaaaagaaagtgatactacaacagctgcttttgcacaagaaaatatcgcaaaatatgaaaaaagtctttggatgataggcgctactttacaaggtgcttgcaaaatgtaatttaaggggctttatgccccaattatacaaactaggttataatatcctttttttaaaggataaaattgaaagtacttaattttttttatgaaaaccaccctaaatttgaagtaagttatgaaagaaaaaatcaaatttcaaaaccaaatattatcataaaaggcccacgattttgtggtaaaaaaacacttatttttaattttttatctcaatttaaagcaagtgaaattttgtttttagatttatatgatacacgctttgaaaaacaaagtttagaaagacttgctgattttctgaatgaaaatttacaaattaaaattctttgcctttataatttggattttatccctaatttagaaaaaattaaaattcccatcatcttaagtacaaatataaaagatttaaatataaatgggtttgaagaacttgaacttgattattttgattttgaagaatttattagtgtaagtaagaaaaatttacctataaataatttagtaggtctttttttgcaaagtggacgcagtaaatttggagaaaaaaacatacttctaagacaaagctttactcttttagaattagaaattttaaagtatttagctttaaatttgggtcagcaaatcagtatttctaagatatttatagaacttaaaaaaatattaaaaacttcaaaagatagtgtttatcaagctataaaaaaattagaaaatacttatgtgatctatactttaaaacatgatgaaaaaaaacttcaaaagatttattttaaagattttggcctaagaaataatctttgtatttcaaaggatttttcacatttatttgaaaatttagttttaagcgagttgtttaaatttaaagaagattttttttataacaaatactttaacttttatagccaaatatctaaaattgcttatatttcaagtccaactttagatattgatttgattaaattacgtgctaagaaaattttaccaaaggctttagaacttggaatttttcatgtgatttttatcactctttcaagcgaggatagtttttttgagcaaggggttaaatttgaagtcatatcttttgataaattttcacttggattttaggtgttgtttgagtttgtatcgtatttttcaaggttgtatcgtttgatgatttttgtaataagattgatataatatcccttgcgttcagaataagaatctaaagttttaatagcctctagtcctgttatctctttgccttcgcttgcaaatttagctcttgcatcgcgaaacttttcataagcaaaatgacgatttaaatttaaaacataagagtaaacactatcttgcagactatcaaaaatcttaattttatgttttttatctggatgtcttaaatcaggaattaaacctttctcaccccaagtccattctccaaaaagattatttgcttctcttgcgaagcgacttgtacctgtagcactttcaactaaagcttgggctatacccatggattttggaattttttgaatacgttttttatattctgcaaaatcataaagattttcaatgcgatatttgttttttatcgtgataagtttttcaagatttatttgatttgaagtcctaaagcctgttttgtaagcatctttaaaaaaggcttcgataaaagctctttcttgttcaatttttttaaagctttgatcaaacatttcattcatttttataaaaaaaatttgtcttttttgatctatatcaagtttgtaatattcctctccaaagccattttttagatcatcagcaaaaagtgggattagaaaaagactaagaaaaattataattggcttcaaaacaatactttacctttccttcaaaaaacaattcttcatttttatatgtaaacccaacctcttcaccacttttaggagttattttaactttattttgtacttttttatttaaaaatgccagataaaaacaagcccccattcctgtgccacaagctaaggtttcatcttcaactccgcgttcataggtacgaacttttaaatgattttcatctaaaatttttacaaaattaacattggcattatatttttgtctcattttttgacaaagtattgtatcaaattcatctaaattttgacaaaaatgcactagatgtggaactccagtgtcgcaaagttgccaagtttttcctaattcttcaaaagtattttgcacgctttttattttgcctaaagatacttcaactttatcttgatttacctttgcttttattattcctgcaccggttaaaaaactcatgttaggatttattttgttaatatgatgtgcaaaatgtgccgcagcccttgagccattgccacacatagcagcccttgagccatcgttattataaaattcccattcaaagtcgtatttttcatgaggcaatattacgataaagccatccgcacctataccctcataacgattgcaaagttctttagctaaagcacttctatcttcttttctatcagcatttgttatgacaaaatcattcccacttgcacaatatttataaaatttcacatttttcctttagaaatttcttgtattactttaacacattcttgcctaaaatcgacataagaattagtatttttaatgataaaatctgcttttttaagtttttcttcaatatctatttgagaatcaagtctcacttttgcagcttctaagctgagcttatctctttgcatgattcttttaaggcttaattctttaggtgtgtaaattacaatgactttgcctaaattttcataagcaccgctttcaaaaaaaagaggaatttctacaaaaaaagctttattttctttatctagaatttgcatttgttctaaaattttagctcgaattttaggatgagtgaaattttctaaggtttttttagcttctttgttgttaaaaacaatttctccaaggatttttctatcgattttcttttcttttgtgagtaaattttttaagttaaagggagaaaaaatcttttcaagttctaaagcattttcatctaaaattttatgagcaattttatctgcgctaatgcttttaaagcctaaagaattcgctatttctataaaagtgcttttaccacaagcaattgaagcggttacaaaaaaagcatttttcatcttatgccttattaaaacttttttcgttaaaatacctttttagttcttaaaggaaaataaatgaaaatttcatatgaagatgcaggcgtaagtatagataatggaaatgcctttgtagaggctataaaacctttggttaaagaaacttttaatgataatgttgtaggcggaattggttcttttgctggtgcttttagaatgccaagtggttttaaaaagcctgtgattttaggtgcaacagatggtgttggtaccaagcttcgcttggcaattgatgctaaaaaatatgatactatagggcaagatttagtagcaatgtgtgtgaatgatttgatttgtaattttgctacgcctttgtttttcctagattattatgctacagctaagcttgaagtagaagtagcaaaggctgttgtatcaggcattgccaagggatgtaagatggcaaattgtgcattaatcggcggagaaactgctgaaatgcctggaatgtatgcaaaagatgattttgatcttgcgggttttgcagtgggtatggctgaagaagatgagatcgatagaagtaaatttgttaaaaatggtgatattttattggcacttcctagttcaggacttcattcaaatggttattctttagctagaaaagtactttttgaaagtttaaaattaaaatttgatgacaagataggggataaaaatttaattgatattttattagagcctacaaggatttatgtgcgtgattttcttacattaaagccttatattagtgctctagctcatattacagggggtggtttagtagaaaatttaccacgcgttttgcctcgtggtatgggtgcaactatacgcaaacatcatcttaaaactcctgaaattttttatactataggacaggctgtagaagaaagcgaaatgtatagaagctttaacatgggagtgggtttagtaatggttgtagatccttctaatgtaagtaaggttttagaaaattcagatgcctttattatcggcgaaatttgcattaatgaaggtattgttttagagtgaaaacaaattattatgattatttatgtgctaaaatgtatgtaattttgcccataaaagcccataaagacaaactaaaattttatctttcttatgtaaataagaaagataaaatttttagagttaatgtgtggaagtgggcggttttgataaaaattgccaaagatgataaaacgaaatatttttgttcgaatgtattaaataaagggtaaaatgcacaatttaaatgaagctttgtttcaaaaaaagataaaagaaattcgcttaaaagcaatagcgagtattatttgtgggtttttaggtatcattccttatcttggagttttatttgttcttgcgagttggattttattttttattgtgctttatgatttaaaaatctatggtggtgctaaaaatttgtttaagaatttccttattagtgtagggattggattttttggcattcttgttaatacaagtattttatttgcaatgctaaagcctagaactggcatttttggtgggctttattttaatcaagataatatttttatggctattgctatatttttagtattacattttgctattttggctttaatttttccttttttgaaagctttttactatgaaattgctagaacaacaaagcaaaagtatttcacttatgcttttaataccttttatttagggcttcttactttgattatcggcataggcttggtgtttttgctagcaagtttggttttttggattttagcgtgggtcaaatttaaagaatttgatgagcaagaactttcaaatttagaagaaagattggcaaaagcacaaaaaaaggtttttgattttgatttaaaatggattaaaatcacaatggcttcatttataattttaaacttgctcgttttaacattttcgtttatattagaagttattagctttgaagattttaggttttactacacaaaaaaaactttattttacacagccataatcctagctttgcttagtgtgtttttgttttgtaaaaagataaaaaattacaaactttttatttattttttcatatggcaaggtttaagtgtttttggtagtcatcttctttttattcctgattttatggtagatcaacaaattgtatatggaagtttaaacataatattaagtctatgctatattatttttgcttttttattttttaaaattttgattcaaattacaaaggaaaaacttttttatcttatttttgcattttatgtttgcatagaaattttgataatattaattttctttatttttatgatggttgataactattatatatttacaaaaagtcctataaagatgctcatagataattataaattactttttcaagttgtttatttcgtttcatttttaattgtttggcttatgcttaaaggacaaaaaaatgtaaaaatatgttagaatgatgaaaaaatactattttacgtagatgtttattaggatatattcgtatgtcttaaagctctttatggggtgttaagtaattataatatttaaaaattaaaaaatatatagtttatccacattttatagtttaacttctaaaaatttgatcatctcttttttcattttttagagctagaaaacatatgagtgaaattgctttaaagttagttagagcagttgatactaaatattttgataagaaatttaaatagattgattttacttaaattaaagactttttgcctcgtgatacaaaattaagtgatgaatttttagttaaattgatattaaatatgaaaaaattataaatattaatactttttcaaattaatagtaaatatagagggtttgattttttcacaaaagatttggatagaacttgcaaaaaactttcttcaatatttatacttttaaattttgatgcaaatcctattcaatatagcattggcaaaataaactaaaaagcttaaaatagctatactcaaaagaattccaaaccatgcaaaatttcctgttccaagatttgaaaccgcgttagtaaggatattaactccaccaagtgctttaatgcctttagcacatactccagcggcgatgattatgcttacgactaagataaaaatttcagccatagtcttttaaaatcaccatcatatcttcgcctaattttctagcatttctgtgtcttgcaaattcaacaagaaaaactaaagaaatgcttacaaaatttgctgttacaacatcgagcttgatagtaaaaaaatacgctgtaaataaaaatacaacaggtaaccaaggaaagagtatgtaaaaagtaggacatttaggatcaatgatttgcggaatttcaacttcatcatttaaaacacctttttctttatctcttttatcaatccaagcaaaataaaaaggaatcaagatggcaataactacaacataggcaatcacactataaatttggtaatttaaaaaaagccctacgacattatcactttgtcctaccatatctgccatattgattgaatttccatcttttggaccataatcaagtgcaattaaagaaagcgcacatacagttgtaataggacggattttaagtgagattaaaacaggataaatacatgctaacaaaagcaaaagcaatccagcatagctagaaatgacgatttttaaagccattccaacaacaaaagttccacttaaaattaagtatttattttttgatttttcctaagggtttatttgctaaaaaagcaagttttgccgaagcattgatatgtttcatgtaagcagcaaaacctgccacactcatgataataagtcctactccagaaagctgacttttaaaagtcgctgtgataaaagcataactatcaagtaaaacatttaaaagcttgtatactctctgcttggagcttttggtataggtgttcctgtgatataaaaagcaaaaataagcaagataatatttgaaagaaaaatacaaaaatgggatcgtatttttttgagtatatcataaaaattagcatagggtctattgaatttacaataaattggattttatctaaatttttaaataaaaaatattttttatttaaaaattacttgttttttgtattataaaattaacatatatagtttggttactgaaaagtttatgtttgtttaaaaaatgatttttgtattataattatacacaaatcataaatattaaaaaggatctagtgtggcaagaattttggcatttgatataggaataagctctattggctgggcatttagtgaaaatgatgagttaaaagattgtggagttaggatttttacaaaggctgaaaatcccaaaacaggagaatccttagccttgccaagacgccttgcaagaagtgctagaaaacgccttgctagacgcaaagcaaggctaaatcacttaaaacatttaatcgcaaatgaatttaagttaaattacgaagattatcaaagctttgatgaaagtttagccaaggcttataaaggatctttaattagcccttatgagttaagatttagagctttaaacgagcttttaagtaagcaagattttgcaagagtgattttacatattgcaaaaaggcgtggctatgatgatattaaaaatagtgatgataaagaaaaaggtgcgattttaaaagctatcaagcaaaatgaagaaaaactagcaaattatcaaagtgtgggcgagtatctttataaagagtattttcaaaaattcaaagaaaattccaaagaatttacaaatgttagaaataaaaaagaaagttatgaacgctgcatagcgcaaagttttttaaaagatgaattaaagcttatttttaaaaaacaaagagaatttggcttttctttttcaaaaaaatttgaagaagaggtgcttagtgtagcattttataaaagggctttaaaagatttttctcatttggtgggaaattgtagtttttttaccgatgaaaaaagagcgccaaaaaattcgcccttagcttttatgtttgtagcacttacaagaattatcaatcttttaaacaatcttaaaaatactgaaggaattttatatacaaaagatgatttaaacgcccttttgaatgaagttttaaaaaacggcactctaacttataaacaaacaaaaaagcttttgggcttaagcgatgatgaaaatacaaagttaaacgacacacaaaaaggctcaaaagtgcatgtagaagcaaaaagcggtatgcttacatcggctttaagacacacttggggctttagcgctaaggatagaaataaccatcttcatcacgccatcgatgcagtaattattgcttatgcaaacaactctatcgtaaaggctttttcagattttaaaaaagagcaagaaagcaacagtgcagaactttatgcaaaaaaaattagtgaattagattataaaaacaaaaggaagttttttgagccttttagtggttttaggcaaaaggttttagataaaattgatgaaatttttgtctcaaaacctgagagaaaaaagccaagcggagccttacatgaagaaacatttacaaaagaagaagaattctatcaatcatacggcggaaaagaaggagttttaaaagccctagagcttggtaaaatccgcaaagtaaatggtaaaattgttaaaaatggcgatatgtttagagtggatatttttaaacacaaaaagacaaataaattttatgctgtgccaatttatactatggattttgctttaaaagtattaccaaataaagctgtagcacgaagtaaaaaaggtgagataaaagactggattttaatggatgaaaattatgagttttgcttttctttatacaaagatagtttgattttaattcaaactaaagatatgcaagagccagaacttgtttattttaatgcttttacaagctctactgttagtttgattgtttcaaaacacgataataaatttgaaacgctaagcaaaaatcaaaaaatattgtttaaaaatgcaaatgaaaaagaagtaatcgcaaaaagcataggaattcaaaatctaaaagtatttgaaaaatacatagtttcagcacttggagaagtgacaaaggctgagtttagacaaagagaagattttaaaaatgagttacgatgaagcttttaaaacactgcttattagctctaatgccaagctaaatttagagctaaatcatcttgtgattaagcaagatgaaaatatagccaaattgtttttaaaagatataaatatcatcgttttagaaagcttacaagcaagccttagttccgcactttttaatgcctttgcaaggcataaaatcatcttgctaacctgcgatgaaactcatagtataaatggtatttttactccttttttagggcattttcaaagtgcaaaaatcgcaaaagagcaaataaatgtaagtgctcaaaaaaaggctattttatggcaaaaaatcattaaaaataaaatcctaaatcaagcctttgttttgaaaaaacacaataaaatagagcaaagcaatgagcttataaatttggccaaaaaagtaagcttaaatgatagtaaaaatatcgaagctgttgcagcggcgctttattttaaaactttgtttgggacttctttttcaagagatgagctttgctttgaaaattctgctttaaattatggctatgcaatcattagggcttgtattattagagcagtttgtataagtgggcttttgccttggcttggcattaagcacgataatatttataattcttttgcgctttgtgatgatttgatagaagtgtttagggctagtgttgatgattgtgttttaaagcttaagggtgaaagtgagtttttaagcaaagatgacaaaagagcgttgattggcaatttacaaagcaaaatcaattttgatgggcaaaattatcctttaaacagagcgataaatcattatgtggcaaattttaaaaatgctttattgtatgaagatgaactaaagatagtgaaatttgatgattgaagataaatttatgcgcgtgcttttgatgtttgatgtacctactaaaagtaaaaaagagcaaaaactagcaagtaaatttagaaacaatcttataaaattaggttattttatgctgcaatttagcgtttatatgcgtatttgcaagggtttaagttctgcaaaaagttctattgaaaatgtaaaaaagattttgccaccttatggaaatgtaagggctttaatcatcactgaaaagcaatttgataaaatggagcttttgcttggtggcatagtttttaatgaaaaagttaataacgaaaccaatttaacactttttgatatagatagtcatggagaatttaaatacaaaaattcaaataatgaagaaatacaactaaacaaaaaacaagaaaaatatcatcagcaaaatttatttgaattttaaaagcggttttaggggattgtaaccccgcagagtcccgcaaactctttattttagtccctttttaaatttcttatgagattatagcataatttttgctatttttcatgaaaaaaccccgaaattttcattatctggtaaatatctattttaccataaagaaatttaaaaagggactaaaactgatataaatacagacccaagcacaccacaattttaccataaagaaatttaaaaagggactaaaataaaccctagtggattgaaactccgctagggctaattactccactaaaaggaggttgcgaatttgaaacttattgaaatttagggttgattaaaatcgaaataaaattatttaaataattttaaggcataaagataatatccactaaactttcattttctaaaatttcacattcttttggcgccaccataagggcagctttattgttaagattgtttataatcgcactagagccttcttttttgccttcaagattggctaaaatgcgtccattttcaaactttatgttacaagcgacaaattccaaataaggtgtttttttcttgtaacttccttgtaaaaaggctttgcaaatatagtctttaggctgaagtaaccaagagtttaaaatctctcttgcgtaaagattaaacattaccatagccgagtaaggaaaacctggtaaggcgatgatgaatttttcattagccttagctattttgatatgtctacctggttttatgtcggctttatcgatgatgatttcgtattctttgatggctttttttaaaaagtcaaaatctcccatagaaaccccgcccgttgtaaccaaaatatcacaactttgcaaagcactttcaagggtggaaaaagtggctttctcatcatcttttaaaagaggaaaaacccttgtatcgcaatttaaatttttagctaaattagctatggcgatatgatttgaagagcggatttgagcaggattttccaaggcttctcctagatctttgatctcacttccactacttaaaacccctacaataggctttataaacacactaatgtgaaaaaatccaagttcagctaaaagagctatctcgctataatttaactttgtgccttttttgagtaaaatttcatcttttttatagttttctcctaccgcacgcacggcaaaagcttggggaacttttttttctataaaaagagtatcattttctatgcatatattttcaacagggactaaagtatcgcttccttcgctcatgagtgagcctgtaaaggtttttacacaagtgccattttgcacgctaaattgtggcatagtacccgcaggtgtgatacctaaaatttttaaaggcttatcttgatcttcaaatttgatcgcataaccatccatagccgaagttggaaattcgggctgatttttaggggcttttatgtcttgagctaaaatgcgtcctaaacactctgtaagagctattttttcaatcttttcataagttttaatatgagaatgtaaaatttttaaactttcttcataagacattaacattttttatccttttaaaagtcctgcaccgcaaagtttggttgatctttctttggcataaattctttctttgtttatcacatcatacttccaaatgggcgcacttgctttaaaatcttcaacaaattcattaagaagtttaagtcctaattttctttgtttgcttaaaattcctgcaaaatacgagctttcatgtatcgctacatcgcctatagagtgagcaaaaagcaagctaataccatcaaaatctactcttttttgccactcatcaaaccatttttttaaaagcggttcataaatatcaaaactaagtgcctcaatacctccttcttcacgcacaataccacaaaaagtcagtaaagcaccgcagtttttatccttggaaaattcataccattggctataaattttagaaatatctaaagagccttgataaagtgtaaaatgtttcatttagcctccacaaactggcggtaaaagtgctattttatcaccatcttttaacttggtgttttcatcaaaaatgatttcatcatttaaagatacagcacaaagttctagccattcttttaaactctcatctttttgcaaaatttcttttaattcttttaaattttttacttcaagttctaaattttctttatttatggggcctaaaaattccacttttaccattttattcctttacttctaaatttcccatcattcctaaatcttcatgttctaaaatatggcaatgatacattctaagtcctttaaaatcttgtttcattctaagtcttaattcttcattaggacgcacatttatagtatctctgaaggctctaaattcggctttttgaactttgccattgagttttgatgagatgagttcaaattgcgtgccgtgtatgtggaaaggatgatccatgtgagatttatttatcactatccagtcttcaactactccaagcttggagcttaaatcaatgcgttttaaatcatagcttttgccattgattaaaaacatagacgcaagagcgatttttaattcgctttcactttttcccatcataccatgcatttgcatatgatcttcactcatgattatttctttaaattccttaggttcttctgaaggtttgaaaatttttaaattttttggaagttctacattttctttttttagactaatattagctaaaaatagggtattgggttcttcttttaccatcattttatccctatcataataagcactttctagcttaaaattcccatcttttggagcgtcgattaaaacttctgcacgagaagcaggacttaagaaaagttcttctttataaatagttttttctataagtccaccatcagtaccaacaagtataaacttagctccttgtatgcgtaaatttaaatatcttgccgcagtagcattataaatgcgtatgcgttcgtttgtggcgagtttgatttgaggtttaaattgtccattaatgagtacaaattctccttctctaccatttagccaatcatttaggttgttgttcggaatttgagcgttttcatcaagacgcaaatcgctaatcatcaaatctctttcttttaaatgacttaaagcatctttttttgctttgatcacaaaagcccctgctaaacccataaaaacttgtttagaagcggtataatgagggtgtggatgataccagtaagttcctgcgctatcttgaggaattttaaaacgatatattctttcttctcctgctaaaataggatcatgtgggcttccatcttgatcaggcggcacaggaacgccatgccaatgtatagttgtagcttctttgagtttgtttttgactaaaatttcaagtttatctccttcaaaaacttctatttttggagcaggcacgaggccattgtaagtataaaataaggtttttttacctttgataagctctatatgattttctttgatttctagggtagcacgaaaaatatttttttctttactttcatttttgagtaaaggcaaggcttttaaaatttctccttgggggaattgttttggatctaaaagttttaaattttttggagcaaagttgataaaagaagtatctaagtcatgatttatagaatgatttttatgcatggagtgcatatcgtgcataggatttgcataggctacacccatacttgctagagtgagtgcattaaattttaaaaaatttcttctattcattagtttttccttttgcttgattttttgtattatagtcattatttttttaactttagtaaatatttattttgaaaatttggtttaattttgttatgattttagcaatttaatcaaggaaaaataatgttttatgaaaaaattcaaactccagcttatattttagaagaagataaattaagaaaaaattgtgagcttttagcaagtgttggtgaaaaaagtggtgctaaagtgcttttagctttaaaaggttttgctttttcaggagcgatgaaaattgttggagaatacctaaaaggttgtacttgtagcggactttgggaagcaaaatttgctaaagaatacatggataaagaaattcatacttattcacctgcttttaaagaagatgaaataggtgaaatagccagtttatctcatcatatagtgtttaactctttagcccaatttcataaatttcaagctaaaacacaaaaaaattccttaggtcttcgttgtaatgttgaattttctctagccccaaaagaactttacaatccttgtggaagatactcaagacttggaattcgtgctaaagattttgaaaatgtggatttaaatgctatagaaggacttcattttcacgcactttgtgaagaaagtgctgatgctttagaagcagttttaaaggcttttgaagagaaatttggcaaatggatagggcaaatgaaatgggtgaattttggaggaggacatcacatcactaaaaaaggctatgatgttgaaaaacttattgctttgtgtaaaaatttcagtgataaatatggcgtgcaagtttatcttgaaccaggcgaagcggtgggttggcaaacaggaaatttggtggctagtgtagtagatatcatagaaaatgaaaaacaaattgctattttagatacttcaagcgaagcacatatgccagatactatcatcatgccttatacaagtgaagttttaaatgctagaatgttggccacaagagaaaatgaaaaaatttcagacttaaaagaaagcgaattttcctatttgcttactggaaatacttgtttagcaggtgatgtaatgggagaatacgcctttgataaaaagcttaaaatcggcgataaaattgtttttttagatcaaattcattacaccattgtgaaaaacacaacttttaatggtataagacttccaaatctcatgcttttagaccgtaaaaatgaacttcaaatgataagagaattttcttataaggattattctttaagaaattagtattatttataatttgcataaaatgttaattttactcggaagagaatcaaagatgtaaattttatgcaaagtattttattttttcaaatataaaatcaactcaaatatctaattttcaatactttggtatgattttttaatattttaaatccttgtggaattttattgaaattcagtgatttttaaatcaaatagtattaagataaatcgatttaaaaatcggctttaaaatgaatattaggtatattttgcataatattcattcaagcaaaatttaaagctatttttgaaaattttgaatgcatgggagctttaatggatttggaaaaattaagattagctagaagtctttattatcaatgtctaggagagctttttgttttttcattttctgaagaaagattgtcaaaattacaagagtatttaaagacaatgcaagaatgtttatttgatgaaaatttaaaatcaaattttgatatcttgcttaagcatttagatgatgaaaattctatacaagcattttttaaagaatatgatttgctttttttaagtcttaaaaatagcattccaacgactttttcttacatagaagaaggttttgaaaattcaaatcctttactttgcgtgcgtcaaattttagtcaaaagtaaaataagacgcaatgaaaaattttttaaagaaagtgaagatagtgttggattttgtttattgttgatgagtgaatttttaaggcaaaatgaagatgatttagccaaagagctttttgaaaaagtgatcaataaaagcattgatgagtttttaggcgatgttttcatgaataaaaatgcgaatttatataaggaaattgcaagtattgcatcggcttttatggaatttgaaagactttgctttgaagtggaaaaacctgcaaaaataaattctaaaaaagtgcaaaacgatctatcgcgttcagaatttttaagaagagaagcaaataaacaaaggaggactcgtgaaaaatcgcagggaatttcttaaaaaatccgcttttgccttaggggctgctggagtgcttggtagcacgactttagctctagctaaagatgaagaaagaaaagatttggttaaaggtaaaagtaagaaaaaagaagtgctttttcaaagaagtgctaattgggaaaaatattatataaaggctgagtaatgtcaagtgtaggtgaaaatatcaagcttacgcgtcgttcttttcttaaaatggcagcactttcaagcctagcaacaccgttgcttgctagaagtgaaactttaagagaagcgagtgctgatgagcttaaagaagcgtatgaaggtagtaaaaaagtaaaaacagtttgtacagcctgttctgtaggctgtgggattattgcagaagtgcaaaatggtgtttgggtgcgtcaagaaattgctcaagatcatcctgtgagttcaggtggacattgctgcaagggatctgatatgatcgatatggtgcgttcacatgtgcgtttaaaatatcccatgaaaaaagaaaatggagaatggaaacgcataagttatgagcaagctttaagtgagatcggagaaaaactagctgcttatcgtaaagaaaatcctgaaagtgttatgtttttaggttctgcaaaacttaataatgaacaagcttattatataagaaaatttgcagcattttttggaacgaacaatgtagatcatcaagctagaatttgacacagcgcaacagtcgccggtgtggcgaatacatttggttatggcgctatgacaaaccatcttggagacattcaaagaagtaaatgtatcattatcattggagcaaatccagcggtaaatcaccctgtgggttttagacatttcttaaaagcaaaagaaaaaggtgcaaagcttatcgttgtagatcctagatttacaaaaagtgcagcaaaagcggatatttatgcaagaattcgtccaggaactgacattgctttcatgtatggaatgttaaaaatcatttttgatgaaggcttggaagatacaaaatatcttgatgaaagagtttttggaattgataaaattcgtgaagaagcagcaaaatggacagctgaagaagtggaaaatgttacagggatctctaaagaacttttggtgcaaatcactcacgaagtagctaaaaacaaaccaactacgcttatttgggctatgggtttaactcaacatactgtaggaacttcaaatacacgtttagcacctattgtgcaaatggtacttggaaatataggtaaatttggtggtggagttaatatcttacgcggacacgataatgttcaaggtgcttcagatatggcttgtttgagcgaaaatttaccaggttattatcctttaaatgaagcgacttggagatactatgccaaaatttggggtgtggattatgagtggcttttaggaaattttgtaagcaaagattggatgcataaaactgggctttcacttgctagatggtgggcagcggctttaaatggaaaagatggaaatgatgctatcgataatgcaggaacgcctttaaaagctttagtagttatgggaaatggtattacttcgactgcacaacaagtaaaagttaaagaaggtttggaagctttagagcttttagttttagctgatccttttgtaaatgaagcagggattattgcagaaagaaaagatggaatttatcttttacctgcagcaacacagtttgaaacaagcggaagtgtaacagcaacaaatcgtagcggacaatggagatttaaagttgtagatccactttatgaaagcatggaagatcaagaaattttatttgagcttgctaaaaaattaggtttttatgaagactttaccaagactttacgcgatgaaaaaggtgagattgtttggcctgaaaatgcaacaagagaaattgcaaaagcagttagaagtatagggcttaatggttggagtcctgaaaggcttaaaaagcatactttatactgggataaatttgatgaggtaactttagaaggaaaagacgaagttgcgggcgagtattacgggcttccttggccttgttggagtgataagcacccaggttctcctgtactttataataccgacattgaagtagcaaaaggtggtatgggctttagaaataattttggacttgagtatgaaggagagagtttacttgctaaaaatgcgcctttaaattcacctattgatacaggttatccacaaattactaaagataatatagaaaaagttttaggtattactttaagtgcccaagaaaaagaaaaaatgggatcaacttggtcttatgatgatagcaatatcatagcaactaaatgtatagaaaaaggcatagttccttatggaaatgctaaagctagagctgtagtttggacttttaaagataaaattccactccaccgtgagcctttacattctccaagaaacgatttggtgcaaaaatatccaagttttgaagatcaaaaagcactttatcgcgtggatactaaatttgtttctgtgcaacaagctaaggattattctaaagaattcccgcttaatcttgttaccgcaagacttgtgaatttaaatggtgcaggtatggaaaatagagcatctatgtatctaacgcgtttaac

SEQ ID NO: 4047 - DNA, 21797 bp, synthetic construct
  misc_feature 1..21797: note = Synthetic
  source 1..21797: mol_type = other DNA
ttttcgtactcttatggaaaaatcagggattgatacgggtgtagcttttataaattcgagttttatttttatagcgactattgttttacctatctttgttttatcgtttttcgtattgagtgcttttagaaacaaaacacaggtgagtgtgatagaaaaaccagaagcttttgatacaaagcaaaaaacaactttgattttgatgtttataatgatatttatcgttttggcagggcctatagctcatcttatttttcctcaaatttccataatagagtattttaataaaaaaatagatattgcgatgatagctattatttttgttgccattgctttattcttaaaattagccgatgagaaaaaagttatagcgcttattccttggaatactttgattatgatatgtggggtagggatgcttattagcgtagcggttgaagcagggacaattaaatggctttcaactcttgtaaaaaatgaagtgagtgtggtttttatccctttaacaatgtgcgccatagcagcctttatgtcacttttttcaagtactttaggtgtggtaactccagctctttttcctataattccaagcatagctcaaagtagtggtttaagcgaagccttactttttacttgtatagttataggtgctcaagcttctgcgatttctccattttcttcagggggaagtttgattttaggtgcttgtcctgaaaaatacagagaaaaattatttaaagatttgcttgtaaaagcagtgccgataggctttggtgcagctattatagccaccattattatcagttttattttataggggttttgttatgaaaatagatactcacgcacacatttttttaaaagaattaaaaagcattgaaaatgcgcgttataagcctgattacgatgcgagttttaaagattataaggcaaatttagatcgttatgattttgataagggtgttttagttcagccaagttttttaggtgtagataatgagtttttgcttgatagtattaaagatgatgaaaatattaaagctattgttgtagtggatgaaaacattaaatttgaagaattggaaaaattaaaaaaaagaaaagcttgcggtgtaagattaaatcttatcggcaaggagttggatgattttaaaaatcctatttggatggaattttttgagaatttagctaagcttaaaatgcaagttgaaattcaaagagatttggatgatgatcttgtaaaaatcattaaacaaatccttccttttggttgcgatatagttatagatcatttagctagagcaagcgataaatctaaaaatttagaagaattacttcatcttaaaaatcctaaagtgttttttaaaatcagtggattttatagggcaaaaattcattatactaaaaatgaagaagcaataaaatttgctaaaataatgtatgaaattttaaaagagcattttttgcctacaaattttgtttttggaagcgattggccgcatactaattttgaaaaaaatatcaattttctaagtgcttttgaagcttttgaaaaaatcgttatctccaaaaaagaacaagagcaaattttaggagataacgcttgtgctttatttggtttttagccttactctaaaaatatattttgcaatgtattcaaaatattttcttaaataaggcttgtgaataacaaaaccccctagaagccctaaaaggcttcctatgataatatcttgcaagcgagcgtgtattaacatatcgacacttaagtttccaaaagaagccgcctcagccaaataagtcacataaggagtaagaaaaattacagttaaggcgtagtttctaactactaaaaactcaattataaaggctaaaaacatcatcaaaaagacaaattctagaggggtaaatttgatctttaaaagccaccatgcaaataaaattcccactgtcgttccaagaatgcgttgaagctgttttatccagactgattttaaattagctccttgtaagataacagttgtgctcactgcaacccaataacttctatcgagttctaaaaatgctcctagaaacactgcaaaaccaacaaaaaaagcaataatcatagaatccacaaagatgatatcaaaacccaaatttccattctgtaaaacaggcttgggtggggaatttttaaaaatataaatgacagatatagagtataaaaaagcagctatgttagcaatgataccacctatacagattagtcccactagaaaaatataatctttgggtggaaaaggaaaaaatgaagccaataagcaggaaaaaacaaagaaaaaataccccggtgcacctatattgtaatagcgtatcaaaatagagctagtcatggctactagaccgattatgagcggagaaaacgtaggaaaaaaatgggtgcaaagtcctattaaaaaagataagcacaaaccaaaagaacagcacattgtaacagccattctgtgatatatgggcgtattggttgtataaacaaaagccataattcctatcatagcaattagccctaagtccatacgctcataatatgcagcaatactaagtgcaaatccaactgccaaggcaaagaaaaaaggcatttgccaaactctttcagttggattaagctgtatgatttctttgcattgttgttttaaaattttccttttgctcattttcttatttgtccttctccactgattaggtatttataagtgcaaatatcttcaacccccataggacctcttgcatgaagtttacttgtggaaattcccacttctccaccaaagccaaattcacccccatcactaaaacgagtcgaggcattgacataaatacaagatgagcgtagaaggcgttgaaatttgcctatgtttaaagcattgtttgagattatggtttcagagtgtaaagagctgtgttggttaatatgctctatagcctcatcacaatcttttaccgattttatactgatagcataatcaagccattcagtatcaaaagtgctctcatcagcatttgaaatttctaattttgagtttttaaaatactctaagatattttcatgtgcgtgaatttttaccttaaatttttcaaattcagggattaaaagctttataaaatctttagcaattttttcatggattaaaagggtttctagagcattgcaaacgcttactctttggcattttgcattaaggatgatttctaaagccatatttaaatttgcactctcatccacaaaagcatgacacaagcctttatcttgtttgatgagtggaatttttgtatgactagcaatttcttgtatcatatttgaacttccacgaggaatgatcacatcgactaaatcatcaaaagctaaaatttgcatgatctcatttctttcataaaacatagcaaaacaatcttgcaaattaaactcttctagtactttataaacaagatcaaatatagccgaatttgtaaattttgcttcgctgcctcccttaagtacgcaagcattggagctttttatcattaaagcgatgatttcagcacttagactcggtcttgcttcataaatcacaccgattaaccctataggaatactgactttttctatttttaagcccgcataattaacccagcctttggaaattttacctataggatcttctaaataagcgattttttccaaagcatcacaaagagaaaaaatgcgtttttcatctagcaaaagtctgtcccgcattgctccacttttagtaaaactgtctatatctttttcattggcttctagtacggttttgaaattctttcttaaagtgtgagctagttttaatataatattttctttatccttgggtgttaaattaagtagtttttgagaatttttcttaatattttcaagtaaatttcgcatttttaatcctttatttacaaaaaacttgataaattatacaaaaaaatttagaattgaaaggtaaattttcgaatgaaaaaagtagatttaatcgtagtaggtgcagggccaacaggaattggctgtgcagttgaggctaagcttaaaaataaagaagttttagtattggaaaaatcaaacaatatttgccaaactttaatgcagttttacaaagatggcaaaagagttgatatggcttataagggttgtgaaggaacaaatcacggacatgttccttttcaagatggaactaaagaaagcaccatagaaacttttcaaaatgctttaaatgagcataatatagaagttgaatttggctctgaggtagagagcgttaaaaatgaaaatggagtatttttagtaagcacaggcaagggtgtttatgagtgtaaaaatatcatcgttgctataggcagaatgggtaagcctaataagcctgactataaacttcctggaactttaacaaagattattaatttcaatgccaactctgttttaggtgatgaaaaaatcctcgttgtaggaggcggaaattcagctgcagagtacgcagtggatttggctagttcaaacaaagtaagcctttgttatcgcaagaaagaatttacaaggctaaatgatatcaatcttaaagatatccacgaagctggaaattcaggcaaagtagaattaaagctcggtatagatatagaagagcttgaggatgataatggcaaagctaaagtgaaatttaacgatggtagcagtgagacttatgatagaatcatttatgctatcggtggttctactcctcttgattttttacaaaaatgcggaatcaatgtcgatgataaaggagttcctttaatggatgaaaataaacaaagcaatgtaaaaggcatttttgtagcaggagatattgcaactaaaaatggcgcaagcatagtaacaggtttaaatgacgctgtaaagatacttgccgtaatttaatcaaatttagcccttgggctgaatttgacttattaaactttcaatattataatttcttcattatattttaatttttaaatattattatgcaaacacaagataaaaacaataaaaaaattataccgatagaaacctatcgcttagctttctacatactaggacttcaaacactctattagctccttttaagatatttgtattgttaaatattttaaaggattttttatgtcaaatatttttagcactttaagcccttttaggctttttgttaaatgtgctgtgcctaatgtaataagcatggcatttatttctttttattatattgttgatggaatttttgttggaaaatatctaggaaatgatgctttagcagctttggccttgattattccttttattatgatatcttttgctttggctgatatgatagccattggttcagctgtacaaatttccatgcatttaggacttgggaagaagcatttagctagaaaaatctttagttctagtatgttaattatcttccttatttcatgcttggtaggtattttagaatatcttttgagtcctgttttgatcgattttttagatgtaaatgaagatatcaaatcaatggcaaaagagtgtatgcttgtatttgctttgtttgccccctttacaatgtgttcttttgctttggataattatcttagaatttgtggaaaaacaacttatagtatgataatgaatgtgattatagcattgagtaatatagtacttgattatattttcatcgttgtgttgggttggggattgttttcagcagctcttgcgacttgtttgggacttatgctaggtggtatttttggaatttttccttttttatttcaaaatttagagcttaaattctcaagtttgtatatgaatatgaagattttcaaaaatatagtttacaacggaagcagtgaattttttggcaatatttcgggttctttatatggtatatttgccaatttggttttattaaaaatttcaggtactcaagcggttgctgctttttctatcgtttcgtatattgataattttatcattatgcttattatcgctatgggtgatgcgatgcagcctgcattaagttataattatgctaaaaaggatttttcaaggattaaagatattttaaaggtaatgtttttcgcgggtgtgattttgtctttactgtctatcgtgatgatatttgtttttggtaaggatttggtgggattgtttactcaagaaggtgatcaagaatttatcgtttttgcttatatggctttgatactgttttcttttaattatctttttgcgtggtttaatgttttaagtggttcttttttaacagcgagcaataaagcgagtttttctttaattttaagcttgagtcaaaatctttttattcctttgtgttttcttttgattttatcttctatcatgggcttaaaaggagtgtggcttagtccattttttgctgaactttgtgttttgattttagcttgtatttttgttagaaaagtctttaagaaactatcgttttcataatgatagtttctttagattgattttagaatttatatcctacacctgtaagtaagatgtggtatgtttcatcgtaaaaatctatatcgctatttcttttttctaggccataattcgcaaaggcataaagcgagtcatagcctaagaattgattttttacgagcttgagattgagttttgtaatactaccgtcttgttttttgttaaaaataggatctgtgccttctgctttgtattgatttaagcttaagcttggggttaggatgtaattttttgcaaaaactagatgtgtgcctattttaaagccatatcttgagtagctttgagcttttccatcggcatcattgtaatcatagtttaagcctaaatttaataaagaataattataacttaattctaactcatgataatttccctctcgcttaagagaagtaaatgctacgctttctttgtctaatttgttttttgcaaaaacataagaagcattaaattttccaaaatcactttcgtaaagttgtgaaattttaaagccgtatttgcttacatcggtttcttcgcgattacctatagcataaggattagcataggctttttctcttaaagatgaaatgagagaaaaggaagtgctaaagcgttctagataagctctttcatagcccaaagcaataccgcttaaatctcttccgttgtagtttttaagaaatactctatcattatcgattaaattcccatagtaaagctcaagacctataagagggatagcagaagtatcggaattatcagcattgtatccgcttagataatcgctatttgctagaggtgagatattgcttttaacatctcttgcgcctattcctaggcttaaatttccgctaaagccactttgaaattctatagatgaagcttgacttatcatcaaagaagctaaagcaaaagaaagtaaggtttttttcaaaataaactccttgtatagttttataattaaaattataactttattgtaactaatattactttaatttttcataaaaagcttatgtgaatttttagattcttttagataaaatcttccaataatttttactcaaaaaaggaaaatagggtgcagcaagagcattttgatttggatttagagcgcgcaattttaagtagttgtatcatgagcgaggatgcttattctagtatagcaggagatatagaacctaaagattttagtcttaaagctcatcaggatgtttttaaagctattattgcttgcgtgaatgctggagagcctatatcgattagctttttaaaaaaacataaaaaaatagatgaacaaattttaacagagattatcgcaactccttcgataatagatcttcccgcttatgtcaatgaacttcgcgaaaagtcgattaaaagacagcttttaagttttgcacatcttttaccaacacggatcaatgataatcgcgcagtcagcgaaatttctgatgaaatcggtaaggaaatttttaacattaccaaccgtgtcaatactaacgatatcaaagatatagaattggttttaagcgagcttttagaagaattcaaaaaacaaaaaagccttgaaaataaaacggtgataggacttgatacaggttttgaagatctaaatactatgactaagggttttaaaggtggggagcttatcatcatcgcagcgcgcccaggtatgggaaaaacaactctgtgtttaaattttatagagaaggttttaagacaggataagggagtggtaatgttttcgcttgaaatgcctgctgctcaaatcatgcaaagaatgcttgcagcaaaaacttctatccctttgcaaaaaattttgacagccgatttaaatgataatgaatgggaacgcattggcgatgcttgtaattattattctaaaaagaaattatttatctatgatagtggttatgcgactatcacagatgtaagagcgattttaaggcgtttaaaggctcaagaagaaagcatagggctttgcgtgatcgattatatagggcttatgatgagtaattctaatttcaatgatagacatttacaagtcagcgaaatttcaagagggcttaagcttttagcaagagagcttgatatgcctatcatcgcactttcacagcttaatcgttctttagaacagcgtgcaaataagcgtcctatgatgagtgatttgcgtgaaagtggggctatagagcaggatgcggatacgattttgtttgtgtatcgtgatgaggtttatagggagcaggatgaaaaagaacgcgaaaataaggctaaagccgaaggcaagccttatcaaagaaatttcattcctaatcctatgcaagaaaatgctgaaattttagtcggcaaaaacagaaatggtcctgtaggggttgtcgaggttttatttttaaaagaaaaatcttgctttgtggataaaccgaaatttgagagtgttgaatttcaggagtagggttaaattgttaaaggtgctttgatacgaaagcaatgtcatttaaaatcaatcataaataccataataaaagtgagagcgaatgaaaattttaggttttgatatagggattaactctataggttgggcttttttgaagataatcaattacaagattgtggcgtgagattgtttaccaaggctgaagaccctaaaacaagagaatctttagctttacctagacgcaatgcaagaagcaatagaagacgactaggaagaagaagatcaagactgattgctttaaagcatattatttcaaaagaattaaaattaaattatcaagattatatagcaaacgatggagaattgcctaaagcttatgaaggaagacttataagtccttatgagctaaggtataaagcgcttaatgaaaaaatagaacccaaagatttagcaagagtgattttacacatagcaaaacatcgtggttatatgaataaaaatgaaaaaaatcaagcgataatgaaaagggtaaaattttaagtgctttaaaaacaaatgctttaaaattggaaaaatatcaaagtgtaggagagtatttttataaagaatttttccaaaaatatagagaaaatacaaaagattttataaatatacgcaataaagaaggcagttatgaaaattgcgttctagcaagtgatttagaaaaagaattaaaactgattttagaaaaacaaaaagaatggggatattcttataatgataattttataaaggagattctaaaagttgcattttttcaaagacctttgaaagatttttcatatttggtaggagcttgcaccttttttgaagatgaaaaaagagcttgcaaaaattcatatagtgcttgggaattcgtagcattaaccaagattatcaatgagctaaaaagcttagaaaaagagagtggagagcttgtatcgagtcagattatcaatgaaattttaaatcatgtcttagataaatgaagtatcacttataaaaaatttagagaatacattaaacttcatgaaagtatgaaatttaaaagtctaaagtatgataaggacaatgtagaaagtacaaaactgattgaatttagaaaattagtcgaatttaaaaaagccctaggagagcattccttaagtagggaagaattagatcaaatagcgacttatatcactctaattaaagataatgagaaattaaaaattactttagaaaagtatagtttaaataacgagcaaatcaagaatctgctagaaattgatttcaacgatcatataaatcttagttttaaagcacttaatctaatcttgcctttgatgaaagagggaaaaagatacgatgaagcttgcaagcttttaaatttaaaaacaaaatcaaacaatcaaaaattcgatttcttacctgccttttgcgatagtatttttgcacaagagctcaccaatcctatcgtaaatcgtgctataagcgagtatagaaaagttttaaatgctttgcttagaaaatatggaaaaatgcataaaattcatatagaattagcaagagatatagggctgagtaaaaagcttagggctaagatcgaaaaagaacaaaaagaaaactatgagaataatatttgggctctaaatgagtgtgaaaaatttggacttaaggcaaatgctaaaaacatcttaaaattaaaactttggaaagaacaaaaagaattttgtatttatagcggtaaaaaaatatccatagaacacttaagagatgaaaaagctttagaggttgatcatatatatccttattcgcgaagttttgatgattcttttttaaataaggttttggtttttaccaaagaaaatcaagaaaaactcaataaaacaccttttgaagcctttggagcaaatgaagaaagatggagtaaaattcaagctttagctcaaaatcttccctataaaaagaaaaataaaattttagacgaagcttttaaaggcaagcaacagcaagattttatcagtaggaatttaaatgatacaagatatatttcaactcttattgttaaatacacaaaagaatatttagattttttacctttggatgaaaaagaagatataaatctaaaaagtggagaaaaaggaagtaaaatacatgtgcaaacaatcaatggaatgcttacatcagttttaaggcatacttggggatttgctcaaaaagatagaaacaaccatcttcatcacgcgcttgatgccacgatagtcgcttatagcacaaatgccattataaaagctttttcggattttaaaaaagaacaagagcttttaaaagcaaaactttatgctaaagaacttacaagtgatagttataaacatcaagctaagttctttgagccttttgagggatttagagagcaaattttaattcaaataaacaaactttttgtttcaaaacctcctagaaaaagagcaagaggagctttacataaggaaacattttaccctaaagatgaaatgattaaaaaatacaactcgcaagaaggtttagaaatagcactaaattgtggaaaaataagaaaaataggtacaaaatatgtagaaaatgataccatggtaaggattgatatttttaaaaaacaaaataaaatttatgctatacctatttatactatggattttgctttaggagttttaccaaataaaatagtaattaaaggtaaagataaaaagggcaatccaaagcaatggcaagaaatagatgaaagctatgagttttgtttttctttgcataaagatgatttggttttgatacaaaaaaaaagatatgcaagaacccgaatttgcttattataatagttttgatatcagtaactcaagtatttgtgttgaaaaacatgataataaatttgaaaacttaacagacaatcaaaagctattgtttacaaatgcagaagaaggaaatgtaaaggctaaaaaaataggaattcagggattgagaattttcgaaaaatacattataaccccgcttggagaaaaaattaaggctgattttaaaccaagggaagatattgccttaaagacgagcaaaaaacatggcctatgatgaagcttttaaaagtatattgatattcaatcaagcaaactaagtctaataaaattagacaagctagtttgtttgaattttaacggttttaaagggattgtaaccctgcgtggctaaccgaaaaccacttattttagtctctttttaaatttctcttttaaaatgatagcatatttttatacatttttgtatacaaaaagctctatttttctttatttgttcaaagtctattttaccataaagaaatttaaaaagagactaaaactgttgtttaattaatttattttcgcattctattttaccataaagaaatttaaaaagagaatcggtttctatttcaatttaaggtgatagtaaacggtatagattatttgtagttaaagttaatttgattcattttttgggattagatatctacaactaaagtagtggtggatttagcaggactcgaacctgcgaccaaccggttatgagccggttgctctaaccaactgagctataaatccgcctttgatttgtgaagatagaattatatcttatctttgcttaaagttattttatttatttttattatctgtccaaaaatatctaaaagtgattaaatgttgtaaaattccaaagaaaatcataaaaattgtaaaagaacttccaccataactaaaaaaaggcagtggtataccgacaaccggtgcaaatcctatagtcatcgaaatattaacccccgcataaataaaaataaacaatgccacgcagtttatggcaactctagcaaaataatcatttttaagcttatgattaagacttagcaagtgaaagatgagcaggatataaagtaagattaaaacaaacccgcctataaatccaaaacgctctataagatatgcaaagataaaatcactcgtagcgataggtaaaaagttaaaatgtgtttgcgtggcttcgtcttcggatttgcctatgagtccgccattgcctatagctatcatcgactgtgcgacttgatagcttggtttttctgagataaaatcatgaattctttgtttttgataaggctttaaaaaatgcgtataaatgataggagaacttataccaatagcgataatgatactgagccaaattttataattcacacccatgataaaaagcacaccaaaacctacgatcaaaagcaccatagcactacccaaatcaggctcttgggcgatcagtaaaaaaggcaagatgataaaaaaactaagttttagaaattgttttaatttatagccatttttaggcggtggattttgatagatgagataagcaagcattaaaataaagctgggtttaaaaatttcagaaggttgaatggtaaaatgagtaaatggaatttcaagccatcttttggcgcctagcctttcaactccaaaaatatctgtacttaaaagcaaaaagatatttacccaataagctacaggtatgagccacataagtttgcgtataggtagtaagaaaaatacactaaatgctgcaatccctacacaggcataaacgaattgtttttcagccaaaaaggtattggcttcgtatattaaaaaaaatgaaattgaaatgataggtataaataaaataggttgtatataatcaaaatgtgttaaaattcttctatcgggtataaacaaaatttgccttcaatttgtagtattaaattataattataggataaaactctaaattgtataaaattttataaggaaaaaatgcaaacttttttagtcgatgaatcctcaagacttgatatttttttagctaaaaatcttaatcaaagtcgcagtcaaatagctttaatgatagaaaaaaactgcgtttgggttaatgataaaattcaaaataaaaattcattcaagttaaaagtcggagataagcttgttttaaatttaccacttgtagaggaagctaagcctaaatttgatatagattttgatatagaaattttatacgaagatgaggatttgttggttttaaacaagccttcaaatttggtagttcatggagcaaagagcgtgaaaagcgcgactttggtggattggcttatagaaaaacaatacactctttctactttaggcggagaagtgcgagcagggcttgtccataggcttgataaagaaacaagcggagctatactgatcgcgaaaaataattttacccatcaaaagcttagcgagcaacttagcgataaaactatgggaagaatttatcttgcgttaattgatttgccactaaaagaggataaaattatcatagataaagccttgattcgttccagtgcgaatgctattaaaaaaatagttacaaattcccatactaagggttctaaggaagctaagagtgcttttgtcaatttggcaaaaagtgaggaattaagtcttattggggctaaactttttacgggtagaacgcatcaaatcagagcgcatttagctagcataaatcgtcatattttaggagatgaattatacggttataggggaaaatacgagtgcaggatcatgttgcatgcgtattttttatattttgttcaccctagaaatggagaaaagatatttgttcaagctccattgatgaatgattttaagcaaattttagaaaaaaattttattttaggagagcttaatgaaaaaatttcacttgagtctttgcttgggtgctttgactcttttatttagtgcttgtagtgtttcacaactttctagcgtgggttctagtaaagaacttttagttaatgaaagcttgccaaagattgaaaacttaaaaagcttgagtgatattagcaatatagcgtttgaatgggagcctttgtatgatgataatattaaaggattttatttatatcgttcaagtgatgcaaatcctgactttaagctcatagggacgataaaagataaatttcaaacccattatgtagatgctaaacttgagccaaatacaaaatattattatatgatgagaagttttaacaatcaaggtcatatttcagaagatggaaaggtagttgaagtaaaaactatgccaagattagaggctgttccttttgcacaagctattacaaatctacctagccgaatcaaattgatttggcgtccgcatccagatccaagagtggcttcttatatcatagaaagagctaaggcagatgagcaagaatttaaaaaaatcgccgagataaaaaatcgcttgaatgctgaatttatagatgaggatttaaaaccaggggagaatttcagctacagaatcatcgctgttggatttgacggagtgcaaagtgagccaagttctgttttaaattctacaagcaaggctttgccacctcaagttgagcatttaaatgcaagtttagatggctctaataaagtgattttgacttgggatgctcctaaatatcaagatttttcatattataaggtttattctacgagttcaagcttgcttccttatactcttttggctaaaactgagcaaaattattatgaagatagggttgagggtgctgcaaaaagcaagtattataaagtaaccatggtggatgtagatgggcttgaaagtcctatgcctgaaaatggagtagagggcaaaactttaggactcccgtcttctcctactgtgattttagctcaaagcacaagtgagggtatcgatctagaatggatagataatgattctagagcagttgaatacgaagttagacgctatggcggagatcaagatgctatttttaagggtataaaagaaaaaagattaaaagatatcaaagctttgccaggcgtggagtatagttatgaggtgatagcgattgattctgttggtcttcgttcggaaccttcaaaaagagttaaggcagggcaatagtgccaaattttaaagcgagaaaacttaaagaaatcattctaccctttgaaaaagatggggtagaatttgtttggatggcatataatgacaatgtgaatttaatctatacaaaggttaaagaagaaagtttttttctacagattaaaaaaggagaaaatgaatttgtagttaaggtagataaacatactaaaccttctaaaatagcttatttgcacaaggctttagatatctttaaacaatatttttgcgaagatattatcagtgaggctttcggtgtaaaaaacaatgctttggctgaaaaaactcctttgattgctaatgattttgaagaggtgttagcaagacttggaggcaaaatttacattgaaatcggctttggttcagggagacatttactttatcaagctaaaaacaatcctcaagttttaatccttgggatagaaatttataatccagccatcacacaggtagcaaagcttgcaaaagcacagggtattgataatattttattaattcaaagtgatgctaggcttttactaagcgttcttcaatctcattctatagaaaaaattttcttacactttccagttccttgggataaaaagcctcatcgccgtgttatttctaaagcattttgtaaagaatgtgcaagagtgcttacagtacaaggagtttttgaacttagaacggatagttatgagtattttgattttactcttaaggaatttttggaattctcatcgccacaatttagtattagaaaaaatgaaaatttagaaatttctagcaaatacgaagatagatggaaaagacaagaaaaagatatttatgatctttgggtgtggaatttagacaaggaagaaaacgatatctttgtagaagaatttgatttttcagatatgcatttaagcagaaatgatttaatgcttttagagaaaaattttaaaaactttaccctgaaaaaagaggatttcttcttgcattttgaaaatatttataagcaaggggagagtttattgttaaagatagcctttggtgcgtttaataagcctgagcactgctatttacatatagatgagacgattagctttgtttttaaggagccttttaaaatacaagaaaatttaaaagctataaaaatgcttaaggaaagtattaaatttcattttaatacagatcattttcttgaaaattaagtaaaaataaagcataatttacgaattttgaaattcaaagaggatggaatgtcaaatttaattcaagcacataaactttctttaggttatgatgaattagttatcaaagaagctagctttacttttaaagatgatgattttgtatttattacaggtaaaagtggaagtggaaaaagcactctgttaaaatctttttatggggatttagaactcctttcaggtcagcttgaagtatgcggatcttctatgcgaaagatcggaaatttagagcttttaaaattgcgtcagcaaatcggtattatttttcaagattatagacttatacaagaatacagcgtggaaaaaaatgtcatgcttcctcttatgatcaaaggttatagtaagaaagtttgccatgatcaagctagtaagcttttaaagcatgtaaatttgacatttaaagcagataaattgcctaaccagctaagcggaggagagcaacaaagagtcgctatggctagagctttagcgcacaatcctaagcttttgctttgcgatgagcctacgggaaatttggacgagtattcttcggatattatttggacacttttaaaatcagctagagagcttttaggtacttgtgttgtggtggttacgcatagaattccgagcaatttaagactgaattatcgtcgtttcaatatagaaaatggaaatatgaatgaaattttttaaaactcacttatctttgattttgcctttgctttttatgatgtttgcctttgagtttattttacttacaaatgctactttaaaatactacgaagagcttgtcaataaagattataatattattgtcgcaagttctactgaacttgataagaatgttataaaaaccaaactttcttctttttctagtttggaattattagatcctaaggatttgatagagcgtttaaaaaatgatgtttctgataaaaatttaaaagttttgcgagattctttgcctaaattttatagtattaaacttgattatttgcctacgcaaaatgagcttaatactattaaaaatcagcttttaagtataccaagcattagtaaagttgaaacttttgctaaaacgcatgataaggtttattctttacttgttttgatgaaatttgtattttggctgtttttatttatcattatcttgctttcctttgttttatttttaaaacaaatgagaatttggctttttgaacacaccgagcgcgtagagattatgtgcttgtttggtgcacctttttggtttagatctttcatgctgtataagattgtagtagtggattgttttattgcttttgttattttgtttatatttttcacacaaatttacgatctttctatagttcaagatagcctaaaggcagttgatattatcttgcctcctattaattttatcgtgcatttgggtgtgatttttttagccactttatttgtatgcttattgtgcgtaaattcggtgatgtttagggtgaagaaatgagaaaaattttaatttttctttgtttttttttactaagcaatgaaatttatgctaatgctatcaatgaaaaaaccaagaacttagcagaaaataaacgcattcaagagcaagtaaataaaaagcttgaagatttggcaaatgatatattaaatggggaaaagagtttaaaagaactgagtgctcaaatcgaaactcttaattctcaaacccttaagcttgaagctcgagccaaggcacaaaataaagacttaaatttgcttacaagccaaaatacagatcttttaaaaagcaaagccagtatggaaggcaagcttatagccttaatggctaaagattttgcttatgatttacctataccgcaaggttatgttgaaagcaaggaaagctttatggcttttgaagttttaggcggcttggataaaattttacaagatgaaatttttaagctttctaaggattatgaggatataagcaaactgatcgatagcaagcaaagtcaaattaaaaaaatcaatgaagatttaaaagattacaatgctcaattagcaaaacttcaaaatctaagacaaaagcaagttaaagaaatcaataaacaaaaaaccgatcgtgcgatttatgctaagaaactcgagaatttacaagatcagcaagatgagttaagaaaaactctaaatcagttaaaaattatagaaagtaaacaagaagacaaaaaacaaacccaaaaagttgttagcgatagcaaaatcactaacaatacccaaaaaattcgtcaaattggttctagctatcaaggaagcactactaagcgctatacaggtaaaaaaactatagctcctttagaatcctttactgtaaagcaaaaatttggaaattatatcgatcctgtttataatattaaaattttcaatgaaaatgttgttttaagaagtaaaaaatcagatgctgtggtaaaaagtgttttagatggaaagatagtttttgctaaagatacaagcatgcttgcaagagttgtgatagtcgaacatgataatggaattcatactatttatgcacacttggataagatagcgcctaatatcaaagtgggtaaaaatgtaaaaaaaggtgcggtagtaggcaggataaaaaatgatttaacttttgaagtaacacaaaagaattttcatatcaatcctttagaacttattagcttaaattagctaaatttaatggaattttcaatataatttcgagttgattaaggagaaaaaatgcaagagaaaaaaagagttttagtaaaattttcaggtgaagctttagccggagaaaatggctttggtattgaaaattctattttaaaattcatagcgaatgagattaaagaactagttaaaaataatatagaagtaggtatagttataggtggtggaaatatcattcgcggtgtttcagcagcaaaaggtggtcttatcaaacgcacaagtggtgatcacatgggaatgcttgcgaccgttattaatgctatcgctatccaagaagctttagaaagttacggacttgatgtgagagtacaaagtgcgatccaaatggaagctttttgtgaaacttatatcatgagaagagctcaaagacatttagaaaaaggcagagttgtgatctttgctgcaggcacaggaaacccttattttacaacagatacaacagctattttaagagcagttgaaatcgatgcgcatatggttatcaaagcaacaaaagtaaatggggtttatgataaagatcctaataaatttgatgatgcagtatttttacaaaccctaagttatgatgaggcaatgcaagataatattaaagttatggatgatactgcaatcgctctagctaaggataattctttacctatcgttgtatgcaatatgtttgaagaaggaaatttattgaaaattatacaaggcgataacagtctttgttctatagttaaaaattaatcaaggagaaacaatggaaaatagaatagaagaaatagcagctaaagcactagaaaaaatgggagatgatcgttaccgtctttctttggttgttgcaaaaagagcagagcaattggctgatggtgcagcacctttagtagatgttgataaaaataaatttaaatttgctgatattgctttatacgagatagcagaaaataaaatcactttagagggtctagttgaaaacagtcgatgaggaattattgctcgaaaaactcattgaagatattaaaaattgtagagatttaacaagagcaaaagaacttctttttagcatttgtcaagaggatgctattgtagaaaaggctgtggattattgcataaagtcccacgaaggtcagataagaaaaagtggagaaccttatgcagttcatcctatcctagtcgcatgcttagttgcttttctaagtgaaaataaagcttcgattttagctgcacttttgcatgatgtgatcgaagatacacaatgtaccgaagaagaacttagagatcagtttggatctgaagttttaaaacttgttttaggtcttacaaaaatcgtagaaatcagagaagataatctcattccttcaaaatcaaagaaaagtttaaccaaatctgctcttacatttagaaatatgcttttggcaagtattgaagatgttggggttttggtggtaaaactttgcgacagacttcacaatatgctaaccctagacgccttaagaccggataagcaaaagcgtattagcgaagaaactttagtcgtttatgcacccatagcgcatagacttggaatttctagcattaagaattatttggaagatttgagttttaaatatttaatgcctgatgagtataagcttatcgataattatatcaattcaaatgatcagcaaatgcaactagggcttaatgaatttatttcaaaaatcgaacttttatttcttagcaatggctttagacaaggaagttttcagattcaaaagcgtatcaaacatagttattctatctatcttaaaatgcaaagaaaaggcgtgggcatagaagaagtactagatctacttggtgtgcggattttggttgaaaatgtgagcgattgttatttggctttaggggttttgcatacaaattttaatcctttggtttcgcgttttaaagattatatagctttgcc

SEQ ID NO: 4048 - DNA, 21692 bp, synthetic construct
  source 1..21692: mol_type = other DNA
  misc_feature 1..21692: note = Synthetic
ttttaaaggcgatactcaaggttcaaacaaaaaacctgctacacttgaaacaggcgcggttgtgcaaattcctttccatgttttagagggcgaagttatacgcgttgatacagtgcgtggagaatatatagaaagagctaataagtaatttaaaaagcttttgattcatttcaaaagctttgctttatcacttaaatttttatccttataaataaaaaatattttttacatcttcccttaattaaatcagtttttacttattgtttgaaaaataaagcttcaaaagactaagataagcaacaaatcttataaatttttaagtaatatgatcagaatatacaattgatttatctttgttaaaagttttggatgaatgagtaaaattgtaactagtatgaattatttaacaataaaaaaatttattttattattaaaatattatttttctgctattatgctcacaaattaatttttgaaggaaataaatgatattgttgataatttcttgtattttactagcaattgtcttaggttatattaccaagataaatgtgggactttttgctatggttttttcttatattataggtgccttttttatggatctagaagttaaaaaaatcattgctttttggcctatttctatattttttgtgatttttgctgtttcacttttttacaattttgctgtggttaatgggactcttgaaaaattatccggacatttaatgtatcgttttgctaattatccttatttgttaccttttgttatttttgctatcagtgcgattatcgctgctttgggtgctggattttatacagttttggcttttatggcgccgcttacattcttactttgtgataaagtgggtttaagcaaaattgcaggagctatggctataaactatggagctttgggtggagctaatttcatgacttctcaaagtgggattatttttcgtactcttatggaaaaatcagggattgatacaggtgtagcttttataaattcgagttttatttttatagcgactattgttttacctatctttgttttatcgtttttcgtattgagtgcttttaaaaacaaaacacaggtgagtgtgatagaaaaaccagaagcttttgatacaaagcaaaaaacaactttgattttgatgtttataatgatatttatcgttttggcagggcctatagctcatcttatttttcctcaaatttccataatagagtattttaataaaaaaatagatattgcgatgatagctattatttttgttgccattgctttattcttaaaattagccgatgagaaaaaagttatagcgcttattccttggaatactttgattatgatatgtggggtagggatgcttattagcgtagcggttgaagcagggacaattaaatggctttcaactcttgtaaaaaatgaagtgagtgtggtttttatccctttaacaatgtgtgtcatagcggcctttatgtcacttttttcaagtactttaggtgtggtaactccagctctttttcctataattccaagcatagctcaaagtagtggtttaagcgaagccttactttttacttgtatagttataggtgctcaagcttctgcgatttctccattttcttcaggaggaagtttgattttaggtgcttgtcctgaaaaatatagagaaaaattatttaaagatttgcttgtaaaagcagtgccgataggttttggtgcagctattatagctaccattattatcagttttattttataggggttttgttatgaaaatagatactcacgcacacatttttttaaaagaattaaaaagtattgaaaatgcacgttataagcctgattatgatgcgagttttaaagattataaggtaaatttagatcgttatgattttgacaagggtgttttagttcagccaagttttttaggtgtagataatgagtttttgcttgatagcattaaagatgatgaaaatattaaagctattgttgtagtagatgaaaacattaaatttgaagaattggaaaaaataaaaaaaagaaaagcttgcggtgtaagattaaatcttatcggcaaggagttggatgattttaaaaatcctatttggatggaattttttgaaaatttagctaagcttaaaatgcaagttgaaattcaaagagatttggatgatgatcttgtaaaaatcattaaacaaatccttccttttggttgcgatatagttatagatcatttagctagagcaagtgataaatctaaaaatttagaagaattacttcatcttaaaaatcctaaagtattttttaaaatcagtggattttatagggcaaaaattcattacactaaaaacgaagaagcaataaaatttgctaaaacaatgtatgaaattttaaaagagcattttttacctaccaattttgtttttggaagcgattggccacatactaattttgaaaaaaatatcaattttctaagtgcttttgaagcttttgaaaaaattgttacctccaaaaaagaacaagagcaaattttaggagataacgcttgtgctttatttggtttttagtcttactctaaaaatatattttgcaatgtattcaaaatattttcttaaataaggcttgtgaataacaaaaccccctagaagtcctaaaaggcttcctatgataatatcttgcaagcgagcatgtattaacatatcgacgcttaagtttccaaaagaagccgcctcggccaaataagtcacataaggagtaagaaaaattacggttaaggcgtagtttctaactactaaaaactcaattataaaggctaaaaacatcatcaaaaagacaaattctagaggggtaaatttgatctttaaaagccaccatgcaaataaaattcccactgtcgtcccaagaatgcgttgaagctgttttatccagactgattttaaattggctccttgcaagataacagttgtactcactgcaacccaataacttctatcgagttctaaaaatgctcctagaaacactgcaaaaccaacaaaaaaagcaataatcatagaatccacaaagatgatatcaaaacccaaatttccattctgtaaaacaggcttgggtggggaatttttaaaaatataaatgacagatatagagtataaaaaagcagctatgttggcaataataccacctatacaaatcaatcccactagaaaaatataatctttgggtggaaaaggaaaaaatgaagccaataagcaggaaaaaacaaagaaaaaataccccggtgcacctatattgtaatagcgtatcaaaatagagctagtcatggctactagaccgattatgagcggagaaaacgcaggaaaaaaatgggtgcaaagtcctattaaaaaagataagcacaaaccaaaagaacagcacattgtaacagccattctgtgatatataggtgtattggttgtataaacaaaagccataattcctatcatagcaattagccctaagtccatacgctcataatatgcagcaatactaagtgcaaatccaactgccaaggcaaagaaaaaaggcatttgccaaactctttcagttggattaagctgtatgatttctttgcattgttgttttaaaattttccttttgctcattttcttatttgtccttctccactgattaggtatttataagtacaaatatcttcaacccccataggacctcttgcatgaagtttacttgtggaaattcccacttctccaccaaagccaaattcacccccatcactaaaacgagtcgaggcattgacataaatacaagatgagcgtagaaggcgttgaaatttacctatgtttaaagcattgtttgagattatggtttcagagtgtaaagagctgtgttggttaatatgctctatagcctcatcacaatcttttaccgattttatactgatagcataatcaagccattctgtatcaaaagtgctctcatcagcctttgaaatttctaattttgagtttttaaaatgctctaagatattttcatgtgcgtgaatttttaccttaaatttttcaaattcagggattaaaagttttataaaatgtttagcaattttttcgtggatcaaaagggtttctagagcattacaaacgcttactctttggcattttgcattaaggatgatttctaaagccatatttaaatttgcactctcatccacaaaagcatgacacaagcctttatcttgtttgatgagtggaatttttgtatgactagcaatttcttgtatcatatttgaacttccacgaggaatgatcacatcgactaaatcatcaaaagctaaaatttgcatgatctcatttctttcataaaacatagcaaaacaatcttgcaaattaaactcttctagtactttataaacaagatcaaatatagctgaatttgtaaattttgcttcgctgcctcctttaagtacgcaagcattggagctttttatcattaaagcgatgatttcagcacttagactcggtcttgcttcataaatcacaccgattaaccctataggaatgctgactttttctatctttaagcccgcataattaacccagcctttggaaattttacctataggatcttctaaataagcgattttttctaaagcatcgcaaagagaaaaaatgcgtttttcatctagcaaaagtctgtcccgcattgctccacttttagtaaaattgtctatatctttttcattggcttctagtacggttttgaaattctttcttaaagtgtgagctagttttaatataatattttctttatccttgggtgttaaattaagtagtttttgagaatttttcttaatattttcaagtaaatttcgcatttttaatcctttatttacaaaaaacttgataaattatacaaaaaaatttagaattgaaaggtaaattttcgaatgaaaaaagtagatttaatcgtagtaggtgcagggccaacaggaattggctgtgcagttgaggctaagcttaaaaataaagaagttttagtattggaaaaatcaaacaatatttgccaaactttaatgcagttttataaagatggcaaaagagttgatatggcttataagggttgtgaaggaacaaatcacggacatgttccttttcaagatggaactaaagaaagcaccatagaaacttttcaaaatgctttaaatgagcataatatagaagttgaatttggctctgaggtagagagcgttaaaaatgaaaatggagtatttttagtaagcacaggcaagggtgtttatgagtgtaaaaatatcatcgttgctataggcagaatgggtaagcctaataagcctgattataaacttcctggaactttaacaaagattattaatttcaatgccaactctgttttaggtgatgaaaaaatcctcgttgtgggaggcggaaattcagctgcagagtacgcagtggatttggctagttcaaacaaagtaagcctttgttatcgtaagaaagaatttacaaggctaaatgatatcaatcttaaagatatccacgaagctggaaattcaggcaaagtagaattaaaactcggtatagatatagaagagcttgaggatgataatggcaaagctaaagtgaaatttaacgatggtagcagtgagacttatgatagaatcatttatgctatcggtggttctactcctcttgattttttacaaaaatgcggaatcaatgttgatgataaaggagttcctttaatggatgaaaataaacaaagcaatgtaaaaggcattttcgtagcaggagatattgcaactaaaaatggcgcaagtatagtaacaggtttaaatgacgctgtaaagatacttgccgtaatttaatcaaatttagcccttgggctgaatttgacttattaaactttcaatattataatttcttcattatattttaatttttaaatattattatgcaaacacaagataaaaacaataaaaaaattataccgatagaaacctatcgcttagctttctacatactaggacttcaaacactctattagctccttttaagatatttgtattgttaaatattttaaaggattttttatgtcaaatatttttagcactttaagcccttttaggctttttgttaaatgtgctgtgcctaatgtaataagcatggcatttatttctttttattatattgttgatggaatttttgttggaaaatatctaggaaatgatgctttagcagctttggccttgattattccttttattatgatatcttttgctttggctgatatgatagccattggttcagctgtacaaatttccatgcatttaggacttgggaagaagcatttagctagaaaaatctttagttctagtatgttgattatcttccttatttcatgcttggtaggtattttagaatatcttttgagtcctgttttgatcgattttttagatgtaaatgaagatatcaaatcaatggcaaaagagtgtatgcttgtatttgctttgtttgccccctttacaatgtgttcttttgctttggataattatcttagaatttgtggaaaaacaacttatagtatgataatgaatgtgattatagcattgagcaatatagtgcttgattatattttcatcgttgtgttgggttggggattgttttcagcagctcttgcgacttgtttgggacttatgttaggtggtatttttggaatttttccttttttatttcaaaatttagagcttaaattctcaagtttgtatatgaatatgaagattttcaaaaatatagtttataatggaagcagtgaattttttggcaatatctcgggttctttatatggcatatttgctaatttggttttattaaaaatttcaggtactcaagcggttgctgctttttctatcgtttcgtatattgataattttatcattatgcttattatcgctatgggtgatgcgatgcagcctgcgttaagttataattatgctaaaaaggatttttcaaggattaaagatattttaaaggtaatgttttttgcgggtgcgattttgtctttactgtctatcgtgatgatatttgtttttggtaaggatttggtgggattgtttactcaagaaggtgatcaagaatttatcgtttttgcttatatggctttgatactgttttcttttaattatctttttgcgtggtttaatgttttaagcggttcttttttaacagcgagcaataaagcgagtttttctttaattttaagcttgagtcaaaatctttttattcctttgtgttttcttttgattttatcttctatcatgggcttaaaaggagtgtggcttagtccattttttgctgaactttgtgttttgattttagcttgtattttcgttagaaaagtctttaagaaactatcgttttcataatgatagtttctttagattgattttagaatttatatcctacacctgtaagtaagatgtggtatgtttcatcgtaaaaatctatatcgctatttcttttttctaggccataatttgcaaaggcataaagcgagtcatagcctaagaattgattttttacgagcttgagattgagttttgtaatactaccgtcttgttttttgttaaaaataggatctgtgccttctgctttgtattgatttaagcttaagcttggggttaggatatagttttttgcaaaaactagatgtgtgcctattttaaagccatatcttgagtagctttgagcttttccatcggcatcattgtaatcatagtttaagcctaaatttaataaagaataattatagcttaattctaactcatgataatttccctctcgcttaagagaagtaaatgctacgctttctttgtctaatttgttttttgcaaaaacataagaagcattaaattttccaaaatcactttcgtaaagttgtgaaattttaaagccgtatttgctcacatcggtttcttcgcgattgcctatagcataaggattagcataggctttttctcttaaagatgaaatgagagaaaaggaagtactaaagcgttctagataagctctttcatagcccaaagcaataccgcttaaatctcttccgttatagtttttaagaaatactctatcattatcgattaaattcccatagtaaagctcaagacctataagagggatagcagaagtatcggaattatcagcattgtatccgcttagataatcgctatttgctagaggtgagatattgcttttaacatctcttgcgcctattcctaggcttaaatttccactaaagccactttgaaattctatagatgaagcttgacttatcatcaaagaagctaaagcaaaagaaagtaaggtttttttcaaaataaactccttgtatagttttataattaaaattataactttattgtaactaatattactttaattttttataaaaagcttatgtgaatttttagattcttttagataaaatctttcaataatttttactcaaaaaaggaaaatagggtgcagcaagagcattttgatttggatttagaacgcgcaattttaagtagttgtatcatgagcgaggatgcttattctagtatagcaggagatatagaacctaaagattttagtcttaaagctcatcaggatgtttttaaagctatcattgcttgcgtgaatgctggagagcctatatcgattagctttttaaaaaaacacaaaaaaatagatgaacaaattttaacagagattatcgcaactccttcgataatagatctccccgcttatgtcaatgaacttcgcgaaaagtcgattaaaagacagcttttaagttttgcacatcttttgccaacacggatcaatgataatcgcgcagtcagcgaaatttctgatgaaatcggcaaggaaatttttaacattaccaaccgtgtcaatactaacgatatcaaagatatagaattggttttaagcgagcttttagaagaattcaaaaaacaaaaaagccttgaaaataaaacagtgataggacttgatacgggttttgaagatctaaatactatgactaagggttttaaaggtggggagcttatcatcatcgcagcgcgcccaggtatgggaaaaacaactctgtgtttaaattttatagagaaggttttaagacaggataagggagtggtaatgttttcgcttgaaatgcctgctgctcaaatcatgcaaagaatgcttgcggcaaaaacttctatccctttgcaaaaaattttgacagcggatttaaatgataatgaatgggaacgcattggcgatgcttgtaattattattctaaaaagaaattatttatctatgatagcggttatgcgactatcacagatgtaagagcgattttaaggcgtttaaaggctcaagaagaaagcatagggctttgcgtgattgattatatagggcttatgatgagtaattctaatttcaatgatagacatttacaagtcagcgaaatttcaagagggcttaagcttttagcaagagagcttgatatgcccatcatcgcactttcacagctcaatcgttctttggaacagcgtgcaaataagcgtcctatgatgagtgatttgcgtgaaagtggggctatagagcaggatgcggatacgattttgtttgtgtatcgcgatgaggtttatagggagcaggatgaaaaagaacgcgaaaataaagcaaaagccgaaggcaagccttatcaaagaaattttattcctaatcctatgcaagaaaatgctgaaattttagtcggcaaaaacagaaatggtcctgtaggggttgtcgaggttttatttttaaaagaaaaatcttgctttgtggataagccgaaatttgagagtgttgaatttcaggagtagggttaaattgttaaaggtgctttgatgcgaaagcaatgttatttaaaatcaatcataaataccataataaaagcgagaacgaatgaaaattttaggttttgatatagggattaactctataggttgggcttttgttgaagataatcaattacaagattgtggtgtaagattatttaccaaggctgaagatcctaagacaaaagaatctttagctttacctagacgcaatgcaagaagcaatagaagacgactaggaagaagaagatcaagactgattgctttaaagcatattatttcaaaaggattaaaattaaattatcaagattatatagcaaacgatggagaattgcctaaagcttatgaaggaagacttataagtccttatgagctaagatataaagcgcttaatgaaaaaatagaacccaaagatttagcaagagtgattttacatatagcaaaacatcgtggttatatgaataaaaatgaaaaaaaatcaagtgataatgaaaaagggaaaattttaagtgctttaaaaacaaatgctttaaaattggaaaaatatcaaagtgtaggagagtatttttataaagaatttttccaaaaatatagagaaaatacaaaagattttataaatatacgcaataaagaaggcagttatgaaaattgcgttctagcaagtgatttagaaaaagaattaaaactgattttagaaaaacaaaaagaatggggatattcttataatgataattttataaaggaaattctaaaagttgcattttttcaaagacctttgaaagatttttcatatttggtaggagcttgcaccttttttgaagatgaaaaaagagcttgtaaaaattcatatagtgcttgggaattcgtagcattaaccaagattatcaatgagctaaaaagcttagagaaagagagtggagagcttgtatcgagtcagattatcaatgaaattttaaatcatatcttagataaaggaagtatcacttataaaaaatttagagaatacattaaacttcatgaaagtatgaaatttaaaagtctaaagtatgataaggacaatgtagaaagtacaaaactgattgaatttagaaaattagtcgaatttaaaaaagccctaggagagcattccttaagtagggaagaattagatcaaatagcgacttatatcactctaattaaagataatgagaaattaaaaattactttagaaaagtatagtttaaataacgagcaaatcaagaatctgctagaaattgatttcaacgatcatataaatcttagttttaaagcacttaatctaatcttgcctttgatgaaagagggaaaaagatacgatgaagcttgcaagcttttaaatttaaaaacaaaatcaaacaatcaaaaattcgatttcttacctgccttttgcgatagcatttttgcacaagagctcaccaatcctatcgtaaatcgtgctataagcgagtatagaaaagttttaaatgctttgcttaaaaaatatggaaaaatgcataaaattcatatagaattagcaagagatatagggctgagtaaaaagcttagggctaagatcgaaaaagaacaaaaagaaaactatgagaataatatttgggctctaaatgagtgtgaaaaatttggacttaaggcaaatgctaaaaacatcttaaaattaaaactttggaaagaacaaaaagaattttgtatttatagcggtaaaaaaatatccatagaacacttaagagatgaaaaagctttataggttgatcatatatatccttattcgcgaagttttgatgattcttttttaaataaggttttggtttttaccaaagaaaatcaagaaaaactcaataaaacaccttttgaagcctttggagcaaatgaagaaagatggagtaaaattcaagctttagctcaaaatcttccctataaaaagaaaaataaaattttagacgaagcttttaaaggcaagcaacagcaagattttatcagtaggaatttaaatgatacaagatatatttcaactcttattgttaaatacacaaaagaatatttagattttttacctttggatgaaaaagaagatgtaaatctaaaaagtggagaaaaaggaagtaaaatacatgtgcaaacaatcaatggaatgcttacatcagttttaaggcatacttggggatttgctcaaaaagatagaaacaaccatcttcatcacgcgcttgatgccacgatagtcgcttatagcacaaatgccattataaaagctttttcagattttaaaaaagaacaagagcttttaaaagcaaaactttatgctaaagaacttacaagtgatagttataaacatcaagctaagttctttgagccttttgaggggtttagagagcaaattttaaatcaaataaacaagctttttgtttcaaaacctcctagaaaaagagcaagaggagctttacataaggaaacattttactctaaagatgaaatgattaaaaaatacaactcacaagaaggtgtagaaatagcgctaaattgtggaaaaataagaaaaataggtacaaaatatgtagaaaatgacaccatggtaaggattgatatttttaaaaaacaaaataaattttatgccatacctatttatactatggattttgctttaggagttttaccaaataaaatagtaattataggtaaagataaaaagggcaatccaaagcaatggcaagaaatagatgaaagctatgagttttgtttttctttgcataaagatgatttggttttgatacaaaaaaaagatatgcaagaacccgaatttgcttattataatggttttgatatcagtaactcaagtatttgtgttgaaaaacatgataataaatttgaaaacttaacagacaatcaaaggctattgtttacaaatgcagaagaaggaaatgtaaaggctaaaaaaataggaattcagggattgagaattttcgaaaaatacattataaccccgcttggagaaaaaattaaggctgattttaaaccaagggaagatattgccttaaagacgagcaaaaaacatggcctatgatgaagcttttaaaagtatattgatattcaatcaagcaaactaagtctaataaaattagacaagctagtttgtttgaattttaacggttttaaagggattgtaaccctgcgtggctaaccgaaaaccacttattttagtctctttttaaatttctcttttaaaatgatagcatatttttatacatttttgtatacaaaaagctctatttttctttatttgttcaaagtctattttaccataaagaaatttaaaaagagactaaaacaggaagactagctttagaaaatgaaaaattattttaccataaagaaatttaaaaagagactaaaacatacaatatatcaccttcataaactttattattttaccataaagaaatttaaaaagagaatcggtttctatttcaatttaaggtgatagtaaacggtatagattatttgtagttaaagttaatttaattcattttttgggattagatatgtacaactaaagtagtggtggatttagcaggactcgaacctgcgaccaaccggttatgagccggttgctctaaccaactgagctataaatccgcctttgatttgtgaagatagaattatatcttatctttgcttaaagttattttatttatttttattatctgtccaaaaatatctaaaagtgattaaatgttgtaaaattccaaagaaaatcataaaaattgtaaaagaacttccaccataactaaaaaaaggcagtggtataccgacaaccggtgcaaaacctatagtcatcgaaatattaactcccgcataaataaaaataaacaatgccacgcagtttatggcaactctagcaaaataatcatttttaagcttatgattaagacttagcaagtgaaagatgagcaggatataaagtaggattaaaacaaacccgcctataaatccaaaacgctctataagatatgcaaagataaaatcactcgtagcgataggcaaaaagttaaaatgtgtttgcgtggcttcgtcttcggatttgcctatgagtccgccattgcctatagctatcatcgactgtgcgacttgatagcttggtttttctgagataaaatcatgaattctttgtttttgataaggctttaaaaaatgcgtataaataataggagaacttatgccaatagcgatgatgatgctgagccaaattttataattcacacccatgataaaaagcacaccaaaacctacgatcaaaagcaccatagcactacccaaatcaggctcttgagcgatcagcaaaaaaggcaagatgataaaaaaactaagttttagaaattgttttaatttatagccatttttgggcggtggattttgatagatgagataagcaagcattaaaataaagctgggtttaaaaatttcagaaggttgaatggtaaaatgagtaaatggaatttcaagccatcttttggcgcctagcctttcaactccaaaaatatctgtacttaaaagcaaaaagatatttacccaataagctacaggtatgagccacataagtttgcgtatgggtagtaagaaaaatacactaaatgctgcaatccctacacaggcataaacgaattgtttttcagctaaaaaggtattggcttcgtatattaaaaaaaatgaaattgaaatgataggtataaataaaataggttgtatataatcaaaatgtgttaaaattcttctatcgggtataaacaaaatttgccttcaatttgtagtattaaattataattataggataaaactctaaattgtataaaattttataaggaaaaaatgcaaacttttttagtcgatgaatcctcaagacttgatatttttttagctaaaaatcttaatcaaagtcgcagtcaaatagctttaatgatagaaaaaaactgcgtttgggttaatgataaaattcaaaataaaaattcattcaagttaaaagtcggagataagcttgttttaaatttgccacttgtagaggaagctaagcctaaatttgatatagattttgatatagaaattttatacgaagatgaggatttgttggttttaaacaagccttcaaatttggtagttcatggagcaaagagcgtgaaaagcgcaactttagtggattggcttatagaaaaacaatacactctttctactttaggcggagaagtgcgagcagggcttgtccataggcttgataaagaaacaagcggagctatactgatcgcgaaaaataattttgcccatcaaaagcttagtgagcaacttagcgataaaactatgggaagaatttatctcgcgttaattgatttgccactaaaagaggataaaattatcatagataaagccttgattcgttccagtgcgaatgctattaaaaaaatagttacaaattcccatactaggggctctaaggaagctaagagtgcttttgtcaatttggcaaaaagtaaggaattaagtcttattggggctaaactttttacgggtagaacgcatcaaatcagagcgcatttagctagcataaatcgtcatattttaggagatgaattatacggttataggggaaaatacgagtgcaggatcatgttgcatgcgtattttttatattttgttcaccctagaaatggagaaaagatatttgttcaagctccattgatgaatgattttaagcaaattttagaaaaaaattttattttaggagagcttaatgaaaaaatttcacttgagtctttgcttgggtgctttgactcttttatttagtgcttgtagtgtttcacaactttctagcgtgggttctagtaaagaacttttagttaatgaaagcttgccaaagattgaaaatttaaaaagcttgagtgatattagcaatatagcgtttgaatgggagcctttgtatgatgataatattaaaggattttatttatatcgttcaagtgatgcaaatcctgaatttaagctcatagggacgataaaagataaatttcaaacccattatgtagatgctaaacttgagccaaatacaaaatattattatatgatgagaagttttaacaatcaaggtcatatttcagaagatggaaaggtagttgaagtaaaaactatgccaagattagaggctgtcccttttgcacaagctattacaaatctacctagccgaatcaaattgatttggcgtccgcatccagatccaagagtggcttcttatatcatagaaagagctaaggcggatgagcaagaatttaaaaaaatcgccgagataaaaaatcgcttgaatgctgaatttatagatgaggatttaaaaccaggggagaatttcagctacagaatcatcgctgttggatttgacggagtgcaaagtgagccaagttctgttttaaattctacaagcaaggctttaccacctcaagttgagcatttaaatgcaagtttagatggctctaataaagtgattttgacttgggatgctcctaagtatcaagatttttcatattataaggtttattctacgagttcaagtttacttccttatactcttttagctaaaactgagcaaaattattatgaagatagggttgagggtgctgcaaaaagcaagtattataaagtaaccatggtggatgtagatgggcttgaaagtcctatgcctgaaaatggagtagagggcaaaaccttaggactcccgtcttctcctactgtgattttagctcaaagtacaagtgagggtatcgatctagaatggatagataatgattctagagcagttgaatacgaagttagacgctatggcggagatcaagatgctatttttaagggtataaaagaaaaaagattaaaagatatcaaagctttgccaggtgtggagtatagttatgaggtgatagcgattgattctgttggtcttcgttcagagccttcaaaaagagttaaggcagggcaatagtgccaaattttaaagcgagaaaacttaaagaaatcattctaccctttgaaaaagatggtgtagaatttgtttggatggcatataatgacaatgtgaatttaatctatacaaaggttaaagaagaaagtttttttctacagattaaaaaaggagaaaatgaatttgtagttaaggtagataaacataccaaaccttctaaaatagcttatttgcacaaggctttagatatctttaaacaatatttttgcgaagatattatcagcgaggctttcggtgtaaaaaacaatgctttggctgaaaaaactcctttgattgctaatgattttgaagaggtgttagcaagacttggaggtaaaatttacattgaaatcggctttggttcaggaaggcatttgctttatcaagctaaaaacaatcctcaagttttaatccttgggatagaaatttataatccagccatcacacaggtagcaaagcttgcaaaagcacagggtattgataatattttattaattcaaagtgatgctaggcttttactaagcgttcttcaatctcattctatagaaaaaattttcttacactttccagttccttgggataaaaagcctcatcgccgtgttatttctaaagcattttgtaaagaatgcgcaagagtgcttacagcacaaggagtttttgaacttagaacggatagttatgagtattttgattttactcttaaggaatttttggaattctcatcgccacaatttagcattagaaaaaatgaaaatttagaaatttctagcaaatacgaagacagatggaaaagacaagaaaaagatatttatgatctttgggtgtggaatttagacaaggaagaaaacgatatctttgtagaagaatttgatttttcagatatgcatttaagcagaaatgatttaatgcttttagagaaaaattttaaaaactttaccttgaaaaaagaggatttcttcttgcattttgaaaatatttataagcaaggggaaagtttattgttaaagatagcctttggtgcgtttaataagcctgagcactgctatttacatatagatgagacgattagctttgtttttaaggagccttttaaaatacaagaaaatttaaaagctataaaaatgcttaaggaaagtattaaatttcattttaatacagatcattttcttgaaaattaagtaaaaataaagcataatttacgaattttgaaattcaaagaggatggaatgtcaaatttaattcaagcacataaactttctttaggttatgatgaattagttatcaaagaagctagctttacttttaaagatgatgattttgtatttattacaggtaaaagtggaagtggaaaaagcactctgttgaaatctttttatggggatttagaactcctttcaggtcagcttgaagtatgcggatcttctatgcgaaagatcggaaatttagagcttttaaaattgcgtcagcaaatcggtattatttttcaagattatagacttatacaagaatacagcgtggaaaaaaatgtcatgcttcctcttatgatcaaaggttatagtaagaaagtttgccatgatcaagctagtaagcttttaaagcatgtaaatttgacatttaaagcagataaattgcctaaccagctaagcggaggagagcaacaaagagtcgctatggctagagctttagcgcacaatcctaagcttttgctttgcgatgagcctacgggaaatttggacgagtattcttcggatattatttggacacttttaaaatcagctagagagcttttaggtacttgtgttgtggtggttacgcatagaattccgagcaatttaagactgaattatcgtcgtttcaatatagaaaatggaaatatgaatgaaattttttaaaactcacttatctttgattttgcctttgctttttatgatgtttgcctttgagtttattttacttacaaatgctactttaaaatactacgaagagcttgtcaataaagattataatatcattgtcgcaagttctactgaacttgataagaatgttataaaaaccaaactttcttctttttctagtttggaattattagatcctaaggatttgatagagcgtttaaaaaatgatgtttctgataaaaatttaaaagttttgcgggattctttgcctaaattttatagcattaaacttgattatttgcctacgcaaaatgagcttaatactattaaaaatcagcttttaagcataccaagcattagcaaagtcgagacttttgctaaaacgcatgataaggtttattctttacttgttttgatgaaatttgtattttggctgtttttatttatcattatcttgctttcctttgttttatttttaaagcaaatgagaatttggctttttgaacacaccgaacgcgtagagattatgtgcttgtttggtgcacctttttggtttagatctttcatgctgtataagattgtagtagtggattgttttatcgcttttgttgttttgtttatatttttcacacaaatttacgatctttctatagttcaagatagcctaaaggcggttgatattatcttgcctcctattaattttatcgtgcatttgggtgtgatttttttagccactttatttgtatgcttattgtgcgtaaattcggtgatgtttagggtaaagaaatgagaaaaattttaatttttctttgtttttttttactaagcaatgagatttatgctaacgctatcaatgaaaaaaccaagaacttagcagaaaataaacgcattcaagagcaagtaaataaaaagcttgaagatttggcaaatgatatattaaatggggaaaagagtttaaaagaactgagtgctcaaatcgaaactcttaattctcaaactcttaagcttgaagctcgagccaaggcgcaaaataaagacttaaatttgcttacaagccaaaatacagatcttttaaaaagcaaagccagtatggaaggcaagcttatagccttaatggctaaagattttgcttatgatttgcctataccgcaaggttatgttgaaagcaaggaaagctttatggcttttgaagttttaggcggcttggataaaattttacaagatgaaatttttaagctttctaaggattatgaggatataagcaaattgatcgatagcaagcaaagtcaaattaaaaaaatcaatgaggatttaaaagattataatgctcaattagcaaaacttcaaaatctaagacaaaagcaagttaaagaaatcaataaacaaaaaaccgatcgtgcgatttatgctaagaaacttgagaatttacaagatcagcaagatgagttaagaaaaactctaaatcagctaaaaattatagaaagcaaacaagaagacaaaaaacaaacccaaaaagttgttagcgatagcaaaatcactaacaatactcaaaaaattcgtcaaattggctctagctatcaaggaagcactactaagcgctatacaggtaaaaaaactatagctcctttagaatcctttactgtaaagcaaaaatttggaaattatatcgatcctgtttataatattaaaattttcaatgaaaatgttgttttaagaagtaaaaaatcagatgctgtggtaaaaagtgttttagatggaaagatagtttttgctaaagatacaagtatgcttgcaagagttgtgatagtcgaacatgataatggaattcatactatttatgcacacttggataagatagcgcctaatatcaaagtgggtaaaaatgtaaaaaaaggtgcggtagtaggcaggataaaaaatgatttaacttttgaagtaacacaaaagaattttcatatcaatcctttagaacttattagcttaaattagctaaatttaatggaattttcaatataatttcgagttgattaaggagaaaaaatgcaagagaaaaaaagagttttagtaaaattttcaggagaagctttagccggagaaaatggttttggtattgaaaattctattttaaaattcatagcgaatgagatcaaagaactagttaaaaataatatagaagtaggtatagttataggtggtggaaatatcattcgcggtgtttcagcagcaaaaggtggtcttatcaaacgcacaagtggtgatcacatgggaatgcttgcgactgttattaatgctattgctatccaagaagctttagaaagttacggacttgatgtgagagtacaaagtgcgatccaaatggaagctttttgtgaaacttatattatgagaagagctcaaagacatttagaaaaaggcagagttgtaatctttgctgcaggcacaggaaacccttattttacaacagatacaacagctattttaagagcagttgaaatcgatgcgcatatggttatcaaagcaacaaaagtaaatggggtttatgataaagatcctaataaatttgatgatgcagtatttttacaaaccctaagttatgatgaagcaatgcaagataatattaaagttatggatgatactgcaatcgctctagctaaggataattctttacctatcgttgtatgcaatatgtttgaagaaggaaatttattgaaaattatacaaggcgataacagtctttgttctatagttaaaaattaatcaaggagaaacaatggaaaatagaatagaagaaatagcagctaaagcactagaaagaatgggagatgatc

SEQ ID NO: 4049 - DNA, 21638 bp, synthetic construct
  misc_feature 1..21638: note = Synthetic
  source 1..21638: mol_type = other DNA
agttattgatgaagaaggcaataaaaaagatgaaggtgaagatggattgctttgtataaccaaaccttggccttcgatgattcgtggaatttggggtaatgatgaacgctatatagaaagttatttttctcaagctagaaaagatggaaaagctgtatattttagtggcgatggtgctttttatgataaaaatggttatataactatcacaggaagaacagatgatgtggttaatgttgcaggacatcgtataggaacggctgaaattgaaagcgctattgctaaacatccaagtgtagcagaatcagctgtagtgagtattttggatgcgattaagggcgagtcactgtttgcttttgtggttttaagtcctgcatccagttgtgatcttggcggagctatagaaactttaaaagaacttaatgacattttaagagtagaaataggacctatagctaaaatagaaaaaattctttatactccaggtttgccaaaaactagaagtggtaaaataatgagaagaattttaagaactatagcaagaggtgaagaaatcaaacaggatatttcaacgctcgaagattctggagtagtagaaatcattgttaaattagctaaggcagagtttgaataacaaggcaaaaagaactttgccttgttgcataaaaattcataaaaataagctataatgataaaaaaataaaaggaaatttttatgcttcaaacttgtattttccctgcggcaggttatgggacgagatttttacctgcaacaaaaactttacctaaagagatgttacctatcttaactaagcctttgatccattatggggttgatgaagctttggaagcaggaatggaaaatatgggctttgtcacaggacgtggaaaaagagctttggaggattattttgatatttcttatgaacttgagcatcaaatttcaggtacaaaaaaagaatacttgcttgatgaaattcgctctttgatcaatcgttgcacctttacttttacaagacaaaatcaaatgaaaggcttaggtgatgcggttttaaaaggtaaacctttggttggcgatgaagcttttggcgtaattttggctgatgatttgtgtgtcaatgaagaaggcttaaatgttatggctcaaatggtaaaaatttatgaaaaatatcgctgcaccatcatagctgtgatggaagtaccaaaagaacaagtttcaaactatggagtaatttctggaaattttgtagaagaaaatcttatcatggttaattctatgatagaaaaaccaagtcctgatgaagctctaagtaatcttgctatcataggaagatatattttaactcctgatatttttggaattttagaaaatactaaagcaggaaaaaatggcgaaattcaacttaccgacgcgcttttaactcaagcaaccaatggtatggttttagcttataaatttcaagggaaacgctttgattgtggaagtgtagaaggctttgtagaggcgacaaattatttttacgagaaaagtaaatgttaaacaatacacttttttttaaacaaagtgaaattcacactataagctcttatgcaaatcgtattaatgatgaggtaaaaagtggagatatagggtattatcatcttattgacacaagcttaagcctgattgatgagagtttggcttttatcaaagacaaagaacacataaaaaatattgttttagtgggaatgggaggttcaagttgtggtgtaaaagccttgcgtgatatgctttttaatgaaaaaagcaaccaaagagagctttttatactcgataacacaagttcacattcttttaataagacttcagaaaaaatcaagcttgaagaaagtttgttcttaatcatcagtaaaacaggtagcactatagaagttgtatcgctttttaaacttcttattgaacattttaaacttgatatgcaagaattaaaaaaatactttgtttttattaccgataaggattcaaaacttcatcaagaaggtgaaaatttaggtattaaatgcttttttatccctgcaaatgtaggaggtcgttttagcatactttcagctgtaggtatagttccactttgtttttgtggctataatgccaaagctcttttagaaggagctaaagcttgttttgaagatttttttactcataaaaaagatgaaattttacaaaaagcctatcattattgcacacacaaaaatgccaatatcaatgtacttttttcatatagcgatgcttttaaaggctttaatgaatggtatatccagcttattgctgaaagtttaggtaaaaagcaaggctacaaacgcataggtttaactcctattgcactcattggagcaagagatcagcatagttttttacaactcattatggatggacctaaaaataaaactgtaacttttttaaaaatcaaagacgctcaaaaagcgcctattatccctgatattcattttaaatttttagattctttaagtaacaaagtcaatcttcacgaacttttaaacgctcaatgtgatgcaactatgcacgctttaatcgctgaaaatttgagtgttgatgtgatagaacttgaaaaacttgacgcttggcatgcgggatatttgatgtattattatgaactttttacttcaacttgcggtgttatgctagggattaacacctatgatcaacctggtgtggaagttggaaagttgatcttaaaaaatatattaaattcttaatcaaaattcattaaaaaagagtataatgattttaagttaaaattataataaaaatttttaattaataataattattatttaagaattttatgttataattttaaaaattaaaaaaaggagtcaatcatgtcagttacaaaacaattattacaaatgcaagcagatgctcatcatctatgggttaaatttcataattatcactggaatgtaaaaggtttgcaatttttttctatacacgagtacacagaaaaagcttatgaagaaatggcagaactttttgatagttgtgctgaaagagttttacaacttggcgaaaaagctatcacttgccaaaaagttttaatggaaaatgcaaaaagtccaaaagttgcaaaagattgctttactccgcttgaagtcatagaactgatcaaacaagattatgaatatcttttagcagaatttaaaaaactcaatgaagcagcagaaaaagaaagtgataccacaacagctgcttttgcgcaagaaaatatcgcaaaatatgaaaaaagtctttggatgataggcgctactttacaaggtgcttgcaaaatgtaatttaaggggctttatgccccaattatacaaactaggttataatatccttttttaaaggataaaattgaaagtacttaattttttttatgaaaaccaccctaaatttgaagtaagttatgaaagaaaaaatcaaatttcaaaaccaaatattatcataaaaggcccacgattttgtggtaaaaaaacacttatttttaattttttatctcaatttaaagcaagtgaaattttgtttttagatttatatgatacacgctttgaaaaacaaagtttagaaagacttgctgattttctgaatgaaaatttacaaattaaaattctttgcctttataatttggattttatccctaatttagaaaaaattaaaattcccatcatcttaagtacaaatataaaagatttaaatataaatgggtttgaagagcttgaacttgattattttgattttgaagaatttattagtgtaagtaagaaaaatttacctataaataatttagtgggtctttttttgcaaagtggacgcagtaaatttggagaaaaaaacatacttctaagacaaagcttcactcttttagaattagaaattttaaagtatttagctttaaatttgggtcagcaaatcagtatttctaagatatttatagaactcaaaaaaagattaaaaacttcaaaagatagtgtttatcaagctataaaaaaattagaaaatacttatgtgatctatactttaaaacatgatgaaaaaaaacttcaaaagatttattttaaagattttggcctaagaaataatctttgtatttcaaaggatttttcacatttatttgaaaatttagttttaagcgagttatttaaatttaaagaagaatttttttataacaaatactttaacttttatagccaaatatctaaaattgcttatatttcaagtccaactttagatattgatttgattaaattacgtgctaagaaaattttaccaaaggctttagaacttggaatttttcatgtgatttttatcactctttcaagcgaggataatttttttgagcaaggggttaaatttgaagtcatatcttttgataaattttcacttggattttaggtgttgtttgagtttgtatcgtatttttcaaggttgtatcgtttgatgatttttgtaataagattgatataatatcccttgcgttcagaataagaatctaaagttttaatagcctctagccctgttatctctttgccttcgctttcaaatttagctcttacatcgcgaaacttttcataagcaaaatgacgatttaaatttaaaacataagagtcaacactatcttgcagactatcaaaaatcttaattttatgttttttatctggatgtcttaaatcaggaattaaacctttctcaccccaagtccattctccaaaaagattgtttgcttctcttgcgaagcgactggtacctgtagcactttcaactaaagcttgggctatacccatggattttggaattttttgaatacgttttttatattctgcaaaatcataaagattttcaatgcgatatttgttttttatcgtgataagtttttcaagatttatttggtttgaagtcctaaagcctgttttgtaagcatctttaaaaaaggcttcgataaaggctctttcttgttcaatttttttaaagctttgatcaaacatttcattcatttttataaaaaaaatttgtcttttttgatctatatcaagtttgtaatattcctctccaaatccactctttagatcatcagcaaaaagtgggattagaaaaagactaagaaaaattataattggcttcaaaacaatactttacctttccctcaaaaaataattcttcatttttatatgtaaaccccacctcttcaccacttttaggagttattttaactttattttgtacttttttatttaaaaatgccagataaaaacaagcccccattcctgtgccgcaagctaaggtttcatcttcaactccgcgttcataggtgcgaacttttaaatgattttcatctaaaatttttacaaaattaacattggcattatatttttgtctcattttttgacaaagcattgtatcaaattcatctaaattttgacaaaaatgtactagatgtggaactccagtatcgcaaagttgccaagtttttcctaattcttcaaaagtattttgcacgctttttattttgcctaaagatacttcaactttattttgatttacctttgcttttattactcctgcgccagttaaaaaactcatgttaggatttattttgttattatgatgtgcaaaatgtgccgcagcccttgagccattgccacacatagcagcccttgagccatcgttattataaaattcccattcaaagtcgtatttttcatgaggcaatatcacgataaagccatccgcacctataccctcataacgattacaaagttctttagctaaagcacttctatcttcttttctatcagcatttgttatgacaaaatcattcccacttgcacaatatttataaaatttcacatttttcctttagaaatttcttgtattactttaacacattcttgcctaaaatcggcataagaattagtatttttaatgataaaatctgcttttttaagtttttcttcaatatctatttgagaatcaagtcttgcttttgcagcttctaagctgagcttatctctttgcatgattcttttaaggcttaattctttaggtgtgtaaattactatgactttgcctaaattttcataagcaccgctttcaaaaaaaagaggaatttctacaaaaaaagatttattttctttatctagaatttgcatttgttctaaaattttagctcgaattttaggatgagtgaaattttctaaggtttttttagcttctttgttgttaaaaacaatttctccaagggtttttctatcgattttcttttcttttgtgagtaaattttttaagctaaagggagaaaaaatcttttcaagttctaaagtattttcatctaaaatttcatgagcgattttgtctgcgctaatgcttttaaagcctaaagaattcgctatttctataaaagtgcttttaccacaagcaattgaagcggttacaaaaaaagtatttttcatcttatgccttattaaaacttttttcgttaaaatacctttttagttcttaaaggaaaataaatgaaaatttcatatgaagatgcaggcgtaagtatagataatggaaatgcctttgtagaggctataaaacctttggttaaagaaacttttaatgataatgttgtaggtggaattggttcttttgctggtgcttttagaatgccaagtggttttaaaaagcctgtgattttaggtgcaacagatggggttggtaccaagcttcgcttggcaattgatgctaaaaaatatgatactatagggcaagatttagtagcaatgtgtgtgaatgatttgatttgtaattttgctacgcctttgtttttcctagattattatgctacagccaagctcgaagtagaagtagcaaaggctgttgtatcaggcattgccaagggatgtaagatggcaaattgtgcattaattggtggagaaactgctgaaatgcctggaatgtatgcaaaagatgattttgatcttgcgggttttgcagtgggtatggctgaagaagatgagattgatagaagtaaatttgttaaaaatggtgatattttattggcacttcctagttcaggacttcattcaaatggttattctttagctagaaaagtactttttgaaagtttaaaattaaaatttgatgacaagatagagggtaaaaatttaattgatattttgttagaacctacaaggatttatgtgcgtgattttcttacgctaaagccttatatcagtgctctagctcatattacagggggtggtttagtagaaaatttaccacgcgttttacctcgtggtatgggtgcaactatacgcaaacatcatcttaaaactcctgaaattttttatactataggacaggctgtagaagaaagcgaaatgtatagaagctttaacatgggagtaggtttagtaatggttgtagattcttctaatgtaagtaagattttagaaaattcagatgcctttattatcggcgaaatttgcattaatgaaggtgttgttttagaatgaaaataaagcgtcaatacgctttatttttgtattttaagttctatttttgtagtgctttgttcttttggcaaaggattggtttgtgctagataaaaggctacaagtatatttacaagcatagcaataagtaaaagaggagtggttcgttttataatatccattggagctacttttgcaaatccagctaaagctatgattccgcctgctattggtgaagctgcacgacctaaacaagatgcaatttctataggtaaaactagagtaataggcgcaatgcctaattttgtagctatatcaggagctagtttgccaaaagcattaaaagcagcaattccacttcccataatcactgtggcaaaataaactaaaaagcttaaaatagctatactcaaaagaattccaaaccatgcaaaatttcctgttccaagatttgaaaccgcgttagcaaggatattaactccaccaagtgctttaataccttcagcaaatactccagcggcgatgattatgcttacgactgagataaaaatttcagccatagcttttaaaatcaccatcatatcttcgcctaattttctagcatttctgtgtcttgcaaattcaacaagaaaaactaaagaaatgcttacaaaatttgctgtcacaacatcgagcttgatagtaaaaaaatacgctgtaaataaaaatacaacaggtaaccaaggaaagagtatgtaaaaagtagggcatttaggatcaatgatttgcggaatttcaacttcatcatttaaaacacctttttctttatctcttttatcaatccaagcaaaataaaaaggaatcaagatggcaataactacaacataggcaatcacactataaatttggtaatttaaaaaaagccctacgacattatcactttgtcctaccatatctgccatattgattgaatttccatcttttggaccataatcaagtgcaattaaagaaagcacacatacagctgtaataggacggattttaagtgagattaaaacgggataaatacatgctaacaaaagcaaaagcaatccagcatagctagaaatgacgatttttaaagccattccaacaacaaaagttccacttaaaatcaagtatttattttttttcctaagggtttatttgctaaaaaagcaagttttgccgaagcattgatatgtttcatataggcagcaaagcctgccacactcatgataataagtcctactccagaaagctgacttttaaaagtcgttgtgataaaagcatagctatcaagtaaaacattcaaaaagcttgtatgttctctacttggagcttttggtataggtgttcctgtgatataaaaagcaaaaataagcaagataatacctgaaagaaaaaatacaaaaatgggattgtattttttgagtatataataagcaacaacaattaccgctaaaagtgtagaacatatcataaaaattggcatgatttctcctaaggttattattagcttttattttattttagctaaaatttaactaataaatatttttcatttaaaattttacttattttttgcattataaaattaataatatgtatagtttggttactgaaaggtttatgtttgtataaaaaatgatttttatattataattataaacaaatcataaatattaaaaaggatctagtgtggcaagaattttggcatttgatataggaataagctctattggctgggcatttagcgaaaatgatgagttaaaagattgcggagttaggatttttacaaaggctgaaaatcctaaaacaggagaatccttagccttccaagacgccttgcaagaagtgctagaaaacgccttgctagacgcaaagcaaggctaaatcacttaaaacatttaatcgcaaatgaatttaagttaaattacaaagattatcaaagctttgatgaaagtttagccaaggcctataaaggctctttaattagcccttatgagttaagatttagagctttaaacgagcttttaaataagcaagattttgcaagagtgattttacatattgcaaaaaggcgtggttatgataatataaaaaatagcgataatgaagaaaagagtgagattttaaaagctatcaagcaaaatgaagaaaaactagcaaattatcaaagtgtgggcgagtatctttataaagagtattttcaaaaattcaaagaaaattccaaagaatttataaatgttagaaataaaaaagaaagttatgaacgctgcatagcgcaaagttttttaaaagatgaattaaagcttatttttaaaaaacaaagagaatttggcttttctttttcaaaaaaatttgaagaagaggtgcttagtgtagcattttataaaagggctttaaaagatttttctcatttggtgggaaattgtagttttttaccgatgaaaaaagagcgccaaaaaattcgcccttagcctttatgtttgtagcgcttacaagaattatcaatcttttaaacaatcttaaaaatactgaaggaattttatatacaaaagatgatttaaacacgcttttgaatgaagttctaaaaaacggcactctaacttataaacaaacaaaaaagcttttgggtttaagtgatgattatgaatttaaaggagaaaaaggaacttattttattgagtttaaaaaatataaagaatttataaaagccctaggtgatcatagtttaagccaagatgatttaaatgaaatagcaaaagatattacccttataaaagatgagattaagcttaaaaaggctttagcaaaatacgatttaaatcaaaatcaaattgatagtttaagcaaattggaatttaaagaccatttaaatataagttttaaagccttaaaacttatcactcctttaatgcttgaaggtaaaaaatacgatgaagcttgtaatgagcttaatttaaaagtagcaatcaatgaagataaaaaagactttttacccgcatttaatgaaacttattataaagatgaggtaactaatcctgtggttttaagggcgattaaagaatacagaaaggtcttaaatgctttacttaaaaaatacggcaaagtgcataaaataaacattgaattagcaagagaagtaggtaaaaatcacagccaaagagctaaaatagaaaaagagcaaaatgaaaactacaaggccaaaaaagacgccgaacttgaatgtgaaaaactaggcttaaaaataaatagtaaaaatattttaaaattaagattatttaaagaacaaaaagaattttgtgcttatagtggggaaaagattaaaattagcgatttgcaagatgaaaaaatgcttgaaattgaccatatttacccttattctagaagttttgatgattcttatatgaataaggttttagtttttaccaagcaaaaccaagaaaaacttaataaaaccccctttgaagcctttggcaatgatagtacaaaatggcagaaaattgaagttttggcaaaaaatttacctgaaaaaaagcaaaaaagaattttagataaaaactataaagacaaagagcaaaaagactttaaagatagaaatctaaacgatactcgctatatcgcaaggcttgttttaaactatactaaagattatttagattttttacctttaagcgatgatgaaaatacaaagttaaacgacacacaaaaaggctcaaaagtgcatgtagaagcaaaaagcggtatgctaacatcggctttaagacacacttggggctttagcactaaggatagaaataatcatcttcatcacgccatcgatgcagtaattattgcttatgcaaacaactctatcgtaaaggctttttcagattttaaaaaagagcaagaaagcaacagtgcagaactttatgcaaaaaaaattagtgaattagattataaaaacaaaaggaagttttttgagccttttagtggttttaggcaaaaggttttagataaaattgatgaaatttttgtctcaaaacctgagagaaaaaagccaagcggagctttacatgaagaaacatttagaaaagaagaagaattctatcaatcatacggcgaaaagaaggagttttaaaagccctagagcttggtaaaatccgcaaagtaaatggtaaaattgttaaaaatggcgatatgtttagagtggatatttttaaacacaaaaagacaaataaattttatgctgtgccaatttatactatggattttgccttaaaagtattgccaaataaagctgtagcacgaagtaaaaaaggtgagataaaagactggattttaatagatgaaaattatgagttttgcttttctttatacaaagatagtttgattttaattcaaactaaagatatgcaagagccagaacttgtttattttaatgcttttacaagctctactgttagtttgattgtttcaaaacacgataataaatttgaaacgctaagcaaaaatcaaaaaatattgtttaaaaatacaaatgaaaaagaagtaatcgcaaaaagcataggaattcaaaatctaaaagtatttgaaaaatacatagtttcagcacttggagaagtgacaaaggctgagtttagacaaagagaagattttaaaaaatgagttacgatgaagcttttaaaacactgctttaaattatggctatgcaatcattagggcttgtattattagagcagtttgcataagtgggcttttgccttggcttggcataaagcacgataatatttataatgcctttgcactttgtgatgatttgatagaagtgtttagagctagtgttgatgattgtgttttagaacttgtgggtgaaagtgagtttttaagcaaagatgataaaagagcattgattggcaatttacaaagtaaaattaattttgatgggcaaaattatcctttaaacagagcgataaatcattatgtggcaaattttaaaaatgctttattgtatgaagatgagctaaagatagtgaaatttgatgattgaagataaatttatgcgcgtgcttttgatgtttgatgtaccaactaaaagtaaaaaagagcaaaaactagcaagtaaatttagaaacaatcttataaaattaggttattttatgctgcaatttagcgtttatatgcgtatttgcaagggtttaagttctgcaaaaagttctattgaaaatgtaaaaaagattttgccaccttatggaaatgtaagggctttaatcatcactgaaaagcagtttgataaaatggaacttttgcttggtggcatagtttttaatgaaaaagttaataacgaaaccaatttaacgctttttgatatagatagtcatggagaatttaaatacaaaaattcaaataatgaagaaatacaactaaacaaaaaacaagaaaaataccatcagcaaaatttatttgaattttaagcggttttaggggattgtaaccccgcagagtcccgcactctttattttagtccctttttaaatttcttgtaaatattgcagcataattttgctatttttcatcaaaaattctcgaaaatctttaaaatttcattatttgataaaggaatattttatcataaaaaatttaaaaagggactaaaaccctagtggattgaaactctgctagggctaattactccactaaaatgaggttgcaaatttgaaacttattgaaatttagggttgattaaaatcgaaataaaattatttaaataattttaaggcataaagataatatccactaaactttcattttctaaaatttcacattcttttggtaccaccataagggcagctttattgttaagattgtttataatcgcactagaaccttctttcttaccttcaagattggctaaaatgcgtccatttttaaactctatattgcaagcgacaaattccaaataaggtgtttttttcttgtaacttccttgtaaaaaggctttgcaaatatagtctttaggttgaagtaaccaagagtttaaaatctctcttgcgtaaagattaaacattaccatagccgagtaaggaaaacctggtaaggcgatgatgaatttttcattagccttagctattttgatatgtctgcctggttttatgtcggctttatcgatgatgatttcatattctttgacggctttttttaaaaagtcaaaatctcccatagaaactccgcccgtcgtaaccaaaatatcacaactttgcaaagcactttcaagggtagaaaaagtggctttttcatcatcttttaaaagaggaaaaacccttgtatcgcaatttaaatttttagctaaattagctatggcgatatgatttgaagagcggatttgagcaggattttccaaggcttctcctagatctttgatctcacttccgctacttaaaacccctacaataggctttataaacacactaatgtgaaaaaatccaagttcagctaaaagagctatctcgctataatttaaccttgtgccttttttgagtaaaatttcatcttttttatagttttctcctaccgcacgcacggcaaaagcttgagaaacttttttttctataaaaagagtatcattttctacgcgtacattttcaatagggactaaagtatcacttccttcactcatgagtgaacctgtaaaggtttttacacaagtgccattttgcacgctaaattgtggcatagtgcccgcaggtgtgaggcctaaaatttttaaaggcttatcttgatcttcaaatttgatcgcataaccatccatagccgaagttggaaattcaggctgatttttaagggcttttatgtcttgagctaaaatgcgtcctaaacactctgtaagagctattttttcaatcttttcataggttttgatatgagagtgtaaaatttttaaactttcttcataagacattagcattttttatccttttaaaagtcctgcaccgcaaagtttggttgatctttctttggcgtaaattctttctttatttatcacatcatacttccaaatgggtgcacttgctttaaaatcttcaacaaattcattaagaagcttaagtcctaattttctttgtttgcttaaaattcctgcaaaataagagctttcatgaactgccacatcgcctatagagtgagcaaaaagcaagctaataccatcaaaatctactcttttttgccactcatcaaaccatttttttaaaagcggttcataaatatcaaaactaagtgcctcaatgcctccttcttcacgcacaataccacaaaaagtcagcaaagcaccgcagtttttattcttggcaaattcataccattggctataaattttaggaatatctaaagaaccttgatagagtgtaaaatgtttcatttaacccccacaaactggtggtaaaagtgctattttatcaccatcttttaacttagtgttttcatcaaaaatgatttcatcgtttaaagatacggcacaaagttctagccattcttttaaactctcatctttttgcaaaatttcttttaattcttttaaattttttacctcaaactctaaattgtctttatttatggggcctaaaaattccacttttaccattttattcctttacttctaaatttcccatcattcctaaatcttcatgttctaaaatatggcaatgatacattctaagtcctttaaaatcttgtttcattctaaatcttaactcttcattaggacgcacatttatagtatctcttaaggctctaaattcagctttttgaacttttccattgagttttgatgagatgagttcaaattgcgtgccgtgtatgtggaaaggatgatccatgtgagatttatttatcactatccagtcttcaactactccaagtttggagcttaaatcaatgcgttttaaatcatagcttttgccattgattaaaaacatagacgcaagagcgatttttaattcgctttcactttttcccatcataccatgcatttgcatatgatcttcactcatgattatttctttaaattccttaggttcttctgaaggtttgaaaatttttaaattttttggaagttctacattttctttttttaggttaatattggctagaaatagggtattaggttcttcttttaccatcattttatccctatcataataagcactttctagcttaaaattcccatcttttggagcgtcgattaaaacttctacacgagaagcaggacttaaaaaaagttcttctttataaatagctttttctataagtccaccatcagtaccaacaagtataaacttagctccttgtatgcgtaaatttaaatatcttgccgcagtagcattataaatgcgtatgcgttcgtttgtggcgagtttgattttaggtttaaattgtccattgatgagtacaaattctccttctctaccatttagccaatcatttaggttgttgtttggaatttgagcgttttcatcaagacgcaaatcgctaatcatcaaatctttttcttttaaatgacttaaagcatctttttttgctttgatcacaaaagcccctgctaaacccataaaaacttgtttagaagtggtataatgagggtgtggatgataccagtaagttcctgcgctatcttgaggaatttcaaaacgatatattctttcttctcctgctaagataggatcatgtgggcttccatcttgatcaggtggcacaggaacgccatgccaatgtatagttgtagcttccttgagtttgtttttgactaaaatttcaagtttatctccttcaaaaacttctatttttggagcaggtactagaccattgtaagtataaaataaggtttttttacctttgataagctctatatgattttctttgatttctagggtagcacgaaaaatatttttttctttactttcatttttgagtaaaggcaaggcttttaaaatttctccttgggggaattgttttggatctaaaagctttaaattttttggagcaaagtttataaaagaagtatctaagtcatgatttatagaatgatttttatgcatggagtgcatatcgtgcataggatttgcataggctacacccatacttgctagagtaagtgtattaaattttaaaaaatttcttctattcattagtttttccttttgcttgattttttgtattatagtcattatttttttagttttagtaaatatttattttgaaaatttggtttaattttgttatgattttagcaatttaatcaaggaaaaataatgttttatgaaaatattcaaaccccagcttatattttagaagaagataaattaagaaaaaattgcgagcttttagcaagtgttggcgaaaaaagtggtgctaaagtgcttttagctttaaaaggttttgctttttcaggagcgatgaaaattgttggagaatacctaaaaggttgtacttgtagcggactttgggaagcaaaatttgctaaagaatacatggataaagaaattcatacttattcacctgcttttaaagaagatgaaataggtgaaatagccagtttatctcatcatatagtgtttaattctttagctcaatttcataaatttcaaagcaaaacacaaaaaaattccttaggtcttcgttgtaatgttgaattttctctagccccaaaagaactttacaatccttgtggaagatactcaagacttggaattcgtgctaaagattttgaaaatgtggatttaaatgctatagaaggacttcattttcacgcactttgtgaagaaagtgctgacgctttagaagctgttttaaaggtctttgaagagaaatttggtaaatggatagggcaaatgaaatgggtgaattttggaggaggacatcacatcactaaaaaaggctatgatgttgaaaaacttattgctttgtgtaaaaatttcagtgataaatacggtgtgcaagtttatcttgaaccaggtgaagcggtgggttggcaaacaggaaatttggtggctagtgtagtagatatcatagaaaatgaaaaacaaattgctattttagatacttcaagcgaagcacatatgccagatactatcatcatgccttatacaagtgaagttttaaatgctagaattttagccacaagagaaaatgaaaaaatttcagacttaaaagaaaacgaattttcctatttgcttactggaaatacttgtttagcaggtgatgtaatgggagaatacgcttttgataaaaagcttaaaatcggcgataaaattgtttttttagatcaaattcattacaccattgtgaaaaacacaacttttaatggtataagacttccaaatctcatgcttttaaatgcaaaaaatgaacttcaaatgataagagaattttcttataaggattattctttaagaaattagtattatttataatttgcataaaatgttaattttactcggaagagaatcaaagatataaattttatgcaaagtattttattttttcaaatataaaatcaacttaaatatctaatttttaatactttggtatgattttttaagattttaaatccttgtggaattttattgaaattcagtgatttttaaatcaaatagtattaagataaatcgatttaaaaatcggctttaaaatgaatattaggtatattttgcataatattcattcaagcaaaatttaaagctatttttgaaaattttgaatgcatggaggctttaatggatttggaaaaattaagattagctagaagtctttattatcaatgtctaggagagctttttgttttttcattttctgaagaaagattgtcaaaattacaagagtatttaaagacaatgcaagaatgtttatttgatgaaaatttaaaatcaaatttcgatatcttgcttaagcatttagatgatgaaaattctatacaagtattttttaaagaatatgatttgctttttttaagtcttaaaaatagcatcccaacgactttttcttacatagaagaaggttttgaaaattcaaatcctttactttgcgtgcgtcaaattttagtcaaaagtaaaataagacgcaatgaaaaattttttaaagaaagtgaagatagtgttggattttgtttattgttgatgagtgaatttttaaggcaaaatgaagatgatttagccaaagaactttttgaaaaagtgatcaataaaaacatcgatgagtttttaggtgatgttttcatgaataaaaatgcgaatttatacaaggaaatttcaagtattgcattggcttttatggaatttgaaagactttgctttgaagtagaaaaacctgtaaaaataaattctaaaaaagtgcaaaacgatctatcgcgttcagaatttttaagaagagaagcaaataaacaaaggaggactcgtgaaaaatcgcagggaatttcttaaaaaatccgcttttgccttaggggctgctggagtgcttggtagtacgactttagctctagctaaagatgaagaaagaaaagatttagttaaaggtaaaagtaagaaaaaagaagtgctttttcaaagaagtgctaattgggaaaattattatataaaggctgagtaatgtcaagtgtaggtgaaaatatcaagcttacgcgtcgttcttttcttaaaatggcagcactttcaagcctagcaacaccgttgcttgctagaagtgaaactttaagagaagcgagtgctgatgagcttaaagaagcgtacgaaggtagtaaaaaagtaaaaacagtttgtacagcctgttctgtaggctgtgggattattgcagaagtgcaaaatggtgtttgggtgcgtcaagaaattgctcaagatcatcctgtgagttcaggtggacattgctgcaagggatctgatatgatcgatatggtgcgttcacatgtgcgtttaaaatatcctatgaaaaaagaaaatggagaatggaaacgtataagttatgagcaagctttaagtgagattggagaaaaactagctgcttatcgtaaagaaaatcctgaaagtgttatgtttttaggttctgcaaaaatgagcaatgaacaagcttattatgtgcgtaaatttgcagcgttttttggaacgaacaatgtagatcatcaagctagaatttgacacagcgcaacagtcgccggtgtggcgaatacatttggttatggcgctatgacaaaccatcttggagacattcaaagaagtaaatgtatcattatcattggggcaaatccagcggtaaatcaccctgtgggttttagacatttcttaaaagcaaaagaaaaaggcgcaaagcttattgttgtagatcctagatttacaaaaagtgcagctaaggcagatatttatgcaagaattcgtccgggaactgacattgctttcatgtatggaatgctaaaaattatctttgatgaaggtttagaagatacaaaatatctcgatgaaagagtttttggaatcgataagattcgtgaagaagcagcaaaatggacagctgaagaagtagaaaatgttacagggatctctaaagaacttttggtgcaaatcactcatgaagtagctaaaaacaaaccaactacgcttatttgggctatgggtttaactcaacatactgtaggaacttcaaatacacgtttagcacctattgtacaaatggtacttggaaatataggtaaatttggcggcggagttaatatcttacgcggacacgataatgttcaaggtgcttcggatatggcttgtttaagcgaaaatttacctggttattatcctttaaatgaagcgacttggagatactatgccaaaatttggggcgtggattatgagtggcttttaggaaattttgtaagtaaagattggatgcataaaaccggactttcacttgctagatggtgggcagcagctttaaatggaaaagatggcaatgatgctatcgataatgcaggaacgcctttaaaagctttagtagttatgggaaatggtatcacttcaaccgcacaacaagctaaggttaaagaaggtttagaagctttagagcttttagttttggctgatccttttgtaaatgaagcagggattatcgcagaaagaaaagatggaatttatcttttacctgcagcaacacagtttgaaacaagcggaagtgtaacagcaacaaatcgtagcggacaatggagatttaaagttgtagatccactttatgaaagcatggaagatcaagaaattttatttgagcttgctaaaaaattaggcttttatgaaaactttaccaagactttacgcgatgaaaaaggtgagatcgtttggcctgaaaatgcaacaagagaaattgcaaaagcagttagaagtatagggcttaatggttggagtcctgaaaggcttaaaaagcatactttatactgggataaatttgatgaggtaactttagaaggaaaagacgaagttgctggcgagtattacgggcttccttggccttgttggagtgataagcacccaggttctcctgtgctttataataccgacattgaagtagcaaaaggtggtatgggctttagaaacaattttggacttgagtatgaaggagagagtttacttgctaaaaatgcacctttaaattcgcctattgatacaggttatccacaaattactaaagataatatagaaaaagttttaggcattactttaagtgctcaagaaaaagaaaaaatgggatcaacttggtcttatgatgatagcaatatcatagcaactaaatgtatagaaaaaggcatagttccttatggaaatgctaaagctagagctgtagtttggacttttaaagataaaattccactccaccgtgagcctttacattctccaagaaacgatttggtgcaaaaatatccaagttttgaagatcaaaaagcactttatcgcgtggatactaaatttgtttctgtgcaacaagctaaggattattctaaagaattcccgcttaatcttgttactgcaagacttgtgaatttaaatggtgcgggtatggaaaatagagcatctatgtatctaacgcgtttaacacctgaaatgttttgtgagatcaatcctgaatta

SEQ ID NO: 4050 - DNA, 21590 bp, synthetic construct
  source 1..21590: mol_type = other DNA
  misc_feature 1..21590: note = Synthetic
ctatggagtaatttctggaaattttgtagaagaaaatcttatcatggttaattctatgatagaaaaaccaagtcctgatgaagctccaagtaatcttgctatcataggaagatatattttaactcctgatatttttggaattttagaaaatactaaagcgggaaaaaatggtgaagtccaacttaccgacgcgcttttaactcaagcaactaatggtatggttttagcttataaatttcaaggaaaacgctttgattgtggaagtgtagaaggctttgtagaagcgacaaattatttttacgagaaaagtaaatgttaaataatacacttttttttaagcaaagtgaaattcacactataagttcttatgcaaatcgtattaatgatgaggtaaaaagtggagatatagggtattatcatcttattgatacaagtttgaatttaatcgatgagagtttggcttttatcaaagacaaagaacacataaaaaatatcgttttagtgggaatgggtggttcaagttgtggtgtaaaagccttgcgtgatatgctttttaatgaaaaaagcaatcaaagagaactttttatactcgataacacaagttcacattcttttaataagactttagaaaaaatcaagcttgaggaaagtttgtttttaatcatcagcaaaacaggtagtactatagaagttgtatcgctttttaaacttcttattgaacattttaaacttgatatgcaagaattaaaaaaatactttgtttttattaccgataaggattcaaaacttcatcaagaaggtgaaaatttagatattaaatgcttttttatccctgcaaatgtaggaggtcgttttagcatactttcagccgtaggtatagttccgctttgtttttgtggctataatgccaaagctcttttagaaggagctaaagcttgttttgaagatttttttactcataaaaaagatgaaattttacaaaaagcctatcattattgcacacacaaaaatgccaatatcaatgtacttttttcatatagtgatgcttttaaaggctttaatgaatggtatatccagcttattgctgaaagtttaggtaaaaagcaaggctataaacgtataggtttaactcctattgcactcattggagcaagagatcagcatagttttttacaactcattatggatggacctaaaaataaaactgtaacttttttaaaaatcaaagacgctcaaaaagcacctattatccctgatattcattttaaatttttagattctttaagtaataaagtcaatcttcacgaacttttaaacgctcaatgtaatgcaactatgcacgctttaatcgctgaaaatttgagtgttgatgtgatagaacttgaaaaacttgatgcttggcatgcgggatatttgatgtattattatgaactttttacttcaacttgcggtgttatgctagggattaacacctatgatcaacctggtgtggaagttggaaagttgatcttaaaaaatatattaaattcttaatcaaaattcattaaaaaagagtataataattttaagttaaaattataataaaaatttttaattaataataattattatttaagaattttatgttataattttaaaaattaaaaaaaggagtcaatcatgtcagttacaaaacaattattacaaatgcaagcagatgctcatcatctatgggttaaatttcataattatcactggaatgtaaaaggtttgcaatttttttctatacacgagtacacagaaaaagcttatgaagaaatggcagaactttttgatagttgtgctgaaagagttttacaacttggcgaaaaagctatcacttgccaaaaagttttaatggaaaatgcaaaaagtccaaaagttgcaaaagattgctttactccgcttgaagtcatagaactgatcaaacaagattatgaatatcttttagcagaatttaaaaaactcaatgaagcagcagaaaaagaaagtgataccacaacagctgcttttgcgcaagaaaatattgcaaaatatgaaaaaagtctttggatgataggtgctactttacagggtgcttgcaaaatgtaatttaaggggctttatgccccaattatacaaactaggttataatatccttttttaaaggataaaattgaaagtacttaattttttttatgaaaatcaccctaaatttgaagtaagttatgaaagaaaaaatcaaatttcaaaaccaaatattatcataaaaggcccacgattttgtggtaaaaaaacacttatttttaattttttatctcaatttaaagcaagtgaaattttgtttttagatttatatgatacacgctttgaaaaacaaagtttagaaagacttgctgattttctgaatgaaaatttacaaattaaaattctttgcctttataatttggattttatccctaatttagaaaaaattaaaattcccatcatcttaagtacaaatataaaagatttaaatataaatgggtttgaagagcttgaacttgattattttgattttgaagaatttattagtgtaagtaagaaaaatttacctataaataatttagtaggtctttttttacaaagtggacgcagtaaatttggagaaaaaaacatacttctaagacaaagctttactcttttagaattagaaattttaaagtatttagctttaaatttgggtcagcaaatcagtatttctaagatatttatagaacttaaaaaaagattaaaaacttcaaaagatagtgtttatcaagctataaaaaaattagaaaatacttatgtgatctatactttaaaacatgatgaaaaaaaacttcaaaagatttattttaaagattttggcctaagaaataatctttgtatttcaaaggatttttcgcatttatttgaaaatttagttttaagcgagttgtttaaatttaaagaagattttttttataacaaatactttaacttttatagccaaatatctaaaattgcttatatttcaagtccaactttagatattgatttgattaaattacgtgctaagaaaattttaccaaaggctttagaacttggaatttttcatgtgatttttatcactctttcaagcgaggatagtttttttgagcaaggggttaaatttgaagtcatatcttttgataaattttcacttggattttaggtgttgtttgagtttgtatcgtatttttcaaggttgtatcgtttgatgatttttgtaataagattgatataatatcccttgcgttcagaataagaatctaaagttttaatagcctctagtcctgttatctctttgccttcgcttgcaaatttagctcttgcatcgcgaaacttttcataagcaaaatgacgatttaaatttaaaacataagagtaaacactatcttgcagactatcaaaaatcttaattttatgttttttatctggatgtcttaaatcaggaattaaacctttctcaccccaagtccattctccaaaaagattatttgcttctcttgcgaagcgacttgtacctgtagcactttcaactaaagcttgggctatacccatggattttggaattttttgaatacgttttttatattctgcaaaatcataaagattttcaatgcgatatttgttttttatcgtgataagtttttcaagatttgtttgatttgaagtcctaaagcctgttttgtaagcatctttaaaaaaggcttcgataaaagctctttcttgttcaatttttttaaagctttgatcaaacatttcattcatttttataaaaaaaatttgtcttttttgatctatatcaagtttgtaatattcctctccaaagccattttttagatcatcagcaaaaagtgggattagaaaaagactaagaaaaattataattggcttcaaaacaatactttacctttccttcaaaaaacaattcttcatttttatatgtaaacccaacctcttcaccacttttaggagttattttaactttattttgtacttttttatttaaaaatgccagataaaaacaagcccccattcctgtgccacaagctaaggtttcatcttcaactccgcgttcatacgtacgaacttttaaatgattttcatctaaaatttttacaaaattaacattggcattatatttttgtctcattttttgacaaagtattgtatcaaattcatctaaattttgacaaaaatgcactagatgtggaactccagtgtcgcaaagttgccaagtttttcctaattcttcaaaagtattttgcacgctttttattttgcctaaagatacttcaactttatcttgatttacctttgcttttattattcctgcaccggttaaaaaactcatgttgggatttattttgttaatatgatgtgcaaaatgtgccgcagcccttgagccattgccacacatagcagcccttgagccatcgttattataaaattcccattcaaagtcgtatttttcatgaggcaatatcacgataaagccatccccacctatgccctcataacgattgcaaagttctttagctaaagcacttctatcttcttttctatcagcatttgttatgacaaaatcattcccacttgcacaatatttataaaatttcacatttttcctttggaaatttcttgtattactttaacacattcttgcctaaaatcggcataagaattagtatttttaatgataaaatctgcttttttaagtttttcttcaatatctatttgagaatcaagtcttgcttttgcagcttctaagctgagcttatctctttgcatgattcttttaaggcttaattctttaggtgtgtaaattacaatgactttgcctaaattttcataagcaccgctttcaaaaaaaagaggaatttctacaaaaaaagctttattttctttatctagaatttgcatttgttctaaaattttagctcgaattttaggatgagtgaaattttctaaggtttttttagcttctttgttgttaaaaacaatttctccaaggatttttctatcgattttcttttcttttgtgagtaaattttttaagttaaagggagaaaaaatcttttcaagttctaaagcattttcatctaaaattttatgagcaattttatctgcgctaatgcttttaaagcctaaagaattcgctatttctataaaagtgcttttaccacaagcaattgaagcggttacaaaaaaagcatttttcatcttatgccttattaaaacttttttcgttaaaatacctttttagttcttaaaggaaaataaatgaaaatttcatatgaagatgcaggcgtaagtatagataatggaaatacctttgtagaggctataaaacctttggttaaagaaacttttaatgataatgttgtaggcggaattggttcttttgctggtgcttttagaatgccaagtggttttaaaaagcctgtgattttaggtgcaacagatggtgttggtaccaagcttcgcttggcaattgatgctaaaaaatatgatactatagggcaagatttagtagcaatgtgtgtgaatgatttgatttgtaattttgctacgcctttgtttttcctagattattatgctacagctaagcttgaagtagaagtagcaaaggctgttgtatcaggcattgccaagggatgtaagatggcaaattgtgcattaatcggcggagaaactgctgaaatgcctggaatgtatgcaaaagatgattttgatcttgcgggttttgcagtgggtatggctgaagaagatgagatcgatagaagtaaatttgttaaaaatggtgatattttattggcacttcctagttcaggacttcattcaaatggttattctttagctagaaaagtactttttgaaagtttaaaattaaaatttgatgacaagataggggataaaaatttaattgatattttattagagcctacaaggatttatgtgcgtgattttcttacactaaagccttatatcagtgctctagcacatattacagggggtggtttagtagaaaatttaccacgcgttttgcctcgtggtatgggtgcaactatacgcaaacatcatcttaaaactcctgaaattttttatactataggacaggctgtagaagaaagcgaaatgtatagaagctttaacatgggagtgggtttagtaatggttgtagatccttctaatgtaagtaaggttttagaaaattcagatgcctttattatcggcgaaatttgcattaatgaaggtattgttttagagtgaaaacaaattattatgattatttatgtgctaaaatgtatgtaattttgcccataaaagcccataaagacaaactaaaattttatctttcttatgtaaataagaaagataaaatttttagagttaatgtgtggaagtgggcggttttgataaaaattgccaaagatgataaaacgaaatatttttgttcgaatgtattaaataaagggtaaaatgcacaatttaaatgaagctttgtttcaaaaaaagataaaagaaattcgcttaaaagcaatagcgagtattatttgtgggtttttaggtatcattccttatcttggagttttatttgttcttgcgagttggattttattttttattgtgctttatgatttaaaaatctatggtggtgctaaaaatttgtttaagaatttccttattagtgtagggattggattttttggtattcttgttaatacaagtattttatttgcaatgctaaagcctagaactggcatttttggtgggctttattttaatcaagataatatttttatggctattgctatatttttagtattacattttgctattttggctttaatttttccttttttgaaagctttttactatgaaattgctagaacaacaaagcaaaagtatttcacttatgcttttaataccttttatttagggcttcttactttgattatcggcataggcttggtgtttttgctagcaagtttggttttctggattttagcgtgggtcaaatttaaagaatttgatgagcaagaactttcaaatttagaagaaagattggcaaaagcacaaaaaaaggtttttgattttgatttaaaatggattaaaatcacaatggcttcatttataattttaaacttgctcgttttaacattttcgtttatattagaagttattagctttgaagattttaggttttactacacaaaaaaaactttattttacacagccataatcctagctttgcttagtgtgtttttgttttgtaaaaagataaaaaattacaaactttttatttattttttcatatggcaaggtttaagtgtttttggtagtcatcttctttttattcctgattttatggtagatcaaccaccagaaattgtatatggaagtttaaacataatattaagtctatgctatattatttttgcttttttattttttaaaattttgattcaaattacaaaggaaaaacttttttatcttatttttgcattttatgtttgcataaaaattttgataatattaattttctttatttttatgatggttgataactattatatatttacaaaaagtcctataaagatgctcatagataattataaattactttttcaagttgtttatttcgtttcatttttaattgtttggcttatgcttaaaggacaaaaaaatgtaaaaatatgttagaatgatgaaaaaatactattttacgtagatgtttattaggatatattcgtatgtcttaaagctctttatggggtgttaagtaattataatatttaaaaattaaaaaatatatagtttatccacattttatagtttaacttctaaaaatttgatcatctcttttttcattttttagagctagaaaacatatgagtgaaattgctttaaagttagttagagcagttgatactaaatattttgataagaaatttaaatagattgattttacttaaattaaagactttttgcctcgtgatacaaaattaagtgatgaatttttagttaaattgatattaaatatgaaaaaattataaatattaatactttttcaaattaatagtaaatatagagggtttgattttttcacaaaagatttggatagaacttgcaaaaaactttcttcaatatttatacttttaaattttgatgcaaatcctattcaatatagcattggcaaaataaactaaaaagcttaaaatagctatactcaaaagaattccaaaccatgcaaaatttcctgttccaagatttgaaaccgcgttagtaaggatattaactccaccaagtgctttaatgcctttagcacatactccagcggcgatgattatgcttacgactaagataaaaatttcagccatagtcttttaaaatcaccatcatatcttcgcctaattttctagcatttctgtgtcttgcaaattcaacaagaaaaactaaagaaatgcttacaaaatttgctgttacaacatcgagcttgatagtaaaaaaatacgctgtaaataaaaatacaacaggtaaccaaggaaagagtatgtaaaaagtaggacatttaggatcaatgatttgcggaatttcaacttcatcatttaaaacacctttttctttatctcttttatcaatccaagcaaaataaaaaggaatcaagatggcaataactacaacataggcaatcacactataaatttggtaatttaaaaaaagccctacgacattatcactttgtcctaccatatctgccatattgattgaatttccatcttttggaccataatcaagtgcaattaaagaaagcgcacatacagttgtaataggacggattttaagtgagattaaaacaggataaatacatgctaacaaaagcaaaagcaatccagcatagctagaaatgacgatttttaaagccattccaacaacaaaagttccacttaaaatcaagtatttatttttgatttttcctaagggtttatttgctaaaaaagcaagttttgctgaagcattaatatgtttcatataagcagcaaaacctgccacactcatgataataagtcctactccagaaagctgacttttaaaagtcgctgtgataaaagcataactatcaagtaaaacatttaaaagcttgtatactctctgcttggagcttttggtataggtgttcctgtgatataaaaagcaaaaataagcaagataatatttgaaagaaaaatacaaaaatgggatcgtatttttttgagtatatcataaaaattagcatagggtctattgaatttacaataaattggattttatctaaatttttaaataaaaaatattttttatttaaaaattacttgttttttgtattataaaattaacatatatagtttggttactgaaaagtttatgtttgtttaaaaaatgatttttgtattataattatacacaaatcataaatattaaaaaggatctagtgtggcaagaattttggcatttgatataggaataagctctattggctgggcatttagtgaaaatgatgagttaaaagattgtggagttaggatttttacaaaggctgaaaatcccaaaacaggagaatccttagccttgccaagacgccttgcaagaagtgctagaaaacgccttgctagacgcaaagcaaggctaaatcacttaaaacatttaatcgcaaatgaatttaagttaaattacgaagattatcaaagctttgatgaaagtttagccaaggcttataaaggatctttaattagcccttatgagttaagatttagagctttaaacgagcttttaagtaagcaagattttgcaagagtgattttacatattgcaaaaaggcgtggctatgatgatattaaaaatagtgatgataaagaaaaaggtgcgattttaaaagctatcaagcaaaatgaagaaaaactagcaaattatcaaagtgtgggcgagtatctttataaagagtattttcaaaaattcaaagaaaattccaaagaatttacaaatgttagaaataaaaaaagaaagttatgaacgctgcatagcgcaaagttttttaaaagatgaattaaagcttatttttaaaaaacaaagagaatttggcttttctttttcaaaaaaatttgaagaagaggtgcttagtgtagcattttataaaagggctttaaaagatttttctcatttggtgggaaattgtagtttttttaccgatgaaaaaagagcgccaaaaaattctcccttagcttttatgtttgtagcacttacaagaattatcaatcttttaaacaatcttaaaaatactgaaggaattttatatacaaaagatgatttaaacacgcttttgaatgaagttttaaaaaacggcactctaacttataaacaaacaaaaaagcttttgggcttaagcgatgattatgaatttaaaggggaaaaaggaacttattttattgagtttaaaaaatataaagaatttataaaagccctaggtgatcatagtttaagccaagatgatttaaatgaaatagcaaaagatattacccttataaaagatgagattaagcttaaaaaggctttagcaaaatatgatttaaatcaaaatcaaattgatagtttaagcaaattggaatttaaagaccatttaaatataagttttaaagccttaaaacttatcactcctttaatgcttgaaggtaaaaaatacgatgaagcttgtaatgagcttaatttaaaagtagcaatcaatgaagataaaaaagattttttacccgcatttaatgaaacttattataaagatgaggtaactaatcctgtggttttaagggcgattaaagaatacagaaaggtcttaaatgctttacttaaaaaatacggcaaagtgcataaaataaacattgaattagcaagagaagtaggtaaaaattatagccaaagagctaaaatagaaaaagagcaaaatgaaaactacaaggccaaaaaagacgccgaacttgaatgtgaaaaactaggcttaaaaataaatagcaaaaatattttaaaattaagattatttaaagaacaaaaagaattttgtgcttatagtggagaaaagattaaaattagtgatttgcaagatgaaaaaatgcttgaaattgatcacatttacccttattctagaagttttgatgattcttatatgaataaagttttagtttttaccaagcaaaatcaagaaaaacttaatcaaaccccctttgaagcctttggcaatgatagtgcaaaatggcagaaaattgaagttttagcaaaaaatttacctactaaaaagcaaaaaagaattttagataaaaattacaaagacaaagagcaaaaagactttaaagatagaaatctaaacgatactcgctacatcgcaaggcttgttttaaactatactaaagattatttagattttttacctttaagcgatgatgaaaatacaaagttaaacgacacacacaaaggctcaaaagtgcatgtagaagcaaaaagcggtatgctaacatcggcttaagacacacttggggctttagcactaaggatagaaataatcatcttcatcacgccatcgatgcagtaattattgcttatgcaaacaactctatcgtaaaggctttttcagattttaaaaaagagcaagaaagcaacagtgcagaactttatgcaaaaaaaattagtgaattagattataaaaacaaaaggaagttttttgagccttttagtggttttaggcaaaaggttttagataaaattgatgaaatttttgtctcaaaacctgagagaaaaaagccaagtggagctttacatgaagaaacatttagaaaagaagaagaattctatcaatcatacggcggaaaagaaggagttttaaaagccctagagcttggtaaaatccgcaaagtaaatggtaaaatagttaaaaatggcgatatgtttagagtggatatttttaaacacaaaaagacaaataaattttatgctgtgccaatttatactatggattttgctttaaaagtattaccaaataaagctgtagcacgaagtaaaaaaggtgagataaaagactggattttaatggatgaaaattatgagttttgcttttctttatacaaagatagtttgattttaattcaaactaaagatatgcaagagccagaatttgtttattataatgcttttacaagctctactgttagtttgattgtttcaaaacacgataataaatttgaaatgctaagcaaaaatcaaaaaatattgtttaaaaatgcaaatgaaaaagaagtaatcgcaaaaagcataggaattcaaaatctaaaagtatttgaaaaatacatagtttcagcacttggggaagttgcaaaggctgagtttagacaaagagaagattttaaaaaatgagttacgatgaagcttttaaaacactgcttattagctctaatgccaagctaaatttagagctaaatcatcttgtgattaagcaagatgaaaatatagccaaattgtttttaaaagatataaatatcatcgttttagaaagcttacaagtaagcattagttacgcactttttaacgcttttgcaaggcataaaatcatcttgctaacctgcgatgaaactcatagtataaatggtgtttttactccttttttagggcattttcaaagtgcaaaaatcgcaaaagagcaaatgaatgtaagtgctcaaaaaaaggctattttatggcaaaaaatcattaaaaataaaatcctaaatcaagcctttatcttaaaaaaatacaataaaatagagcaaagcaatgagcttataaatttggctaaaaaagtaagcttaaatgatagtaaaaatattgaagctgttgcggcggcgctttattttaaaactttgtttggtacttctttttcaagagatgagctttgctttgaaaattctgctttaaattatggctatgcaatcattagggcttgtattattagagcagtttgcataagtgggcttttgccttggcttggcataaagcacgataatatttataattcttttgcgctttgtgatgatttgatagaagtgtttagggctagtgttgatgattgtgttttaaagcttaagggtgaaagtgagtttttaagcaaagatgacaaaagagcgttgattggcaatttacaaagcaaaatcaattttgatgggcaaaattatcctttaaacagagcgataaatcattatgtggcaaattttaaaaatgctttattgtatgaagatgaactaaagatagtgaaatttgatgattgaagataaatttatgcgtgtgcttttgatgtttgatgtacctactaaaagtaaaaaagagcaaaaactagcaagtaaatttagaaataatcttataaaattaggttattttatgctgcaatttagtgtttatatgcgtatttgcaagggtttaagttctgcaaaaagttctattgaaaatgtaaaaaagattttgccaccttatggaaatgtaagggctttaatcatcactgaaaagcaatttgataaaatggagcttttgcttggtggcatagtttttaacgaaaaagttaataacgaaaccaatttaacgctttttgatatagatagtcatggagaatttaaatataaaaattcaaataatgaagaaattcaaataaacaaaaaacaagaaaaatatcatcagcaaaatttatttgaattttaaaagcggttttaggggattgtaaccccgcagagtcccgcaaactctttattttagtccctttttaaatttcttatgagattatagcataatttttgctatttttcatgaaaaaaccccgaaattttcattatctggtaaatatctattttaccataaagaaatttaaaaagggactaaaactaatgctttgattataaaaattacataaatattttaccataaaggaatttaaaaagggactaaaactgagttaccaagattaaaacttcctatgagattttaccataaagaaatttaaaaagggactaaaataaaccctagtggattgaaactccgctagggctaattactccactaaaaggaggttgcgaatttgaaacttattgaaatttagggttgattaaaatcgaaataaaattatttaaataattttaaggcataaagataatatccactaaactttcattttctaaaatttcacattcttttggcaccaccataagggcagctttattgttaagattgtttataatcgcactagagccttcttttttgccttcaagattggctaaaatgcgtccattttcaaactttatgttacaagcgacaaattccaaataaggtgtttttttcttgtaacttccttgtaaaaaggctttgcaaatatagtctttaggctgaagtaaccaagagtttaaaatctctcttgcgtaaagattaaacattaccatagccgagtaaggaaaacctggtaaggcgatgatgaatttttcattagccttagctattttgatatgtctacctggttttatgtcggctttatcgatgatgatttcgtattctttgatggctttttttaaaaagtcaaaatctcccatagaaaccccgcccgttgtaaccaaaatatcacaactttgcaaagcactttcaagggtggaaaaagtggctttctcatcatcttttaaaagaggaaaaacccttgtatcgcaatttaaatttttagctaaattagctatggcgatatgatttgaagagcggatttgagcaggattttccaaggcttctcctagatctttgatctcacttccactacttaaaacccctacaataggctttataaacacactaatgtgaaaaaatccaagttcagctaaaagagctatctcgctataatttaactttgtgccttttttgagtaaaatttcatcttttttatagttttctcctaccgcacgcacggcaaaagcttggggaacttttttttctataaaaagagtatcattttctacgcgtacattttcaacaggggctaaagtatcgcttccttcgctcatgagtgagcctgtaaaggtttttacacaagtaccattttgcacgctaaattgtggcatagtacccgcaggtgtgatacctaaaatttttaaaggcttatcttgatcttcaaatttgatcgcataaccatccatagccgaagttggaaattcgggctgatttttaggggcttttatgtcttgagctaaaatgcgtcctaaacactctgtaagagctattttttcaatcttttcataagttttaatatgagaatgtaaaatttttaaactttcttcataagacattaacattttttatccttttaaaagtcctgcaccgcaaagtttggttgatctttctttggcataaattctttctttgtttatcacatcatacttccaaatgggcgcacttgctttaaaatcttcaacaaattcattaagaagtttaagtcctaattttctttgtttgcttaaaattcctgcaaaatacgagctttcatgaaccgccacatcgcctatagagtgagcaaaaagcaaggtaataccatcaaaatttactcttttttgccactcatcaaaccatttttttaaaagcggttcataaatatcaaaactaagtgcctcaatacctccttcttcacgcacaataccacaaaaagtcagtaaagcaccgcagtttttatccttggaaaattcataccattggctataaattttagaaatatctaaagagccttgataaagtgtaaaatgtttcatttagcctccacaaactggcggtaaaagtgctattttatcaccatcttttaacttggtgttttcatcaaaaatgatttcatcatttaaagatacagcacaaagttctagccattcttttaaactctcatctttttgcaaaatttcttttaattcttttaaattttttacttcaagttctaaattttctttatttatggggcctaaaaattccacttttaccattttattcctttacttctaaatttcccatcattcctaaatcttcatgttctaaaatatggcaatgatacattctaagtcctttaaaatcttgtttcattctaagtcttaattcttcattaggacgcacatttatagtatctctgaaggctctaaattcggctttttgaactttgccattgagttttgatgagatgagttcaaattgcgtgccgtgtatgtggaaaggatgatccatgtgagatttatttatcactatccagtcttcaactactccaagcttggagcttaaatcaatgcgttttaaatcatagcttttgccattgattaaaaacatagacgcaagagcgatttttaattcgctttcactttttcccatcataccatgcatttgcatatgatcttcactcatgattatttctttaaattccttaggttcttctgaaggtttgaaaatttttaaattttttggaagttctacattttctttttttagactaatattagctaaaaatagggtattaggttcttcttttaccatcattttatccctatcataataagcactttctagcttaaaattcccatcttttggagcgtcgattaaaacttctgcacgagaagcaggacttaagaaaagttcttctttataaatagttttttctataagtccaccatcagtaccaacaagtataaacttagccccttgtatgcgtaaatttaaatatcttgccgcagtagcattataaatgcgtatgcgttcgtttgtggcgagtttgatttgaggtttaaattgtccattaatgagtacaaattctccttctctaccatttagccaatcatttaggttgttgttcggaatttgagcgttttcatcaagacgtaaatcgctaatcatcaaatctctttcttttaaatgacttaaagcatctttttttgctttgatcacaaaagcccctgctaaacccataaaaacttgtttagaagcggtataatgagggtgtggatgataccagtaagttcctgcgctatcttgaggaattttaaaacgatatattctttcttctcctgctaaaataggatcatgtgggcttccatcttgatcaggcggcacaggaacgccatgccaatgtatagttgtagcttctttgagtttgtttttgactaaaatttcaagtttatctccttcaaaaacttctatttttggagcaggcacgaggccattgtaagtataaaataaggtttttttacctttgataagctctatatgattttctttgatttctagggtagcacgaaaaatatttttttctttactttcatttttgagtaaaggcaaggcttttaaaatttctccttgggggaattgttttggatctaaaagttttaaattttttggagcaaagttgataaaagaagtatctaagtcatgatttatagaatgatttttatgcatggagtgcatatcgtgcataggatttgcataggctacacccatacttgctagagtgagtgcattaaattttaaaaaatttcttctattcattagtttttccttttgcttgattttttatattatagtcattatttttttagttttagtaaatatttattttgaaaatttggtttaattttgttatgattttagcaatttaatcaaggaaaaataatgttttatgaaaaaattcaaactccagcttatattttagaagaagataaattaagaaaaaattgtgagcttttagcaagtgttggtgaaaaaagtggtgctaaagtgcttttagctttaaaaggttttgctttttcaggagctatgaaaattgtcggagaatacctaaaaggttgcacttgtagcggactttgggaagcaaaatttgctaaagaatacatggataaagaaattcatacttattcgcctgcttttaaagaagatgaaataggtgaaatagccagtttatctcatcatatagtgtttaactctttagctcaatttcataaatttcaagctaaaacacaaaaaaattccttaggtcttcgttgtaatgttgaattttctctagccccaaaagaactttacaatccttgtggaagatactcaagacttggaattcgtgctaaagattttgaaaatgtggatttaaatgctatagaaggacttcattttcacgcactttgcgaagaaagtgctgatgctttagaggctgttttaaaggcttttgaggagaaatttggtaaatggatagggcaaatgaaatgggtgaattttggaggaggacatcacatcaccaaaaaaggctatgatgttgaaaaacttattgctttgtgtaaaaatttcagcgataaatatggtgtacaagtttatcttgaaccaggtgaagcagtgggttggcaaacaggaaatttggttgctagtgtagtagatatcatagaaaatgaaaaacaaattgctattttagatacttcaagcgaagcacatatgccagatactatcatcatgccttatacaagtgaagttttaaatgctagaattttggccacaagagaaaatgaaaaaatttcagacttaaaagaaaacgaatttgcctatttacttactggaaatacttgtttagcaggtgatgtaatgggagaatatgcctttgataaaaagcttaaaatcggcgataaaattgtttttttagatcaaattcattacaccattgtgaaaaacacaacttttaatggcataagacttccaaatctcatgtttttagaccgtaaaaatgaacttcaaatgataagagaattttcttataaggattattctttaagaaattagtattatttataatttgcataaaatgttaattttactcggaagagaatcaaagatataaattttatgcaaagtattttattttttcaaatataaaatcaactcaaatatctaatttttaatactttggtatgattttttaatattttaaatccttgtggaattttattgaaattcagtgatttttaaatcaaatagtattaagataaatcgatttaaaaatcggctttaaaatgaatattaggtatattttgtataatattcattcaagcaaaatttaaagctatttttgaaaattttgaatgcatgggggctttaatggatttggaaaaattaagattagctagaagtctttattatcaatgtctaggagagctttttgttttttcattttctgaagaaagattgtcaaaattacaagagtatttaaagacaatgcaagaatgtttatttgatgaaaatttaaaatcaaattttgatatcttgcttaagcatttagatgatgaaaattctatacaagcattttttaaagaatacgatttgctttttttaagtcttaaaaacagcattccaacgactttttcttacatagaagaaggttttgaaaattcaaatcctttactttgtgtgcgtcaaattttagtcaaaagtaaaataagacgcaatgaaaaattttttaaagaaagtgaagatagtgttggattttgtttattgttgatgagtgaatttttaaggcaaaatgaagatgatttagccaaagagctttttgaaaaagtgatcaataaaagcattgatgagtttttaggcgatgttttcatgaataaaaatgcgaatttatataaggaaattgcaagtattgcattggcttttatggaatttgaaagactttgctttgaagtagaaaaacctgcaaaaataaattctaaaaaagtgcaaaacgatctatcgcgttcagaatttttaagaagagaagcaaataaacaaaggaggactcgtgaaaaatcgcagggaatttcttaaaaaatccgcttttgccttaggggctgctggagtgcttggtagcacaactttagctctagctaaagatgaagaaagaaaagatttggttaaaggtaaaagtaagaaaaaagaagtgctttttcaaagaagtgctaattgggaaaattattatataaaggctgagtaatgtcaagtgtaggtgaaaatatcaagcttacgcgtcgttcttttcttaaaatggcagcactttcaagcctagcaacaccgttgcttgctagaagtgaaactttaagagaagcgagtgctgatgagcttaaagaagcgtatgaaggtagtaaaaaagtaaaaacagtttgtacagcctgttctgtaggctgtgggattattgcagaagtgcaaaatggtgtttgggtgcgtcaagaaattgctcaagatcatcctgtgagttcaggtggacattgctgcaagggatctgatatgatcgatatggtgcgttcacatgtgcgtttaaaatatcctatgaaaaaagaaaatggagaatggaaacgcataagttatgagcaagctttaagtgagatcggagaaaaactagctgcttatcgtaaagaaaatcctgaaagtgttatgtttttaggttctgcaaaacttaataatgaacaagcttattatataagaaaatttgcagcattttttggaacgaacaatgtagatcatcaagctagaatttgacacagcgcaacagtcgccggtgtggcgaatacatttggttatggcgctatgacaaaccatcttggagacattcaaagaagtaaatgtatcattatcattggagcaaatccagcggtaaatcaccctgtgggttttagacatttcttaaaagcaaaagaaaaaggtgcaaagcttatcgttgtagatcctagatttacaaaaagtgcagcaaaagcggatatttatgcaagaattcgtccaggaactgacattgctttcatgtatggaatgttaaaaatcatttttgatgaaggcttggaagatataaaatatcttgatgaaagagtttttggaattgataaaattcgtgaagaagcagcaaaatggacagctgaagaagtggaaaatgttacagggatctctaaagaacttttggtgcaaatcactcacgaagtagctaaaaacaaaccaactacgcttatttgggctatgggtttaactcaacatactgtaggaacttcaaatacacgtttagcacctattgtgcaaatggtacttggaaatataggtaaatttggtggtggagttaatatcttacgcggacacgataatgttcaaggtgcttcagatatggcttgtttgagtgaaaatttacctggttattatcctttaaatgaagcgacttggagatactatgccaaaatttggggtgtggattatgagtggcttttaggaaattttgtaagtaaagattggatgcataaaactggactttcacttgctagatggtgggcagcggctttaaatggaaaagatggaaatgatgctatcgataatgcaggaacgcctttaaaagctttagtagttatgggaaatggtattacttcgactgcacaacaagtaaaagttaaagaaggtttggaagctttagagcttttagttttagccgatccttttgtaaatgaagcagggattatcgcagaaagaaaaga

SEQ ID NO: 4051 - DNA, 21554 bp, synthetic construct
  misc_feature 1..21554: note = Synthetic
  source 1..21554: mol_type = other DNA
cggcaggttatgggacgagatttttacctgcaacaaaaactttacctaaagagatgttacctatcttaaccaaacctttgatccattatggtgttgatgaagctttggaagcaggaatggaaaatatgggctttgtcacagggcgtggaaaaagagctttggaggattattttgatatttcttatgaacttgagcatcaaatttcaggtacaaaaaaagaatacttacttgatgaaattcgctctttgatcaatcgttgcacctttacttttacaagacaaaatcaaatgaaaggtttaggtgatgcggttttaaaaggtagacctttggttggcgatgaagcttttggcgtaattttagctgatgatttgtgtgtcaatgaagaaggcttaaatgttatggctcaaatggtaaaaatttatgaaaaatatcgctgcaccatcatagctgtgatggaagtaccaaaagaacaagtttcaaactatggagtaatttctggaaattttatagaagataatcttatcatggttaattctatgatagaaaaaccaagtcctgatgaagctccaagtaatcttgctatcataggaagatatattttaactcctgatatttttggaattttagaaaatactaaagcaggaaaaaatggtgaaattcaacttaccgacgcgcttttaactcaagcaaccaatggtatggttttagcttataaatttcaagggaaacgctttgattgtggaagtgtagaaggctttgtagaggcgacaaattatttttacgagaaaagtaaatgttaaacaatacgcttttttttaaacaaagtgaaattcacactataagttcttatgcaaatcgtattaatgatgaggtaaaaagtggagatatagggtattatcatcttattgacacaagtttgaatttaatcgatgagagcttgcaatttattcaagataaagagtatgtaaaaaatatcgttttagtgggaatgggaggttcaagttgtggtgtaaaagccttgcgtgatatgctttttaatgaaaaaagcaaccaaagagagctttttatactcgataacacaagctcgcattcttttaataagactttagaaaaaattaagcttgaagaaagtttgtttttaatcatcagcaaaacaggtagtactatagaagttgtatcgctttttaaacttcttattgaacattttaaacttgatatgcaagaattaaaaaaatactttgtttttattactgataaggattcaaaacttcatcaagaaggtgaaaatttaggtattaaatgcttttttatccctgcaaatgtaggaggtcgttttagcatactttcagccgtaggtatagttccactttgtttttgtggctataatgccaaagctcttttagaaggagctaaagcttgttttgaagatttttttactcacaaaaaagatgaaattttacaaaaagcctatcattattgtacacacaaaaatgccaatatcaatgtacttttttcatatagcgatgcttttaaaggctttaatgaatggtatatccagcttattgctgaaagtttaggtaaaaagcaaggctataaacgcataggtttaactcctattgcgctcattggcgcaagagatcagcatagttttttacaactcatcatggatggacctaaaaataaaactgtaacttttttaaaaatcaaagacgctcaaaaagcacctattatccctgatattcattttaaatttttagattctttaagtaataaagtcaatcttcacgaacttttaaacgctcaatgtgatgcaactatgcacgctttaatcgctgaaaatttgagtgttgatgtgatagaacttgaaaaacttgacgcttggcatgcgggatatttgatgtattattatgaactttttacttcaacttgcggtgttatgctagggattaacacttatgatcaacctggtgtggaagttggaaagttgatcttaaaaaatatattaaattcttaatcaaaattcattaaaaaagagtataatgattttaagttaaaattataataaaaatttttaattaataataataattattatttaagaattttatgttataattttaaaaattaaaaaaaaggagtcaatcatgtcagttacaaaacaattattacaaatgcaagcagatgctcatcatctatgggttaaatttcataattatcactggaatgtaaaaggtttgcaatttttttctatacacgagtacacagaaaaagcttatgaagaaatggcagaactttttgatagttgtgctgaaagagttttacaacttggcgaaaaagctatcacttgccaaaaagttttaatggaaaatgcaaaaagtccaaaagttgcaaaagattgctttactccgcttgaagtcatagaactgatcaaacaagattatgaatatcttttagcagaatttaaaaaactcaatgaagcagcagaaaaagaaagtgatactacaacagctgcttttgcacaagaaaatatcgcaaaatatgaaaaaagtctttggatgataggcgctactttacaaggtgcttgcaaaatgtaatttaaggggctttatgccccaattatacaaactaggttataatatccttttttaaaggataaaattgaaagtacttaattttttttatgaaaaccaccctaaatttgaagtaagttatgaaagaaaaaatcaaatttcaaaaccaaatattatcataaaaggcccacgattttgtggtaaaaaaacacttatttttaattttttatctcaatttaaagcaagtgaaattttgtttttagatttatatgatacacgctttgaaaaacaaagtttagaaagacttgctgattttctgaatgaaaatttacaaattaaaattctttgcctttataatttggattttatccctaatttagaaaaaattaacattcccatcatcttaagtacaaatataaaagatttaaatgtaaatgggtttgaagagcttgaacttgattattttgattttgaagaatttattagtgtaagtaagaaaaatttacctataaataatttagtaggtctttttttgcaaagtggacgcagtaaatttggagaaaaaaacatacttctaagacaaagctttactcttttagaattagaaattttaaagtatttagctttaaatttgggtcagcaaatcagtatttctaagatatttatagaactcaaaaaaagattaaaaacttcaaaagatagtgtttatcaagctatcaaaaaattagaaaatacttatgtgatttataccttaaaacatgatgaaaaaaaacttcaaaagatttattttaaagattttggcctaagaaataatctttgtatttcaaaggatttttcacatttatttgaaaatttagttttaagcgagttgtttaaatttaaagaagaatttttttataacaaatactttaacttttatagccaaatatctaaaattgcttatatttcaagtccaactttagatattgatttgattaaattacgtgctaagaaaattttaccaaaggctttagaacttggaatttttcatgtgatttttatcactctttcaagcgaggatagtttttttgagcaaggggttaaatttgaagtcatatcttttgataaattttcacttggattttaggtgttgtttgagtttgtatcgtatttttcaaggttgtatcgtttgatgatttttgtaataagattgatataatatcccttgcgttcagaataagaatctaaagttttaatagcctctagtcctgttatctctttgccttcgcttgcaaatttagctcttgcatcgcgaaacttttcataagcaaaatgacgatttaaatttaaaacataagagtaaacactatcttgcagactatcaaaaatcttaattttatgttttttatctggatgtcttaaatcaggaattaaacctttctcaccccaagtccattctccaaaaagattatttgcttctcttgcgaagcgacttgtacctgtagcactttcaactaaagcttgggctatacccatggattttggaattttttgaatacgttttttatattctgcaaaatcataaagattttcaatgcgatatttgttttttatcgtgataagtttttcaagatttgtttgatttgaagtcctaaagcctgttttgtaagcatctttaaaaaaggcttcgataaaagctctttcttgttcaatttttttaaagctttgatcaaacatttcattcatttttataaaaaaaatttgtcttttttgatctatatcaagtttgtaatattcctctccaaagccattttttagatcatcagcaaaaagtgggattagaaaaagactaagaaaaattataattggcttcaaaacaatactttacctttccttcaaaaaacaattcttcatttttatatgtaaacccaacctcttcaccacttttaggagttattttaactttattttgtacttttttatttaaaaatgccagataaaaacaagcccccattcctgtgccacaagctaaggtttcatcttcaactccgcgttcataggtgcgaacttttaaatgattttcatctaaaatttttacaaaattaacattggcattatatttttgtctcattttttgacaaagtattgtatcaaattcatctaaattttgacaaaaatgcactagatgtggaactccagtgtcgcaaagttgccaagtttttcctaattcttcaaaagtattttgcacgctttttattttgcctaaagatacttcaactttatcttgatttacctttgcttttattattcctgcaccggttaaaaaactcatgttaggatttattttgttaatatgatgtgcaaaatgtgccgcagcccttgagccattgccacacatagcagcccttgagccatcgttattataaaattcccattcaaagtcgtatttttcatgaggcaatatcacgataaagccatccccacctatgccctcataacgattgcaaagttctttagctaaagcacttctatcttcttttctatcagcatttgttatgacaaaatcattcccacttgcacaatatttataaaatttcacatttttcctttagaaatttcttgtattactttaacacattcttgcctaaaatcggcataagaattagtatttttaatgataaaatctgcttttttaagtttttcttcaatatctatttgagaatcaagtctcacttttgcagcttctaagctgagcttatctctttgcatgattcttttaaggcttaattctttaggtgtgtaaattacaatgactttgcctaaattttcataagcaccgctttcaaaaaaaagaggaatttctacaaaaaaagctttattttctttatctagaatttgcatttgttctaaaattttagctcgaattttaggatgagtgaaattttctaaggtttttttagcttctttgttgttaaaaacaatttctccaaggatttttctatcgattttcttttcttttgtgagtaaattttttaagttaaagggagaaaaaatcttttcaagttctaaagcattttcatctaaaattttatgagcgattttgtctgcgctaatgcttttaaagcctaaagaattcgctatttctataaaagtgcttttaccacaagcaattgaagcggttacaaaaaaagcatttttcatcttatgccttattaaaacttttttcgttaaaatacctttttagttcttaaaggaaaataaatgaaaatttcatatgaagatgcaggcgtaagtatagataatggaaatgcctttgtagaggctataaaacctttggttaaagaaacttttaatgataatgttgtaggcggaattggttcttttgctggtgcttttagaatgccaagtggttttaaaaagcctgtgattttaggtgcaacagatggtgttggtaccaagcttcgcttggcaattgatgctaaaaaatatgatactatagggcaagatttagtagcaatgtgtgtgaatgatttgatttgtaattttgctacgcctttgtttttcctagattattatgctacagccaagctcgaagtagaagtagcaaaggctgttgtatcaggcattgccaagggatgtaagatggcaaattgtgcattaatcggcggagaaactgctgaaatgcctggaatgtatgcaaaagatgattttgatcttgcgggttttgcagtgggtatggctgaagaagatgagatcgatagaagtaaatttgttaaaaatggtgatattttattggcacttcctagttcaggacttcattcaaatggttattctttagctagaaaagtactttttgaaagtttaaaattaaaatttgatgacaagatagagggtaaaaatttaattgatattttattagagcctacaaggatttatgtgcgtgattttcttacattaaagccttatattagtgctctagctcatattacagggggtggtttagtagaaaatttaccacgcgttttgcctcgtggtatgggtgcaactatacgcaaacatcatcttaaaactcctgaaattttttatactataggacaggctgtagaagaaagcgaaatgtatagaagctttaacatgggagtgggtttagtaatggttgtagatccttctaatgtaagtaaggttttagaaaattcagatgcctttattattggcgaaatttgcattaatgaaggtattgttttagagtgaaaacaaattattatgattatttatgtgctaaaatgtatgtaattttgcccataaaagcccataaagacaaactaaaattttatctttcttatgtaaataagaaagataaaatttttagagttaatgtgtggaagtgggcggttttgataaaaattgccaaagatgataaaacgaaatatttttgttcgaatgtattaaataaagggtaaaatgcacaatttaaatgaagctttgtttcaaaaaaagataaaagaaattcgcttaaaagcaatagcgagtattatttgtgggtttttaggtatcattccttatcttggagttttatttgttcttgcgagttggattttattttttattgtgctttatgatttaaaaatctatggtggtgctaaaaatttgtttaagaatttccttattagtgtagggattggattttttggtattcttgttaatacaagtattttatttgcaatgctaaagcctagaactggcatttttggtgggctttattttaatcaagataatatttttatggctattgctatatttttagtattacattttgctattttggctttaatttttccttttttgaaagctttttactatgaaattgctagaacaacaaagcaaaagtatttcacttatgcttttaataccttttattagggcttcttactttgattatcggcataggcttggtgtttttgctagcaagtttggttttttggattttagcgtgggtcaaatttaaagaatttgatgagcaagaactttcaaatttagaagaaagattggcaaaagcacaaaaaaaggtttttgattttgatttaaaatggattaaaatcacaatggcttcatttataattttaaacttgctcgttttaacattttcgtttatattagaagttattagctttgaagattttaggttttactacacaaaaaaaactttattttacacagccataatcctagctttgcttagtgtgtttttgttttgtaaaaagataaaaaattacaaactttttatttattttttcatatggcaaggtttaagtgtttttggtagtcatcttctttttattcctgattttatggtagatcaacaaattgtatatggaagtttaaacataatattaagtctatgctatattatttttgcttttttattttttaaaattttgattcaaattacaaaggaaaaacttttttatcttatttttgcattttatgtttgcatagaaattttgataatattaattttctttatttttatgatggttgataactattatatatttacaaaaagtcctataaagatgctcatagataattataaattactttttcaagttgtttatttcgtttcatttttaattgtttggcttatgcttaaaggacaaaaaaatgtaaaaatatgttagaatgatgaaaaaatactattttacgtagatgtttattaggatatattcgtatgtcttaaagctctttatggggtgttaagtaattataatatttaaaaattaaaaaatatatagtttatccacattttatagtttaacttctaaaaatttgatcatctcttttttcattttttagagctagaaaacatatgagtgaaattgctttaaagttagttagagcagttgatactaaatattttgataagaaatttaaatagattgattttacttaaattaaagactttttgcctcgtgatacaaaattaagtgatgaatttttagttaaattgatattaaatatgaaaaaattataaatattaatactttttcaaattaatagtaaatatagagggtttgattttttcacaaaagatttggatagaacttgcaaaaaactttcttcaatatttatacttttaaattttgatgcaaatcctattcaatatagcattggcaaaataaactaaaaagcttaaaatagctatactcaaaagaattccaaaccatgcaaaatttcctgttccaagatttgaaaccgcgttagcaaggatattaactccaccaagtgctttaatgcctttagcacatactccagcggcgatgattatgcttacgactaagataaaaatttcagccatagtcttttaaaatcaccatcatatcttcgcctaattttctagcatttctgtgtcttgcaaattcaacaagaaaaactaaagaaattcttacaaaatttgctatcacaacatcgagcttgatagtaaaaaaatacgctataaataaaaatataacaggtaaccaaggaaagagtgtgtaaaaagtagggcatttaggatcaatgatttgcggaatttcaacttcatcatttaaaacacctttttctttatctcttttatcaatccaagcaaaataaaaaggaatcaagatggcaataattacaacataggtaatcacactataaatttggtaatttaaaaaaagccctacgacattatcactttgtcctaccatatctgccatattgattgaatttccatcttttggatcataatcaagtgcaattaaagaaagcgcacatacagttgtaataggacggattttaagtgagattaaaacaggatacatacatgctaacaaaagcaaaagcaattcagcatagctagaaatgacgatttttaaagccattccaacaacaaaagttccacttaaaattaagtatttattttttgatttttcctgagggtttatttgctaaaaaagcaagttttgccgaagcattgatatgtttcatgtaagcagtaaagcctgccacactcatgataataagtcctactccagaaagctgacttttaaaagtcgctgtgataaaagcataactatcaagtaaaacatttaaaagcttgtatactctttgtttggagtttttggtataggtgttcctgtgatataaaaagcaaaaataagcaagataatatttgaaagaaaaatacaaaaatgggatcgtattttttttgagtatatcataaaaattagcatagggtctcttgaatttacaataaattggattttatctaaatttttaaataaaaaatattttttatttaaaaattacttgttttttgtattataaaattaacatatatagtttggttactgaaaagtttatgtttgtttaaaaaaatgatttttgtattataattatacacaaatcataaatattaaaaaggatctagtgtggcaagaattttggcatttgatataggaataagctctattggctgggcatttagtgaaaatgatgagttaaaagattgtggagttaggatttttacaaaggctgaaaatcccaaaacaggagaatccttagccttgccaagacgccttgcaagaagtgctagaaaacgccttgctagacgcaaagcaaggctaaatcacttaaaacatttaatcgcaaatgaatttaagttaaattacgaagattatcaaagctttaatgaaagtttagccaaggcttataaaggctctttaattagcccttatgagttaagatttagagctttaaacgagcttttaagtaagcaagattttgcaagagtgattttacatattgcaaaaaggcgtggctatgatgatattaaaaatagtgatgataaagaaaaaggtgcgattttaaaagttatcaagcaaaatgaagaaaaactagcaaattatcaaagtgtgggcgagtatctttataaagagtattttcaaaaattcaaagaaaattccaaagaatttacaaatgttagaaataaaaaagaaagttatgaacgctgcatagcgcaaagttttttaaaagatgaattaaagcttatttttcaaaaacaaagagaatttggcttttctttttcaaagaaatttgaagaagaagtgcttagtgtagcattttataaaagggctttaaaagatttttctcatttagtgggaaattgtagtttttttaccgatgaaaaaagagcgccaaaaaattcgcccttagcttttatgtttgtagcacttacaagaattatcaatcttttaaacaatcttaaaaatactgaaggaattttatatacaaaagatgatttaaacgcccttttgaatgaagttttaaaaaacggcactctaacttataaacaaacaaaaaagcttttgggcttaagcgatgattatgaatttaaaggggaaaaaggaacttattttattgagtttaaaaaatataaagaatttataaaagccctagagcttggtaaaatccgcaaagtaaatggtaaaatagttaaaaatggcgatatgtttagagtggatatttttaaacacaaaaagacaaataaattttatgctgtgccaatttatactatggattttgctttaaaagtattaccaaataaagctgtagcacgaagtaaaaaaggtgagataaaagactggattttaatggatgaaaattatgagttttgcttttctttatacaaagatagtttgattttaattcaaactaaagatatgcaagagccagaacttgtttattttaatgcttttacaagctctactgttagtttgattgtttcaaaacacgataataaatttgaaacgctaagcaaaaatcaaaaaatattgtttaaaaatgcaaatgaaaaagaagtaatcgcaaaaagcataggaattcaaaatctaaaagtatttgaaaaatacatagtttcagcacttggagaagttacaaaggctgagtttagacaaagagaagattttaaaaatgagttacgatgaagcttttaaaacactgcttattagctctaatgccaagctaaatttagagctaaatcatcttgtgattaagcaagatgaaaatatagccaaattgtttttaaaggatataaacatcatcgttttagaaagcttacaagtaagccttagttccgcactttttaacgcctttgcaaagcataaaattatcttattaacctgcgatgaaactcatagtataaatggtatttttactccttttttagggcattttaaaagtgcaaaaatcgcaaaagagcaaatgaatgtaagcgctcaaaaaaaggctattttatggcaaaaaatcattaaaaataaaatcctaaatcaagcctttgttttgaaaaaacacaataaaatagagcaaagcaatgagcttataaatttggctaaaaaagtaagcttaaatgatagtaaaaatattgaagctgttgcggcagcgctttattttaaaactttgtttggtgtttctttttcaagagatgagctttgttttgaaaattctgctttaaattatggctatgcaatcattagggcttgtattattagagcagtttgcataagtgggcttttgccttggcttggcataaagcacgataatatttataattcttttgcgctttgcgatgatttgatagaagtgtttagggctagtgttgatgattgtgttttaaagcttaagggtgaaagtgagtttttaagcaaagatgacaaaagagcgttaattagcaatttacaaagcaaaatcaattttaatgggcaaaattatcctttaaatagagcgataaatcattatgtggcgaattttaaaaatgctttattgtatgaagatgaactaaagatagtaaaatttgatgattgaagataaatttatgcgcgtgcttttgatgtttgatgtacctactaaaagtaaaaaagagcaaaaactagcaagtaaatttagaaacaatcttataaaattaggttattttatgttgcaatttagcgtttatatgcgtatttgcaagggtttaagttctgtaaaaagttctattgaaaatgtaaaaaagattttgccaccttatggaaatgtaagggctttaatcatcactgaaaagcagtttgataaaatggagcttttgcttggtggcatagtttttaatgaaaaagttaataacgaaactaatttaacgctttttgatatagatagtcatggagaatttaaatacaaaaattcaaataatgaagaaatacaactaaacaaaaaacaagaaaaatatcatcagcaaaatttatttgaattttaaaagcggttttaggggattgtaaccccgcagagtcccgcaaactctttattttagtccctttttaaatttcttattgagattatagcataatttttgctatttttcatcaaaaaaccccgaaattttcattatctggtaaatatctattttaccataaagaaatttaaaaagggactaaaacataccattatcactttacacaacattaaaattttaccataaagaaatttaaaaagggactaaaacctatattttcaagccaattgccatcactatattttaccataaagaaatttaaaaagggactaaccctagtggattgaaactctgctagggctaattactccactaaaaggaggttgcaaatttgaaacttattgaaatttagggttgattaaaatcgaaataaaattatttaaataattttaaggcataaagataatatccactaaactttcattttctaacatttcacattcttttggtaccaccataagggcagctttattgttaagattatttataatcgcactagagccttctttcttgccttcaagattggctaaaatgcgtccatttttaaattccacattacaagcgacaaattccaaataaggtgtttttttcttgtagcttccttgtaaaaaggctttgcaaatatagtctttaggctgaagtaaccaagagtttaaaatctctcttgcgtaaagattaaacattaccatagccgagtaaggaaaacctggtaaggcgatgatgaatttttcattagccttggctattttgatatgtctacctggttttatgtcggctttatcgatgatgatttcgtattcttttacagctttttttaaaaagtcaaaatctcccatagaaactccgcctgttgtaatcaaaatatcacaactttgcaaagcactttcaagggtagaaaaagtggctttttcatcatcttttaaaagtggaaaaacccttgtatcgcaatttaaatttttagctaaattagctatggcgatatgatttgaagagcggatttgagcaggattttccaaggcttctcctagatctttgatctcacttccgctacttaaaacccctacaataggctttataaacacaccaatgtgaaaaaatccaagttcagccaaaagagctatctcgctataatttaactttgtgccttttttgagcaaaatttcatcttttttatagttttctcctactgcacgcacggcaaaagcttggggaacttttttttctataaaaagagtatcattttctacgcgtacattttcaacagggactaaagtatcacttccctcgctcatgagtgagcccgtaaaggtttttacacaagtaccattttgcacgctaaattgtggcatagtgcctgcaggtgtgaggcctaaaatttttaaaggcttatcttgatcttcaaatttgatcgcataaccatccatagccgaagttggaaattcaggctgatttttaagggcttttatgtcttgagctaaaatgcgtcctaaacactctgtaagagctattttttcaatcttttcataggttttgatatgagagtgtaaaatttttaaactttcttcataagacattaacattttttatccttttaaaagtcctgcaccgcaaagtttggttgatctttctttggcataaattctttctttgtttattacatcatacttccaaataggtgcacttgctttaaaatcttcaacaaattcattaagaagtttaagtcctaattttctttgtttgcttaaaattcctgcaaaataagagctttcatgaaccgccacatcgcctatagagtgagcaaaaagcaagctaataccatcaaaatctactcttttttgccactcatcaaaccatttttttaaaagcggtttataaatatcaaaactaagtgcctcaatgcctccttcttcacgcacaataccacaaaaagtcagcaaagcaccgcagtttttatccttggcaaattcataccattggctataaattttaggaatatctaaagaaccttgatagagtgtaaaatgttccatttaacccccacaaactggcggtaaaagtgctattttatcaccatcttttaacttagtgttttcatcaaaaatgatttcatcgtttaaagatacggcacaaagttctagccattcttttaaactctcatctttttgcaaaatttcttttaattcttttaaattttttacctcaagctctaaattttctttatttatggggcctaaaaattccacttttaccattttattcctttacttctaaatttcccatcattcctaaatcttcatgttctaaaatatggcaatgatacattctaagtcctttaaaatcttgtttcattctaagtcttaactcttcattaggacgcacatttatagtatctcttaaggctctaaattcggctttttgaactttgccattgagttttgatgagatgagttcaaattgcgtgccgtgtatgtggaaaggatgatccatgtgagatttatttatcactatccagtcttcaactactccaagtttggagcttaaatcaatgcgttttaaatcatagcttttgccattgattaaaaacatagacgcaagagcgatttttaattcgctttcactttttcccatcataccatgcatttgcatatgatcttcactcatgattatttctttaaattccttaggttcttctgaaggtttgaaaatttttaaattttttggaagttctatattttctttttttaggttaatattggctagaaatagggtattaggttcttcttttaccatcattttatccctatcataataagcactttctagcttaaaattcccatcttttggagcgtcgattaaaacttctacgcgagaagcaggacttaagaaaagttcttctttataaatagttttttctataagtccaccatcagtaccaacaagtataaacttagctccttgtatgcgtaaatttaaatatcttgccgcagtagcattataaatgcgtatgcgttcgtttgtggcgagtttgatttgaggtttaaattgtccattgatgagtacaaattctccttctctaccatttagccaatcatttaggttgttgttcggaatttgagcgttttcatcaagacgcaaatcgctaatcatcaaatctttttcttttaaatgacttaaagcatctttttttgctttgatcacaaaagcccctgctaaacccataaaaacttgtttagaggcggtataatgaggatgcggatgataccagtaagttcctgcgctatcttgaggaatttcaaaacgatatattctttcttctcctgctaagataggatcatgtgggcttccatcttgatcaggtggcacaggaacgccatgccaatgtatagttgtggcttccttgagtttgtttttgactaaaatttcaagtttatctccttcaaaaacttctatttttggagcaggtactagaccattgtaagtataaaataaggtttttttacctttgataagctctatatgattttctttgatttctagggtagcacgaaaaatatttttttctttactttcatttttgagcaaaggcaaggcttttaaaatttctccttgggggaattgttttggatctaaaagctttaaattttttggagcaaagtttataaaagaagtatctaagtcatgatttatagaatgatttttatgcatggagtgcatatcgtgcataggatttgcataggctacacccatacttgctagagtaagtgcattaaattttaaaaaatttcttctattcattagtttttccttttgcttgattttttgtattatagtcattatttttttagttttagtaaatatttattttgaaaatttggtttaattttgttatgattttagcaatttaatcaaggaaaaataatgttttatgaaaaaattcaaactccagcttatattttagaagaagataagttaagaaaaaattgtgagcttttagcgagtgttggcgaaaagagtggtgctaaagtgcttttagctttaaaaggttttgctttttcaggagcgatgaaaattgttggagaatacctaaaaggttgtacttgtagcggactttgggaagcaaaatttgctaaagaatacatggataaagaaattcatacttattcacctgcttttaaagaagatgaaataggtgaaatagccagtttatctcatcatatagtgtttaactctttagctcaatttcataaatttcaagctaaaacacaaaaaaattccttaggtcttcgttgtaatgttgaattttctctagccccaaaagaactttacaatccttgtggaagatactcaagacttggaattcgtgctaaagattttgaaaatgtggatttaagtaccatagaaggacttcattttcacgcgctttgcgaagaaagtgctgatgctttagaggctgttttaaaggcttttgaggagaaatttggtaaatggatagggcaaatgaaatgggtgaattttggaggaggacatcacatcaccaaaaaaggctatgatgttgaaaaacttattgctttgtgtaaaaatttcagcgataaatatggtgtacaagtttatcttgaaccaggtgaagcggtaggttggcaaacaggaaatttggttgctagtgtagtagatatcatagaaaatgaaaaacaaattgctattttagatacttcaagcgaagcacatatgccagatactatcatcatgccttatacaagtgaagttttaaatgctagaattttagccacaagagaaaatgaaaaaatttcagacttaaaagagaacgaattttcctatttgcttactggaaatacttgtttagcgggtgatgtaatgggagaatacgcctttgataaaaagcttaaaatcggcgataaaattgtttttttagatcaaattcattacaccattgtgaaaaacacaacttttaatggtgtaagacttccaaatctcatgcttttaaatgcaaaaaatgaacttcaaatgataagagaattttcttataaggattattctttaagaaattagtattatttataatttgcataaaatattaattttactcggaagagaatcaaagatataaattttatgcaaagtattttattttttcaaatataaaatcaactcaaatatctaattttcaatactttggtatgattttttaagattttaaatccttgtggaattttattgaaattcagtgatttttaaatcaaatagtattaagataaatcgatttaaaaatcggctttaaaatgaatattaggtatattttgcataatattcattcaagcaaaatttaaagctatttttgaaaattttgaatgcatgggggctttaatggatttggaaaaattaagattagctagaagtctttattatcaatgtctaggagagctttttgttttttcattttctgaagaaagattgtcaaaattacaagagtatttaaagacaatgcaagaatgtttatttgatgaaaatttaaaatcaaattttgatatcttgcttaagcatttagatgatgaaaattctatacaagcattttttaaagaatacgatttgctttttttaagtcttaaaaacagcattccaacgactttttcttacatagaagaaggttttgaaaattcaaatcctttactttgtgtgcgtcaaattttagtcaaaagtaaaataagacgcaatgaaaaattttttaaagaaagtgaagatagtgttggattttgtttattgttgatgagtgaatttttaaggcaaaatgaagatgatttagccaaagagctttttgaaaaagtgatcaataaaagcattgatgagtttttaggcgatgttttcatgaataaaaatgcgaatttatataaggaaattgcaagtattgcatcggcttttatggaatttgaaagactttgctttgaagtggaaaaacctgcaaaaataaattctaaaaaagtgcaaaatgatctatcgcgttcggaatttttaagaagagaagcaaataaacaaaggaggactcgtgaaaaatcgcagggaatttcttaaaaaatccgcttttgccttaggggctgctggagtgcttggtagcacaactttagctctagctaaagatgaagaaagaaaagatttagttaaaggtaaaagcaagaaaaaagaagtgctttttcaaagaagtgctaattgggaaaattattatataaaggctgagtaatgtcaagtgtaggtgaaaatatcaagcttacgcgtcgttcttttcttaaaatggcagcactttcaagcctagcaacaccgttgcttgctagaagtgaaactttaagagaagcgagtgctgatgagcttaaagaagcttatgaaggtagtaaaaaagtaaaaacagtttgtacagcctgttctgtaggctgtgggattattgcagaagtgcaaaatggtgtttgggtgcgtcaagaaatcgctcaagatcatcctgtgagttcaggtggacattgctgcaagggatctgatatgatcgatatggtgcgttcacatgtgcgtttaaaatatcctatgaaaaaagaaaatggagaatggaaacgcataagttatgagcaagctttaagtgagatcggagaaaaactagctgcttatcgtaaagaaaatcctgaaagtgttatgtttttaggttctgcaaaacttaataatgaacaagcttattatataagaaaatttgcagcattttttggaacgaacaatgtagatcatcaagctagaatttgacacagcgcaacagtcgccggtgtggcgaatacatttggttatggcgctatgacaaaccatcttggagacatccaaagaagtaaatgtatcattatcattggagcaaatccagcggtaaatcaccctgtgggttttagacatttcttaaaagcaaaagaaaaaggtgcaaagcttatcgttgtagatcctagatttacaaaaagtgcagcaaaagcggatatttatgcaagaattcgtccaggaactgacattgctttcatgtatggaatgttaaaaatcatttttgatgaaggcttggaagatacaaaatatcttgatgaaagagtttttggaattgataaaattcgcgaagaagcagcaaaatggacagccgaagaagtagaaaatgttacgggaatttctaaagaacttttggtgcaaatcactcacgaagtagctaaaaacaaaccaactacgcttatttgggctatgggtttaactcaacatactgtaggaacttcaaatacacgtttagcacctattgtgcaaatggtacttggaaatataggtaaatttggtggcggagttaatatcttacgcggacacgataatgttcaaggtgcttcggatatggcttgtttgagtgaaaatttacctggttattatcctttaaatgaagcgacttggagatactatgccaaaatttggggtgtggattatgaatggcttttaggaaattttgtaagtaaagattggatgcataaaaccggactttcacttgctagatggtgggcagcagctttaaatggaaaagatggaaatgatgctatcgataatgcaggaacgcctttaaaagctttagtagttatgggaaatggtatcacttcaaccgcacaacaagtaaaagttaaagaaggtttggaagctttagagcttttagttttggctgatccttttgtaaatgaagcagggattatcgcagaaagaaaagatgggatttatcttttacctgcagcaacacagtttgaaacaagcggaagtgtaacagcaacaaatcgtagcggacaatggagatttaaagttgtagatccactttatgaaagcatggaagatcaagaaattttatttgagcttgctaaaaaattaggcttttatgaagactttactaagactttacgcgatgaaaaaggtgagattgtttggcctgaaaatgcaacaagagaaattgcaaaagcagtcagaagtatagggcttaatggttggagtcctgaaaggcttaaaaagcatactttatactgggataaatttgatgaggtaactttagaaggaaaagacgaagttgctggcgagtattacgggcttccttggccttgctggagtgataagcacccaggttctcctgtgctttataataccgacattgaagtagcaaaaggtggtatgggctttagaaataattttggacttgagtatgaaggagagagtttacttgctaaaaatgcacctttaaattcacctattgatacaggttatccacaaattactaaagataatatagaaaaagttttaggtattactttaagtgctcaagaaaaagaaaaaatgggatcaacttggtcttatgatgatagcaatatcatagcaactaaatgtatagaaaaaggcatagttccttatggaaatgctaaagctagagctgtagtttggacttttaaagataaaattccactccaccgtgagcctttacattctccaagaaacgatttggtacaaaaatatccaagttttgaagatcaaaaagcactttatcgcgtggatactaaatttgtttctgtgcaacaagctaaggattattctaaagaattcccgcttaatcttgttaccgcaagact

SEQ ID NO: 4052 - DNA, 21548 bp, synthetic construct
  misc_feature 1..21548: note = Synthetic
  source 1..21548: mol_type = other DNA
tggtgcttttcgtcgtggcaaaccttatatgttaaaacctgcagtagataaggctttaagtgaagggtgtgaaagtgtagaaaaagtacttatagttatacgcaataatgagcctatagaatatattaaaggaagggactatgtttataacgaacttgtgaaaaatgagtcttataagtgtgaacccgaaattatggatagtgaggatttgttgtttttgctttacacttcaggatcaacaggcaagccaaaaggagttatgcatgcaagtgcaggatatatactttgggcacaaatgactatggaatgggtttttgatattaaagattatgataattattggtgtagtgctgatgtgggttggattacaggacatacttatgtagtttatgggcctttagcatgtggagcaacgactataatgcatgaaggaactcctacttatccaaattctgggcgttggtggagaatgatagaagagtatcaaataagcaaattctacacttcgccaactgccataagaatgcttcatgctgatgcacctaatgagccaagaaaatatgatttaagtacgcttgaagtgcttggaacggttggagagcctatcaatcctagtgcttggaagtggttttatgatgaaatagggggaactaaaagtcctatagtcgatacttggtggcaaacagaaacaggtgggcatatgatcacgcctttaccaggcgccactcctttaaaaccaggttgtgccaccttgcctttgccagggatttttgcagaagttattgatgaagaaggcaataaaaaagatgaaggtgaagatgggttgctttgtataactaaaccttggccttcgatgattcgtggaatttggggcaatgatgaacgctatatagaaagttatttttctcaagctaaaaaagatggaaaagctgtatattttagtggcgatggtgctttttatgataaaaatggttatattaccatcacaggaagaacagatgatgtggttaatgttgcaggacatcgtataggaacggctgaaattgaaagcgctattgctaaacatccaagtgtagcagaatcagctgtagtgagtattttggatacgattaagggcgagtcattgtttgcttttgtggttttaagtcctgcatccagttgtgatcttggcggagctatagaaactttaaaagaacttaatgacattttaagagtagaaataggacctatagctaaaatagaaaaaattctttatactccagatttgccaaaaactagaagtggtaaaataatgagaagaattttaagaactatagcaagaggtgaagaaatcaaacaggatatttcaacacttgaagattctaaagtagtagaaaccattgttaaattagctaaggcagagtttgaataacaaggtaaaaagaactttgcctagttgcatgaaaattcataaaaataagctataatgataaaaaaataaaaggaaatttttatgcttcaaacttgtattttccctgcggcaggttatgggacgagatttttacctgcaacaaaaactttacctaaagagatgttacctatcttaaccaagcctttgatccattatggagttgatgaagctttagaagcaggaatggaaaatatgggatttgtcacagggcgtggaaaaagagctttggaggattattttgatatttcttatgaacttgaacatcaaatttcaggtacaaaaaaagaatacttacttgatgaaattcgctctttgatcaatcgttgcacctttacttttacaagacaaaatcaaatgaaaggtttaggtgatgcggttttaaaaggtagacctttggttggcgatgaagcttttggcgtaattttagctgatgatttgtgtgtcaatgaagaaggcttaaatgttatggctcaaatggtaaaaatttatgaaaaatatcgctgcaccatcatagctgtgatggaagtaccaaaagagcaagtttcaaactatggagtaatttctggaaattttgtagaagaaaatcttatcatggttaattctatgatagaaaaaccaagtcctgatgaagctccaagtaatcttgctatcataggaagatatattttaactcctgatatttttggaattttagaaaatactaaagcgggaaaaaatggtgaagtccaacttaccgacgcgcttttaactcaagcaaccaatggtatggttttagcttataaatttcaaggaaaacgctttgattgtggaagtgtagaaggctttgtagaagcgacaaattatttttacgagaaaagtaaatgttaaacaatacacttttttttaagcaaagtgaaattcacactataagttcttatgcaaatcgtattaatgatgaggtaaaaagtggagatatagggtattatcatcttattgatacaagtttgaatttaatcgatgagagtttggcttttatcaaagacaaagaacacataaaaaatatcgttttagtgggaatgggtggttcaagttgtggtgtaaaagccttgcgtgatatgctttttaatgaaaaaagcaaccaaagagaactttttatactcgataacacaagttcacattcttttaataagactttagaaaaaatcaagcttgaggaaagtttgtttttaatcatcagcaaaacaggtagtactatagaagttgtatcgctttttaaacttcttattgaacattttaaacttgatatgcaagaattaaaaaaatactttgtttttattaccgataaggattcaaaacttcatcaagaaggtgaaaatttaggtattaaatgcttttttatccctgcaaatgtaggaggtcgttttagcatactttcagccgtaggtatagttccgctttgtttttgtggctataatgccaaagctcttttagaaggagctaaagcttgttttgaagatttttttactcataaaaaagatgaaattttacaaaaagcctatcattattgcacacacaaaaatgccaatatcaatgtacttttttcatatagtgatgcttttaaaggctttaatgaatggtatatccagcttattgctgaaagtttaggtaaaaagcaaggctataaacgtataggtttaactcctattgcactcattggagcaagagatcagcatagttttttacaactcattatggatggacctaaaaataaaactgtaacttttttaaaaatcaaagacgctcaaaaagcacctattatccctgatattcattttaaatttttagattctttaagtaataaagtcaatcttcacgaacttttaaacgctcaatgtaatgcaactatgcacgctttaatcgctgaaaatttgagcgttgatgtgatagaacttgaaaaacttgatgcttggcatgcgggatatttgatgtattattatgaactttttacttcaacttgcggtgttatgctagggattaacacctatgatcaacctggtgtggaagttggaaagttgatcttaaaaaatatattaaattcttaatcaaaattcattaaaaaagagtataataattttaagttaaaattataataaaaatttttaattaataataattattatttaagaattttatgttataattttaaaaattaaaaaaaggagtcaatcatgtcagttacaaaacaattattacaaatgcaagcagatgctcatcatctatgggttaaatttcataattatcactggaatgtaaaaggtttgcaatttttttctatacacgagtacacagaaaaagcttatgaagaaatggcagaactttttgatagttgtgctgaaagagttttacaacttggcgaaaaagctatcacttgccaaaaagttttaatggaaaatgcaaaaagtccaaaagttgcaaaagattgctttactccgcttgaagtcatagaactgatcaaacaagattatgaatatcttttagcagaatttaaaaaactcaatgaagcagcagaaaaagaaagtgatactacaacagctgcttttgcacaagaaaatatcgcaaaatatgaaaaaagtctttggatgataggcgctactttacaaggtgcttgcaaaatgtaatttaaggggctttatgccccaattatacaaactaggttataatatccttttttaaaggataaaattgaaagtacttaattttttttatgaaaaccaccctaaatttgaagtaagttatgaaagaaaaaatcaaatttcaaaaccaaatattatcataaaaggcccacgattttgtggtaaaaaaacacttatttttaattttttatctcaatttaaagcaagtgaaattttgtttttagatttatatgatacacgctttgaaaaacaaagtttagaaagacttgctgattttctgaatgaaaatttacaaattaaaattctttgcctttataatttggattttatccctaatttagaaaaaattaacattcccatcatcttaagtacaaatataaaagatttaaatgtaaatgggtttgaagagcttgaacttgattattttgattttgaagaatttattagtgtaagtaagaaaaatttacctataaataatttagtaggtctttttttgcaaagtggacgcagtaaatttggagaaaaaaacatacttctaagacaaagctttactcttttagaattagaaattttaaagtatttagctttaaatttgggtcagcaaatcagtatttctaagatatttatagaactcaaaaaaagattaaaaacttcaaaagatagtgtttatcaagctatcaaaaaattagaaaatacttatgtgatttataccttaaaacatgatgaaaaaaaacttcaaaagatttattttaaagattttggcctaagaaataatctttgtatttcaaaggatttttcacatttatttgaaaatttagttttaagcgagttgtttaaatttaaagaagaatttttttataacaaatactttaacttttatagccaaatatctaaaattgcttatatttcaagtccaactttagatattgatttgattaaattacgtgctaagaaaattttaccaaaggctttagaacttggaatttttcatgtgatttttatcactctttcaagcgaggatagtttttttgagcaaggggttaaatttgaagtcatatcttttgataaattttcacttggattttaggtgttgtttgagtttgtatcgtatttttcaaggttgtatcgtttgatgatttttgtaataagattgatataatatcccttgcgttcagaataagaatctaaagttttaatagcctctagtcctgttatctctttgccttcgcttgcaaatttagctcttgcatcgcgaaacttttcataagcaaaatgacgatttaaatttaaaacataagagtaaacactatcttgcagactatcaaaaatcttaattttatgttttttatctggatgtcttaaatcaggaattaaacctttctcaccccaagtccattctccaaaaagattgtttgcttctcttgcgaagcgactggtacctgtagcactttcaactaaagcttgggctatacccatggattttggaattttttgaatacgttttttatattctgcaaaatcataaagattttcaatacgatatttgttttttatcatgataagtttttcaagatttatttggtttgaagtcctaaagcctgttttgtaagcatctttaaaaaaggcttcgataaaagctctttcttgttcaatttttttaaagctttgatcaaacatttcattcatttttataaaaaaaatttgtcttttttgatctatatcaagtttgtaatattcttctccaaatccactctttagatcatcagcaaaaagtgggattagaaaaagactaagaaaaattataattggcttcaaaacaatactttacctttccttcaaaaaacaattcttcatttttatatgcaaaccctacctcttcaccacttttaggagttattttaactttattttgtacttttttatttaaaaatgccagataaaaacaagcccccattcctgtgccgcaagctaaggtttcatcttcaactccgcgttcataggtgcgaacttttaaatgattttcatctaaaatttttacaaaattaacattggcattatatttttgtctcattttttgacaaagcattgtatcaaattcatctaaattttgacaaaaatgtactagatgtggaactccagtgttgcaaagttgccaagtttttcctaattcttcaaaagtattttgcacgctttttattttgcctaaagatacttcaactttatcttgatttacctttgcttttattactcctgcaccggttaaaaaactcatgttaggatttattttgttaatatgatgtgcaaaatgtgccgcagcccttgagccattgccacacatagcagcccttgagccatcgttattataaaattcccattcaaagtcgtatttttcatgaggcaatatcacgataaagccatccccacctatgccctcataacgattgcaaagttctttagctaaagcacttctatcttcttttctatcagcatttgttatgacaaaatcattcccacttgcacaatatttataaaatttcacatttttcctttagaaatttcttgtattactttaacacattcttgcctaaaatcgacataagaattagtatttttaatgataaaatctgcttttttaagtttttcttcaatatctatttgagaatcaagtctcacttttgcagcttctaagctgagcttatctctttgcatgattcttttaaggcttaattctttaggtgtgtaaattacaatgactttgcctaaattttcataagcaccgctttcaaaaaaaagaggaatttctacaaaaaaagctttattttctttatctagaatttgcatttgttctaaaattttagctcgaattttaggatgagtgaaattttctaaggtttttttagcttctttgttgttaaaaacaatttctccaaggatttttctatcgattttcttttcttttgtgagtaaattttttaagttaaagggagaaaaaatcttttcaagttctaaagcattttcatctaaaattttatgagcaattttatctgcgctaatgcttttaaagcctaaagaattcgctatttctataaaagtgcttttaccacaagcaattgaagcggttacaaaaaaagcatttttcatcttatgccttattaaaacttttttcgttaaaatacctttttagttcttaaaggaaaataaatgaaaatttcatatgaagatgcaggcgtaagtatagataatggaaatgcctttgtagaggctataaaacctttggttaaagaaacttttaatgataatgttgtaggcggaattggttcttttgctggtgcttttagaatgccaagcggttttaaaaagcctgtgattttaggtgcaacagatggagttggtaccaagcttcgcttggcaattgatgctaaaaaatatgatactataggacaagatttagtagcaatgtgcgtgaatgatttgatttgtaattttgctacgcctttgttttttctagattattatgctacagctaaacttgaagtagaagtagcaaaggctgttgtatcaggcattgccaagggatgtaagatggcaaattgtgcattaatcggcggagaaactgctgaaatgcctggaatgtatgcaaaagatgattttgatcttgcgggttttgcagtgggtatggctgaagaagatgagatcgatagaagtaaatttgttaaaaatggtgatattttattggcacttcctagttcaggacttcattcaaatggttattctttagctagaaaagtactttttgaaagtttaaaattaaaatttgatgacaagatagagggtaaaaatttaattgatattttattagaacctacaaggatttatgtgcgtgattttcttacactaaagccttatatcagtgctctagctcatattacagggggtggtttagtagaaaatttaccacgcgttttacctcgtggtatgggtgcaactatacgcaaacatcatcttaaaactcctgaaattttttatactataggacaggttgtagaagaaagcgaaatgtatagaagctttaacatgggagtaggtttagtagtggttgtagatccttctaatgtaagtaaggttttagaaaattcagatgcctttattattggcgaaatttgcattaatgaaggtattgttttagaatgaaaataaagcgtcaatacgctttatttttgtattttaagttctatttttgtagtgttttgttcttttggcaaaggatggtttgtgctagataaaaggctacaagtacatttacaagcatagcgataagtaaaagaggagtggttcgttttataatatccattggagctacttttgcaaatccagctaaagctatgattccgcctgctattggtgaagctgcacgacctaaacaagatgcaatttctataggtaaaactagagtaataggtgcaacgcctaattttgtagctatatcaggagctagttttccaaaagcattaaaagcggcaattccacttcccataatcactgtggcaaaataaactaaaaagcttaaaatagctatactcaaaagaattccaaaccatgcaaaatttcctgttccaagacttgaaaccgcgttggcaaggatattaactccaccaagtgctttaatgccttcagcaaatactccagcggcgatgattatgcttacgactgagataaaaatttcagccatagcttttaaaatcaccatcatatcttcgcctaattttctagcatttctatgtcttgcaaattcaacaagaaaaactaaagaaatgcttacaaaatttgctgttacaacatcgagcttgatagtaaaaaaatacgctgtaaataaaaatacaacaggtaaccaaggaaagagtatgtaaaaaagtagggcatttaggatcaatgatttgcggaatttcaacttcatcatttaaaacacctttttctttatctcttttatcaatccaagcaaaataaaaaggaatcaagatggcaataactacaacataggcaatcacactataaatttggtaatttaaaaaaagccctacgacattatcactttgtcctaccatatctgccatattgattgaatttccatcttttggatcataatcaagtgcaattaaagaaagcgcacatacagttgtaataggacggattttaagtgagattaaaacaggataaatacatgctaacaaaagcaatccagcatagctagaaatgacgatttttaaagccattccaataacaaaagttccacttaaaattaagtatttattttttgatttttcctgagggtttatttgctaaaaaagcaagttttgccgaagcattgatatgtttcatgtaagcagtaaagcctgccacactcatgataataagccctgctccagaaagctgacttttaaaagtcgctgtgataaaagataactatcaagtaaaacatttaaaagcttgtatactctctgcttggagcttttggtataggtgttcctgtgatataaaaagcaaaaataagcaagataatatttgaaagaaaaaatacaaaaataggattgtattttttaagtatataataagcaacggcaattaccgctaaaagtgtagaacatatcataaaaattggcatgatttctcctaaagttattattagcttttattttattttagctaaaatttaactaataaatatttttcatttaaaattttacttattttttacattataaaattaataatatgtatagtttggttactgaaaagtttatgtttgtttaaaaaaatgatttttgtattataattatacacaaatcataaatattaaaaaggatctagtgtggcaagaattttggcatttgatataggaataagctctattggctgggcatttagtgaaaatgatgagttaaaagattgtggagttaggatttttacaaaggctgaaaatcccaaaacaggagaatccttagccttgccaagacgccttgcaagaagtgctagaaaacgccttgctagacgcaaagcaaggctaaatcacttaaaacatttaatcgcaaatgaatttaagttaaattacgaagattatcaaagctttgatgaaagtttagccaaggcttataaaggatctttaattagcccttatgagttaagatttagagctttaaacgagcttttaagtaagcaagattttgcaagagtgattttacatattgcaaaaaggcgtggctatgatgatattaaaaatagtgatgataaagaaaaaggtgcgattttaaaagctatcaagcaaaatgaagaaaaactagcaaattatcaaagtgtgggcgagtatctttataaagagtattttcaaaaattcaaagaaaattccaaagaatttacaaatgttagaaataaaaaagaaagttatgaacgctgcatagcgcaaagttttttaaaagatgaattaaagcttatttttaaaaaacaaagagaatttggcttttctttttcaaaaaaatttgaagaagaggtgcttagtgtagcattttataaaagggctttaaaagatttttctcatttggtgggaaattgtagtttttttaccgatgaaaaaagagcgccaaaaaattcgcccttagcttttatgtttgtagcacttacaagaattatcaatcttttaaacaatcttaaaaatactgaaggaattttatatacaaaagatgatttaaacacgcttttgaatgaagttttaaaaaacggcactctaacttataaacaaacaaaaaagcttttgggcttaagcgatgattatgaatttaaaggggaaaaaggaacttattttattgagtttaaaaaatataaagaatttataaaagccctaggtgagcataatttaagccaagatgatttaaatgaaatagcaaaagatattacccttataaaagatgagattaaacttaaaaaggctttagcaaaatatgatttaaatcaaaatcaaattgatagtttaagcaaattggaatttaaagaccatttaaatataagttttaaagccttaaaacttatcactcctttaatgcttgaaggtaaaaaatacgatgaagcttgtaatgagcttaatttaaaagtagcaatcaatgaagataaaaaagattttttacccgcatttaatgaaacttattataaagatgaggtaactaatcctgtggttttaagggcgattaaagaatacagaaaggtcttaaatgctttacttaaaaaatacggcaaagtgcataaaataaacattgaattagcaagagaagtaggtaaaaattacagccaaagagctaaaatagaaaaagagcaaaatgaaaactacaaggccaaaaaatccaccattactcttttttatcaaatccctattttgctttaatatattaatcaaatgcctataataaaatgttttaaagcttgttctatatcgttcttttatattccaaaatgtgctataatgttcttaaaaaagtgggtcacttttccaaaaatgggttacaaaatgggctactttttacaccaaaatagacactaaaaaagagagaaaaattaatggcaaaaattaacaaacttaccgatagttttttaaaaagcattaaatgcgaaagtgataaaaaatttataaaatttgctgatccgagtttaaaaggcttatatgtttttatttatcctagtggtaaaaaattatttaaaataagacaagcaaatgatacttatataaaaataggagagtatccgttactttccttagcagagcttagagaaatcgctttaaatgcttttaagctaaaagcaaaaggacaaaacataaaaaacgctaaaagacttaaatttggcgatatatatgatgaagttttagaaaaatgtaaggctgatggattaagtctaaaagaaatacaaagaggattaaaatacaaaaatggcgtttttaagaatttcaaagatgtagatatagaaagcatcaagcgttcacatgtcatcgaaacacttaaaaccatagagcatcaaatccctacacttataaaagctaaaggctggattaacaaaatctttaaatatgctttgcaacttgaaatcgtagaaaataaccctgtgacaagtattgataattccatagtttttaaaaaagcttcaaaagtaattcatcagccaactctactagaaaacgataaaattaaagaatatatattagccttaaaaaattcagatcttaaaaaaacacataaaaatctaatgctttttaatcttttgactgcacaacgccccggtaatgttataaaagcaacttgggatgaaattgatttaaaaaatgctatatggactattaaagctgaaaaaatgaaaatgagaaaagaacatattatcactttaaattctcaagcgcttaaaattttaaaagaacaaaagaaaatgaaagtcaatgattatatatttgctggaagttcaaaaaatgggtgtaatagcgagaatatcacctgtaatatcaataaacgactaggatataaaggtattcaaagtgcacatggctttcgtgctatgtttagaagtttagccaacgaacatcaattagatcatggtgtgagtatggatatagccgagcagtgtttagcacacgagcaaaaaaacgccattttaaaagcttataatcgtagtgaaaatatagaattaaaaagaaagttaatgcagtggtggggagattatatcgaaaaacttgcaggggatttttaaatcaccttgcaagtttgcaaccatttatcaatttcggctttttcatatttaaaagtagaacctattttaatccctttaggaaaattaaatttattttgatttactcgcattctcattttgcgaatttttagcggagtaaatcccagatactccgctacttcttttgttgataataatttttctatcttaccaaattttgccatttcatactcctttctctaaatcaaagcctaattttgcaataattgctttttgctcttcatagcttaaaaaattgctgattaaaatcaaaacatcaccaaaacaaaagcgattatagctcgtgctttgttctagcactttaatttctaatgtatctcttaaactctcaagcgaagctgttattttccaatttttattaatagcttttaacatctcatcgtttgcattttgattaaaagcattgtcgtttcttaaaagcaacatttcttttatcgtttgctttaacatttcttgcgtattttctagctctttttctaatgctattttagcttttatgtattctttgaattctttcattttttatcctttctaacttaagcaaataagcttctttctatgtgtttaaacataatttcattagcacttttaaaaaagtcttttttaatctcaaagccataagctttgcggtttaaatttgtagctgctaaaagagtgctaccacttccagcacatggatctataacaacatcacctgcatctgtaaaaatagtgattaatctttctagtaatttaacaggcttttgtgtgggatgtactttaggaataccttcatctttttgccaatccatgcagttataaatcatctttccatcattgttaaattttggaagtttttcacgatataagattaaagcatattcacaatttccaactattttcatatttgcttttaaaacttgagatgagctttgttttctaaaaaccaaatttatataatgattaaagccatattttttagctacttcaattaacattgtttgttgttcaaaagagcaaaaaacaatcatgcaaggacttttaccgcattctttaggttcttttataagcatttttgagcaaaagtgcataaattcgctaactctaaaatcattatctgtatcaaaaaacgccttgtttgcttttttgctttctccatttttattatccccatttatataccattcaggagatgaagcataagcattgttgcctaaattataaggaatatcagctattacaagctgtgcttttggtatattatatcttttaaaattttgaaagtggtcgttataaagctgtgggtgaaacatcatcacttcctttttgattaaataaattaggctcttttaaaaaggctattttttccattatttcattaaattcgctctgatagtctttgatattctgatttaatatgcttctttcatctttaactctttgtatagatctatgaattgctaaagctcttttggttaaaacttctatctcttggtttaactcaccttgatttaattcctttaactgctctaattgctgattagtattttttttcattttttatccttttaattatattttcaagttttaaaagtccgcgttctaaaacttcttgttcttctttacttcttgcttttagctcatttattccttttgctgcaatagaataaaacaccaaatcaattcgtttgtaaaactctaatttctttttgtattcttctcttagtctttgtaaaatgttttctttttctttttcaaataaagctaaaacaaaagaatctgaaaaataaaaacaaagtcttctttctttattttcccctacaatctttgcatctttaaaaaagtatttaagatcattatttaaaacaagttttgctaaatcataagcttctaattctcttgtaatattcatttaacacctcattgtataagttttattaaattctcttgtgatcttttctacttcaaaagtagcttttaatttattatcacattcagggcaaaagccatctaaactcacgctttttacatcgcctataatttcatcaagacctttaaaaaatttagaatttggcacaaattctaagttgcattttgaacattttattgtccctttaaaaataaaatttactttcatattctctcctaacttgccaaagcgtaaggcttaaatgtcttagcccaacgtggattgtttaaatactttgtttgctcaagtatcactctcatattaaaatgccaaattcctatcattcttaaataatcttgcataagatccaatgcatcattgatatcattttctattctatctaagaacttatcctttatcttcaatgtaagctctaatcttttccatcgcacaaattcccttttaatgttttctttgtgatagtgcttttgtttttcgtatttatcataaagtaaaatgcgttctaatttatagtatttactttgaggattgttgatatacatacttgttttataagtatgaaaatcgccaaagattttaagtttgctaaacctttcttggtgtttaaattctcttggtttagatactgctagatcatcatcaaaatcacaagcaatatccacactataagctttaaacctttttatcattttgcttaaaattttccacacttcagcttctatttgtttactaggctgataaagcccattaaattgcacctctatgtagtaatcttttgcttttttattctttttagaaagctcaaagcaagccttagaattatctaatataatgatagtatttgaaaggcttttatttctaggttttatattgatataacgcattttaaaaggataaaatttatcattggtttttatgcctttgaatttgtcttttgcaaattcatcaatgcttttatttcttgttgtgcttcgcattttttcaaaaagcccccatcttttaaggtatttgtaaaaggtttttttgttgataacgaaacggaagctgtcgtatcctgtgctatgatttgtttgcataaaatatccttttcaaaaccttttttcattaaaaagccattgctacttatctttacaagtgcatagccacgcattgctaaactttctattacctttgctctttgtgcttttttaaatgcatcattatctttttgtatgggtttaaaactcatttttttccttttttagacattaaatgagtgtttagggtttattaaaatgtcctaaacactgttaaactggtgatttatttaatagttgaaattttttcttcgtttttctaatttaaatactaatatatcacaagcttttttacttagctcatcattagtgcataaaattttagttttaagttctcgcattaaactttccacccaaagaaaaagctcatcatctctaaaaacaaaaagctgatttttggcaaattctgcttttagtttctcgtatttttccccttgtatatttttaagcttaaaaaccttttctttagtctttttgtgcttttgtttttcgattaaaagctgatattttaaagcttttatttcgttttctaggtatggtttgttactcatttttaagctccttaagttctttttcaagcctataaacttttgccgataaaacacataataaagtcgctaatactaaaactataatttctaaaatcatttttaactccttttttgatataatagaaaaggtaaaagatgataagggctttcgccctttgccttaatgctttcttgcgttgataatggctgttatcaagcagattaaagcagtgattaactcgagcacatcactagcgttcatcttttactcctttcttttatttcaaaagtaatttatctttacttttgataacacaattataacataataattactaattgtcaaggttataataatttatttttattttttgtagataaagaagtaatttaaatttactttgtggattaattttcgttaatccacgctttaaagtcttttttgatagcttctgctttttctaattttgcttctagttcaaaaatttttttaagcatattaatagcgtgtgccatttgaaaacttattttttcagtagaaatggcattttttactgcaccttcaccaaaacctattaactcggctaactctttataagttaagccttgctctttacaaaattgttttaattcttcacttgtcatttttccctttcttttattctaaagatattttatcttttatgttaaaaattctatataaaatgattttatttttatcgtttttataatactctaaatctactaaaaaattaaatccataaggatttttcaaaacttcttcggctattttctcatcactaaaactaacatcaaccgcataaggacttaaagcatcgcactttgccttatgttttgttttattgtctattttatttgtagttttatacatcgttatcaaagcattttcatgtatcttttgatattcaatttcctttttttcgcaaatgtaattagcattttcataaataagctcagcttcatcactatttattctcaaaagttcttcacctttatgattgataaaaaaagtattttgatttatagtaacgggtgcaaatatattttttaaattattggcattatacttagtaaaatgcggattttcttctatttcttctatactttttgatttgatatttttaaaagatatgataagttctataaattcatttaatgcttgaataggtgcaataataggcaaaacttctcctgctatttcaaaaaccaaagaatatatatcactgccagtttcaactttttctaaaaaaattttactttgtgttataccgtgctcttttgatataaaactatccattaatttttgaaaacttaacaaagaattagccattatcccaagttctatgttttcttcatggataatttttattttaaaattaacaatattttctttctcttctgtcattaattctccttttaaattaaaaaatcttattagccaaagaaaaaacaaaacctacgctttgctttatagcttctttatcagctaaatctatgctatcttttagcttttcgcctaaagtcttattgctttgcattatattacctcttttctttttcctcacaaacaaaataaacttttacattcttatttttattgattaaaagaatttgttcgtgtaaattttcaaaaggactttctaaattgtcataaaatttcaatccacacacaggacaatttttaatactattgtgagtatctataatgatttgcgtttcacaatttttgcactctagtttaaacttttttatcttggcgatttcttgttccatcacattcctttttacaaacaaaataaaattctgcatttttatttttgctaacacttttgaacaattcagttaaaatttcaaagagattatatcctaaattttcatctataaactttattccacattgcggacaagttttaataacattacctatttttgtaatgatttttgtatcgcaatttttacattttatttttaattctgtaattttttttaaattcttatccatatttaaaccttattttattagttcaaaaagcaaaaccacctatgccactaaataaatcaagatggtttattttcatttaataattccgcattttcgtggatattgcccacaatttctagttcttctaaacaaaattcacttagtaaatcttcatcccattcttcaccatcatcaccacattcaactaaatagaaagctccttctttaaaaacaactttatatttaaaagcttcatcttcagaacaaccttcaaaagaatataaaatatctccttcataaatcttatttccttttttatcgtaaaatcctgtaaatagttctatttcaactctatcgcttggcatttgaatttcatctttaaaagtttcattgtctccatattcgcttaaatctatatcaacttgctttcaaaatcgcttttaaaatggctatttgccctttacctgttatttttgtcgtgcttacaagtctatcgccattaatggtgctaacagtcgtttcacttaccttaaaaagtccttgttcgatgtatttttgataaggtttattatcactcattaaaaatcctttttcacgcaagatcttaaaaagtcttttctcgccaatttcaagattatttttttcgtgtaagatttttgcgtaatctcttatcaaaatagcatcatttgtgttttgaatgcgatttgcaaaatgaattaaaggtgcattttgttcggcttcgttttttaggctttgattttctacttgaagtttttcatttttttctaaaagctctaattgcatttgcaaactttcttttaatgaaagcggtttataactttgttttttaagctcattttctaagtattctaatctatcgattatctttgctcttagctcaacactatatccactcactaaaatcaatacttctctttttggtaagcgataacacttgtaagattgcttattttgtgtgttttggtaggtgtcttcaaatttgaagacacccccttcaaccactttttctaagtaagtttctatatctcttataacattaaaatgctccttgcctgtaagctctgctatctctaaagaagttaagcttatttctttgttttcatcttttttaaaaagttctaaattcatttattctccttaaaattttttagtgtttaaatgaagacttaagagccatcttaaaagatggcttaatttaagaagaaataaataaatttgaggactttaaaagaattctcattagtcctcatttaaacactaaccaaaacataggacctgcattcaaagtctaaaagacttttggtattttggtaaattaacaaagctttaaaaaagcccactttccacaccgtcgcctgtgagtgcaatgaatataagaacacactagccataaaaggctagtgaagcaatctaaaaaatatcaaacctttaaagttcgcaattgtaggcgtttatccacttaacgcaacttttgcaaaaaccctttaagcacactttttgctatcactttaaaaaatgcgattttaaagtgcttagataaatgtgcttaatgaggcttttaagccgcctcgatctcttctaataaagctttaatttctttcatagatttttcataggcttgcttacggatttcgttctttttatactcgctttttagcttttctatgcgttttattagtctttcatcctctcttaaacccagttttaaaagggctatttcaacctttgcatttgtaagattatttgaaagccaactatttaagacattgtgagctaaatttagttttaaccctgcttctgttatgctactaacacctaatttttgctttatagcttgtttcattttgaaacctttatgctgataatcgttttttcaaaaagtccatcactcacagcttctatgcttatctcatcatttgtatgtaaaaaattaagtcctttttcaaaaacctcatcactaaaattaaaacactttctaagctcttccttttcttcagtttttctaaaacttaaaacatctaaaattgattttgcttctatcattttttgctcctaaaaacttgttaaaagcttttttgtgatacaatctaaaagcttttaagaaaggttttaaatggacttttatactcctattaaagatatttttggctcaagcgtttcagcttttttctttggttttatgcttggttttgtgctttgtaaaatgttttcttttatgaaatttcttattaaagcactagaaaagaaaaaaactaatatttggcatgatacttgtccttatgtttcacacaatggcaagccgttagctatttcttttaaaacacgaaatagaaaaaccatcgatgtgaattgtccctgttttaattcttcgaataaaacttgcataaaatcaggctttatttgtgctttttacaatgattgattaacaaagccaacgaaaaacctactacaaaaaaacaagctgatattatttcttgcatttttactcctaaaaactttctaagttaaaacttggcatactttatgctttgattaaataattattttattttgtaaaattaattatgtgtagaattataattcattttgaattatttgtcaagtcaaaatacaaaaattgacttaaaaattcttataaattaattcaatttaatttaatttataaagtcaaattatattttaaggtgttaattatgaattatgaagaaattattaaaatattgaaaaaaattgctaatgtagatactataaaagaactaagcgatgtgcttaatataaattacgctacttttaatacttgggctacaaggggagaaattccattcaaaagaattaaagaattttcagaaaaattaggcgtcaatatcgatactataattaacggaaatattaatacaaaaggaaatgaaaatgtcatagtgcaaggaaaaaacaatgttgtaaattttcaaaaaaacagtaaatataatgataaatttcaagaatttttagccttgtatgaaaaatatggcaacgaagccttactagatcaatttatcaataaattagaaaatttaaaaaaaataatagaggag

SEQ ID NO: 4053 - DNA, 14388 bp, synthetic construct
  misc_feature 1..14388: note = Synthetic
  source 1..14388: mol_type = other DNA
tcatacctatagagccagaattattaagcattagggtgcctgagccagagtttgtgatgcctccacttatggtggcattttcttggttggttaggcttagattaccattaccaaagtttgtgatgccttttgttatagaaccagtgttgttaagcattaagttaccacttccttgattcatgatagaacccataatagaagcactattatcaagcattaaattacctgagtttgtattcatgatagaacttgagatggtagaagtattgttaccattattatttttattttctatcattaaattacctgttccagaattagaaatatttcctgttagagtagaagtgtttgtaaggcttaaatcaccacttcctgagtttgtgatacctccttgtattttagaattatttgttatatctaaagcaccatttgcactattgcttatatttccatttataaaagcattattaataagatctaaattgcctgaattttcattggtgatagaacctaagatgatagcatcatcttggttgtttatgtttaaattaccatttgaagtatttgatagatttcctgttagagtagaagtgtttgcaaggcttaaatcaccatttcctaaattgtttatgtctcctgttattttagaattatttgttatttctaaagtaccatctccttcattgcttatattatagccagaatcatttgttcctatagagccaaagttattaagcattagggtgcctgagccagagttggttatgccttttgaaatagaagctccttcttgattgtttatccttaagttacctaaaccagaattagaaatatttcctgttagagtagaagtgtttgtaaggcttaaatcaccacttcctgagtttgtgatacctccttgtattttagaattatttgttatatctagcttacctgaacttaaattgcttatatctcctgttattttagtattatttttattttctatgcttagcttacctgttcctgtgtttatgatagaacctgttatagaagcattggcgctttcattatttttgtcgttttctaggattaaatcaccacttcctaaattgataatttttcctgtcacattaccttagttttctaggctaatggtatttgaacttttgtttatgatatgaccttgtactgttcctttatttattatgtcagctttgccattggttgagatgatctttcctgattcttctattataatagctgcttgattttcttcatcatttaaggagtgggatgtagttttgcttgtttcatggttggcttttatgataccttcgatcataattgcttcttcgcctgagacttctccagcaattataagctgacctaggctttttttgcttccattttgtgatcctatgtgtataccagttttttctccatgaaccttggctcctttttgaacttttatagaacctacagaaatagttttgccattattggctccgcttcctattatctctacgtttatggcgttttcttgtgcttttatattactatcttttgctatgatgatatcacctatttttgctttattaccagcagctccgtgtgcaaaaaagactataccatctttctcggattttatagtgccagcatgataaagaaagtctatgctagttcctagttcaacaataatacctctaccttgagaatctatggttcctgtgttaataagattgttaatatgtgctccattttcataaaaagttaaaactgagattgctccagcttcagtatgggttgattttatattacctgcattaataagattttttatggttcttgctcgtaaggctatacctacttttcctgaaatttcacctttattgaaaaaattagaaatggttaattgactattagattgtctatctaatgtaattgctccactgttattagctttaattgttcctgtattgataaaattttcaatctttgttgcttgataagaagatatatgaagagccatttgatctttggcttctatggttcctgtattgataaaatttttaagagtgatattgttaaaaagaatagcattgtctttgctatatataagtccttgattgattaaatgatttattttaaatttatctttatgggtatcagtattatctccattaaataaaataccatatttagaatgttctcctcctattaaacctttatttaaaaagaaatttatatcgatattgtcatttctattatttccttgatttccttgtcctatggataggctagctttatcatttttattgcctgaaataatacctgtattaataaaacttcctattttaacatcttttccttcaaataaaataccattatcatttgggtggtatataagacctgagtttttaaaagaatctaattttatgcttccttgattttctttccatatgcctatataaatatttctaatatagccttgattatctatagtatttacattaatggatccattattaatatcttgttgattttgtatatttaaagccccatgaataatacctttgttgattattttatctatgataaggttttcatcactagctgcacgggcaagaattactttttcgtcttggttgatataggcatatctacctagatataaagtattagtactttcattgccattgattctaatttgggtattaggataatatcctaaaagagcataatagtaatagttatggttttcaaagttaaatttaaaagcataagatggaccactgatttgtcctaaagcaggagaatttaaacatgaaatagtagttaaagataaaataatcttttttgaagatgaaaaaggatttgttctcaatgtccctcctgtttaagtgttttattgtagaatttctttttaagaaaatgattttaataaaataattttcttatatatttttatggatcatttttccttggcgtaaattgcaggtaatacaaaatacaaaaaaattacacgaatgataagtaatatatctttaaaataagattaaactattatgagattatcactttgcttttgggttaaatgaaaatgggatttgaataagatttatattattataacttcgttttctagcatgataccaaattcttcaaaaaccttttttctagctagttctataagaaaaatggcatcttcatagcttgcattttttttgttgattaaaaaattagcgtgttgttggcttaacatagcatctcctttagtaaaacctttaagtcctactgcttcaattaaacgccctgcaaaatcgtttttgggatttttaaaaatagatccaaagcttgctcctttgggttgattggtgcgtaaattttgtaagtattgatctttatgcgcatcaaagccgaatttgagtttaaattctgcccaaaaaaaagctaagtctaaaggacaaaaacggtaatcaaaatttatgttttctttaagaatttcacccttagaggtggcaattttaaataaattttgactgatgcattcgtctttaagcccagcattcatttttaacaaaccccctagtgttccaggaatttttttaaggtattcaaaaccacaaatattattttttttagcaaaatgatagatggtgcttgatttggttttgcatcctatgcgaagatgtatgaaatctttgctttgatctaaacattctatgaagttaaaattatctgctaagatagctatatttttaggtttagggcttataagtaagttgtttgcccctcctattaaaaaaccttcaaaatcgctgattttgtctaaaacttgtacttcaaaacaagtacctatacgtatagaagagtattttttaaaatctataatcatttgataaaagttggaatttgattaataatattttgagtaaaatcaatcattgttgtagtcatccaaggcattaaaaagatcaaaacaataacaattaagatgattttaggaacaaaagaaagagtcatttcattaatttgtgtggttgcttgaaaaatgctgattataagtcctgcaacaagtcctgcaataagcataggtaaagagagtaataaggtgattttaaaagtttgcactccaagagcaactaaggtgctttcattcattttcatcctttttaagaatttctagcttgttcgtattcactagggataagataatcttttgtatgtataattttatcataaaatttataatcataccctagtttaaagagtgcatctagtgcaagcatttgtgttggacttaaactgatagagtttttgtttgcgtaaagattaagataggtatttagtttttcttcattaacgcggatgagttttctttctattagcatggggattaaaattttgcgatttgaatcagcaagtttgactgcattgctaagatctttttctattttaatggcatcattaagaggcaaggatcgacgtaaagccattccacctaaaggtaagggtagattttctttaataagatcaagccatatatcccaaatttcggcttctacgcaaagattatggttaaaatctaaaatgctttcatggattaaaaccccagcatcaacttcatcatttaaaacagcgttttcaatgtctaagaaatttttataaatgattttagcttgaggatatttgatgcgaaagattaaggcattggtagtatttaatccacttaaagctactttaaaatctttttttaagtgagtattttttttctttattagttttggaccatagccttgaccaaaacttatggctgttcttaaaagggcgtattctaaagcaatcaaaggataaagtgcaaaagaaatagctgtaatatcaaattcattttttaaagctaaatcatttaagctttgtatatctaatgctgtgttttcatagttaaagtcattaccagtccaacctagtttaatagccatatacatgaaaatatcgtctgcatcaggagaatgtgctagagtgatttttttcattttgtttcctttaaatctttaattttattttagcgaaataaatcgttatttaattttatttttgttaaaattctggctaaaaatactattatggaatttttaaggaaaagtatggatgataataaaaaaaagtctttagatgctgctttaaaaagtttagataaaacttttggaaaagggacgattttaagattaggggataaggaagttgaacaaattgatagtatagcaacaggttctcttggattagatttagctcttgggataggtggggttcctaagggaaggattgtagaaatttatggacctgaaagctcaggtaagacgactttaaccttgcatattattgctcaatgtcaaaaagcaggaggagtgtgtgcttttgtagatgcagaacatgcgcttgatgttaaatatgctaagaatttgggagttaatacagatgatctttatgtttctcagcctgattttggtgaacaagctttagaaatagtagaaactttagcaagaagtggggctattgatcttatagtagtagatagtgttgcagctcttactccaaaagctgagattgaaggtgatatgggagatcagcatgtaggacttcaagcaagattaatgtctcaagctttaagaaaacttacaggcatagtgcataaaatgaatactactgtggtttttatcaatcaaattcgtatgaaaatcggtgctatgggttatggtacacctgagaccactacaggaggaaatgcacttaagttttatgcttctgtacgtttagatgtgagaaaagtggctactttaaagcaaaatgaagaacctattggtaatcgcgttaaagtaaaagttgttaaaaacaaagttgcaccgccttttaaacaagctgaatttgatgtgatgtttggagaaggtttaagttgcgagggtgagcttatagattatggtgttaaacttgatatagtagataaaagtggagcatggttttcttataaagataaaaaattagggcagggtagagaaaattctaaagcttttcttaaagaaaatccagaaatagcagatgaaatcgcacaagcaattaaaaattctataggtatagaaggaatgattagtggtggtgaagatagtgaagaaggagaagaataataatgccagtcattcaaaagcttagagcttatgaagttcttgatagtaggggaaatcctactgtaaaagttcaagttgtattaagtgatggaagtttaggagaagctatagttccaagtggtgcaagtacaggttctaaggaagctttagaacttcgtgatgaagatgcaagatttggtggaaagggtgttttaaaggcagttttgaacgtgaatgaaatcatttgtgatgctattttaggatttgatgcttttaatcaaagtaagcttgatgatactttacgtgagcttgatgggacaaggtgttattctcgtttaggagctaatgctactttaggtgtatctatggcagtagcacgtgcagcagcaaatgctttaaaaatacctttatatcgttatttaggaggggttaatgcaagtgttttacctgttcctatgtgcaatatcatcaatgggggagcacatgcaaacaataatgtagactttcaagaatttatgattatgccttttggctttacaagttttaaagaagctttacgttgtgtttgtgagatttatgctattttgaaaaaagaacttgcttgtttgggtcatggtactgctttgggtgatgagggcggttttgctccaaatttaaaaaacaatacagagcctattgatcttttaatgacttgtattaaaaaagcaggttatgaaaagcaagtaaaaattgctcttgatgtagcaagcagtgaattttttaaagatggaaaataccatatagaaggtacaagtttttcaagtcaagatttgattaaacattataaagaactttgtactaggtatcctatatgtagtatagaagatggtttagctgaaaatgactttgaaggttggataaaacttactgaagaattaggtcataaaattcagcttgtaggagatgatttgtttgtcactaatgaagatattttaaaagaaggtatactgaaaaaaatggcaaatgcagtgcttataaaaccaaatcaaattggaactcttactcaaactatgagaactgtgcgtttagcacaaagaaataattataaatgtgtgatgagccatagaagtggcgaaagtgaagatgcttttatagctgattttgctgtagctttgaatacagggcaaattaaaacaggtgctttagcaagaggagaaagaacggctaaatataatcgtttattagaaattgagcttgataatgatgaatttttaggagaaaaactctgagcgatttacttaaagaatatgataaaagcaataaaaaaaagagcttttatgtttatgtaattaaaatgattctttgggtttttggggttgttattggagcgatttattttggtaatttgttttttggacaatattctttagatactttgctttctttagaaaatactaaaaaagagctttataaaaaaattcttttacttaaagagcaaaatgctaaagcgcaaaaagattattttgaattaaaaggattgtatcccaatgaaaattaaaattttaggaatatttttgatttttttaagtttattatatgcagatgataatccttttaaaatagatgaaaatattagtttggctattttacctcagtttcaaaaagaagaagttaaatttaattctagtgcaagaattttaaaaagtattacttttaattatattaatttagatggtagtgaaggcagggtagatttagatataaataaaagtatagattggcatgatacttatatcgtatcaagatttaaaagccctgatccttcaagagttcttgatgtttcagttactatacccgaaaatggatctaagcaagagtctaatataactgctaatgtagaaattcctttagaggtgagtaaaatttatgattttatttcttatgcagtttataaaaataaaatcaaattaattactactgatgagatgattactgatttttcagtaggaaaccctaataaaatagttattgattttagatcacgttttgtgagtcctactaaaaatatacgtcttagtaattctatttttaagcgtattgattttggatcacataaggggtattataggttagtgatttatcttgatgggacttattattatcatatacaaaaagatgctacaggttatatgatcagtttgttttgataatatcattgtgttaataattgatttgagtatcatatttttatttaaaatataaacatgatacattgagaattttaatttttataagggtttttttaagaataaaatgatgaaaatccttgactttagaattattttttgatagaatttccgttttatcggggtgtagcgcagtctggttagcgcacttggtttgggaccaaggggccgaaggttcgaatcctttcaccccgaccatttttatgaattataaatggtgagtgtagctcagttggttagagcatcagattgtggtcctgagggtcgtgggttcaatccccatcactcaccccattgagaacgctcgtagctcaactggatagagcaacagacttcggatctgtaggttgtgggttcgattcctatcgggcgtaccaccaatttttacatgcgttcatagctcagctggatagagcaacggccttctaagccgtaggtcagaggttcgaatcctcttgggcgtaccactttgcggatgtggtgaaattggcagacacgccagacttaggatctggtgcagcaatgcgtgaaggttcaagtcctttcatccgcaccactataaatcccattttaccatacttttagagattttacttaaattaccctgaaacctttgaagtcccattgtatcattttgaattattttaaaaaggtaaccttttagcatgtaacttttaatagtagctggatgaaaggatagttataaaatagtccttttcatctgtttaagtttagcggtaaaaaaggtaaaataagccctaaagcaaaaggcaacccaagataattttattaagtttataaggctttgaaatacgctataatacaataaaaataataaggttaaaatagcgttgatagaaaggattgtatatacccataggaaaaggaaagtatttaaaaagacacaaagacaaaagcaacacgcttttaccattcctttatgccccatttggaactaaaatgaatatataagaatagcgcttgcaagagttaaagaatacgaaaatgagtttaaaaagttttttagtattggatacgctttaaattctagcattttaataaaaaatctttttgaagtatttatactaactacaatataaaagacttaaatcaataacaaaaaggacacacaagaaatctaataagtatttttagtaatcatatttagagccattagaaaatatgcacttagatgagcttatgttttataaggtgcaagaattttataatggaatgaaaaacaaagcactagaaccaaaaacatataataaagccattaaagaagtattaagccttatgattaaatatgcagtaaaaaataaatggattaataaaaatattatgatgggtttaaagcttgataaagtgcaagatagaagcttacaagacttgatttagatattttttataaatacgctatattaaacaataaatgtgttttattaaatgaagatattgaagactttaaaaatattgtaaagattttactacaactaaatatcgctttatttcaaatttgttttacagcagttttattataaaaataagagttatcttgcttattttattatccttttactttaatttttataaactttgtaataaaaaatacaatatttatttaaggatgaagagatgaaaattataggttttgatataggaattaattctataggttgggcttttttagaaaatgatgaattaaaagattgcggggttaggatatttacaaaagctgaaaatccaaaaaacaaagaatctttagccttgtctagacgtaatctaagaagttctagaaagcgtcttaaaagaagaaaattaagattaattgctataaaacatattcttgctaaagaatttaatttaaattataaagattatatagcaaatgatggagaactacccaaagcttatgaaggtaggctaacaagcatttatgagctaagatataaagcattgactcagaagttagaagttaaagatttagcaagagtgattttgcatatagcaaaacatcgtggttacatgaataaaaacgaaaaaaaatcaaaccatactgaaaaaaaaggagaaattttagatattttaaaaaataatgctttaaaattaaaagaatatcaaagtgttggagaatatttctataaagaatttttccaaaaatatagagaaaatactaaagatttcaccaaaatccgcaatactaaagataattacaataattgtgttttagcaagtgatttagaaaaagaattaaaattaatcttagaaaaacaaagagaatttggttatagttatagtaatgactttatcaaagaagttatacaagttgcattttttcaaagaccattaaaagatttttcacacttggtgggaacttgtactttttttgaggaagaaaaaagagcttgtaaaaattcatatagtgcttgggaatttgtggctttaactaagattgttaatgaattaaaaagtttagaaaaaataagtgcagagcttatatcagcccaaacaataaatgaaattttaaatcatatcttagataaaggaagcattacttataaaaaatttagatcttacatcaatctacacgaaagcattaattttaaaagtcttaactatgacaaagataatgaagaaaatgcaaaattagttgattttaaaaaattagttgattttaaaaaagccctaggggaacactcttttaataggcaagaactagatcaaatatctacatatattactttaataaaagataatgtcaagctaaaaactgctttagaaaaatataatttaagcaatgagcaaatcaataatttactagaaattgaatttaatgatcatatcaatcttagttttaaagcacttagtatgatacttcctttgatgagagaaggaaaaaaatatgatcaagcatgtgaaattgcaaatttaaaaccaaaaacaattaatcaaaagcaagatttccttccggctttttgcgatagtatatttgcttatgagcttgctaatcctattgtcaatagagctataagtgagtatagaaaagtcttaaatgctttacttaaaaaatatggcaaagtgcataaaattcatttagaattagcaagagatgtaggacttagcaagaaggtaagagaaaaaatagaaaaagaacaaaaagaaaatcaagccatcaatacatgggctttaaatgagtgtgagaatatggggcttaaaacaaatgctaaaaatattttaaaattaaaactatggaaagaacaaaaagaaatttgtatttatagcggaaagaaaatatccatagaacatttaaaagatgaaaaagctttagagcttgatcatatatatccttactcaagaagttttgataattcatttagaaataaggttttggtttttactaaagaaaatcaagaaaaacttaacaaaactccttttgaagcttttggaaaaaatgtagaaaaatggaatacaattcaaacattagctcaaaaccttccttatcaaaagaaaagtaaaattttagatgaaaattttaaagataaacaacaagattttattaatagaaatttaaatgacacaagatatattgcaagctcaatagctaaatatacaacacaatatttaaattttttacctttaaatgaaaatgaaaatactaatttaaaaagcggagaaaaaggaagtaaaatccacgttcaaactgtcaatggtatgcttacatctgttttaagacacacttggggtttttcacaaaaagatagaaacaactatcttcatcacgcacttgatgctattatagttgcttatagtacaaattcaatcataaaagctttttctgattttaagaaaaatcaagagcttttaaaagcaagactttatgctaaagagcttacaagcgataattataagcatcaagctaaattttttgaaccttttgaaggatttagagaaaaaattttaagtaaaatagatgaagtatttgtttcaaaaccacctagaaaaagagcaagaggtgctttacatgaagaaactttttattctgaatatcaaatgattaaagaatataattctaaagaaggtttaaatatagcattagattgtagaaaaataaggaaaataggcacaaaatatgttaaaaatgttactatggtaagggttgatatctttaaaaagcaaaacaaattttatgccatacctatttatactatggattttgccttaggaattttaccaaataaaatagtagtcgctggtaaagataaaaatgaaaatccaaaaccatggaaagaaatagatgaaagttacgaattttgtttttcattatataaaaatgatttgattttgttgcagaaaaaaaatatgcaagaagctgaatttgcttattataatagttttgatattggtggctgtagtatttgtgttgaaaaacatgataataaatttgaaaatttaacatctaatcaaaaattgttgttttctaatgtaaaagaaggaaacgtcaaggttaaaggtttaggaattcaaagattaaaaatatttgaaaaatatattataactcctcttggagataaaataaaagcagattttcagccaagagaaaatatttctttaaaatcaagtaaaaaaaatggcttatgatgaagcttttaaaagtgtattgattgcaaataaggcaaaactaagcctcgagttaaatcatcttgtaataaaacaagatgataaagaggctagaatttttttaaaagacattaattttgttgtattagaatctttacaagcaagtattacttcaagcttgcttagtgctttagctaaatataaaattatacttttaacctgtgatcaatctcataatataaatggaattttttctccatttttagggcattttataagtgcaaaaatagctaaaaaacaaattggagtgagtttgcaaagaaaagcaattttatggcaaaagattattaaaaacaaaatttcaaatcaagcttatattttaaaaatcgccaatcattctaaagaaactaaagaacttttaaatatggttaagaatgtaaatttaaacgactctaaaaacttagaatcaaccgcagctgctttatattttaaaactttatttggtaaagattttacaagaaatgatatatgttttataaattcaggattaaattatggttatgctattataagatcacttatcattagagctgtttgtataagcggacttttgccatggcagggtataaaacatgataatatttacaatgattttaatctttgtgatgatttgatagaagtttttagaccattgattgacttgtgtgtatttaagttaaaagatacaaaggatagtgaatttttagacaagcaagcaaaacaaaaattaattggtgttttacaagaagaagtggtatttgaaaataaatcttaccctttaaacagggctataaatttctatgttcaaaattttaaaaatgctttattagaagatgatgaacttatgatggtaaatttgtatgatagaagataaatttatgagagttttgttgatgtttgatatgcccaccaaaagcaaaaaggatcaaaaaaacgcaaataaatttagaacctcattaataaagcttggattttttatgatgcaatttagtgtgtatgttaaaatttgcaaaggatcagtttcagcaaaaacaacgataaaatctatacaaagaattctaccaccttatggaaatataagagttttaaccataacagaaaaacaatttgacaatatgcaaatccttttaggtggaacttcttttaatgaaaaaataaatgataataaaaatttagttttatttgaatatgatgaaaaaagcaaagaatttaaatattacaatgaaaaaataagtaaagaaaagaaaaaaactaagtttatacaagctagtttatttgaattttaatggttttaaagggattgtaaccctacgtggataaccaaaaaccacttattttagtctctttttaaatttctctagtaagaa

SEQ ID NO: 4054 - DNA, 13748 bp, synthetic construct
  misc_feature 1..13748: note = Synthetic
  source 1..13748: mol_type = other DNA
ttaatttttgaaggaaataaatgatattgttgataatttcttgcattctactagcaattgtcttaggttatattaccaagataaatgtaggactttttgctatggttttttcctatattataggtgctttttttatggatctagaagttaaaaaaatcattgctttttggcctatttctatattttttgtgatttttgctgtttcacttttttataattttgctgtggttaatggaactcttgaaaaattatccggacatttaatgtatcgttttgctaatcatccttatttgttaccttttgttatttttgcaatcagtgcgattatcgctgctttaggcgctggattttatacagttttggcttttatggcaccgcttacattcttgctttgtgataaagtgggtttaagcaaaattgcaggagctatggctataaactatggagctttgggtggagctaatttcatgacttctcaaagtgggattatttttcgtactcttatggaaaaatcagggattgatacgggtgtagcttttataaattcgagttttatttttatagcgactattgttttacctatttttgttttatcgttttttgtattgagtgcttttagaaacaaaacacaggtgagtgtgatagaaaaaccagaagcttttgatacaaagcaaaaaacaactttgattttgatgtttataatgatatttatcgttttggcaggacctatagctcatcttatttttcctcaaatttctataatagagtattttaataaaaaaatagatattgcgatgatagctattatttttgttgccattgctttattcttaaaattagccgatgagaaaaaagttatagcacttattccttggaatactttgattatgatatgtggggtagggatgcttatcagcatagcggttgaagcaggaacaattaaatggctttcaactcttgtaaaaaatgaagtgagtgtggtttttattcctttaacaatgtgtgccatagcagcctttatgtcacttttttcaagtactttaggtgtggtaactccagctctttttcctataattccaagcatagctcaaagtagtggtttaagcgaagccttactttttacttgtatagttataggtgctcaagcttctgcgatttctccattttcttcaggaggaagtttgattttaggtgcttgtcctgaaaaatacagagaaaaattatttaaagatttgcttgtaaaagcagtgccgataggctttggtgcagctattatagctaccattattatcagttttattttataggggttttgttatgaaaatagatactcacgcacacatttttttaaaagaattaaaaagcattgaaaatgcgcgttataagcctgattacgatgcgagttttaaagattataaggcaaatttagatcgttatgattttgataagggtgttttagtccagccaagttttttaggtgtagataatgagtttttgcttgagagtattaaagatgatgaaaacattaaagccattgttgtagtggatgaaaacattaaatttgaagaattggaaaaattaaaaaatagaaaagcttgcggagtaagattaaatcttatcggcaaggagttggatgattttaaaaatcctatttggatggaattctttgaaaatttaactaagcttaaaatgcaagttgaaattcaaagagatttggatgatgatcttgtaaaaatcattaaacaaatccttccttttggttgcgatatagttatagatcatttagctagagcaagcgataaatctaaaaatttagaagaattacttcatcttaaaaatcctaaagtattttttaaaatcagtggattttatagggcaaaaattcattatactaaaaatgaagaagcaataaaatttgctaaaacaatgtatgaaattttaaaagagcattttttgcctaaaaattttgtttttggaagcgattggccgcatactaattttgaaaaaaatatcaattttctaagtgcttttgaagcttttgaaaaaatcgttacctccaaaaaagaacaagagcaaattttaggagataacgcttgtgctttatttggtttttagccttactctaaaaatatattttgcaatgtattcaaaatattttcttaaataaggcttgtgaataacaaaaccccctagaagtcctaaaaggcttcctatgataatatcttgcaagcgagcatgtattaacatatcgacgcttaagtttccaaaagaagccgcctcggccaaataagtcacataaggagtaagaaaaattacggttaaggcgtagtttctaactactaaaaattcaattataaaggctaaaaacatcatcaaaaagacaaattctagaggggtaaatttaatctttaaaagccaccatgcaaataaaattcccactgtcgtcccaagaatgcgttgaagctgttttatccagactgattttaaattggctccttgtaagataacagttgtactcactgcaacccaataacttctatcgagttctaaaaatgctcctagaaacactgcaaaaccaacaaaaaaagcaataatcatagaatccacaaagatgatatcaaaacccaaatttccattctgtaaaacaggcttgggtggggaatttttaaaaatataaatgacagatatagagtataaaaaagcagctatgttagcaatgataccacctatacagattagtcccactagaaaaatataatctttgggtggaaaaggaaaaaatgaagccaataagcaggaaaaaacaaagaaaaaataccccggtgcacctatattgtaatagcgtatcaaaatagagctagccatggctactagaccgattatgagcggagaaaacgcaggaaaaaaatgggtgcaaagtcctattaaaaaagataagcacaaaccaaaagaacagcacattgtaacagccattctatgatacataggcgtattggttgtataaacaaaagccataattcctatcatagcaattaatcccaagtccatacgctcataatatgcagcaatgctaagcgcaaatccaactgctaaggcaaagaaaaaaggcatttgccaaactctttcagttggattaagctgtatgatttctttatattgttgttttaaaatttttcttttgctcattttcttatttgtccttctccactgattaggtatttataagtgcaaatatctttaacccccataggacctcttgcatgaagtttgcttgtggaaattcccacttctccaccaaagccaaattcacccccatcactaaaacgagtcgaggcattgacataaatacaagatgagcgtagaaggcgttgaaatttgcttatgtttaaagcattgtttgagattatggtttcagagtgtaaagagctgtgttggttaatatgctctatagcctcatcgcaatcttttaccgattttatactgatagcataatcaagccattccgtatcaaaagtgctttcatcagcctttgaaatttctaattttgagtttttaaaatgctctaagatattttcatgtgcgtgaatttttaccttaaaattttcaagttcagggattaaaagctttataaaatctttagcaattttttcatggatcaaaagggtttctagggcattacaaacgcttactctttggcattttgcattaaggatgatttctaaagccatatttaaatttgcactctcatccacaaaagcatgacataagcctttatcttgtttgatgagtggaatttttgtatgactagcaatttcttgtatcatatttgaacttccacgaggaatgatcacatcgactaaatcatcaaaagctaaaatttgcatgatctcatttctttcataaagcatagcaaaacaatcttgcaaattaaactcttctagtactttataaacaagatcaaatatagctgaatttgtgaattttgcttcgctgcctcccttaagcacgcaagcattggagctttttatcattaaagcgatgatttcagcacttagactcggtcttgcttcataaatcacaccgattaaccctatgggaatgctgactttttctatctttaagcccgcataattaacccagcctttggaaattttacctataggatcttctaaataagcgattttttccaaagcatcgcaaagagaaaaaatgcgtttttcatctagcaaaagtctgtcccgcattgctccacttttagtaaaattggctatatctttttcattagcttctagtacggttttgaaattctttcttaaagtgtgagctagttttaatataatattttctttgtctttgggtgttaaattgagtagtttttgagaatttttcttaatattttcaagtaaatttcgcatttttaatcctttatttacaaaaaacttgataaattatacaaaaaaatttagaattgaaaggtaaattttcgaatgaaaaaagtagatttaatcgtagtaggtgcagggccaacaggaattggctgtgcagttgaggctaagcttaaaaataaagaagttttagtattggaaaaatcaaacaatatttgccaaactttaatgcagttttacaaagatggcaaaagagttgatatggcttataagggctgcgaaggaacaaatcacggacatgttccttttcaagatggaactaaagaaagcaccatagaaacttttcaaaatgctttaaatgagcataatatagaagttgaatttggctctgaggtagagagcgttaaaaatgaaaatggagtatttttagtaagtacaggcaagggtgtttatgagtgcaaaaatatcatcgttgctataggtagaatgggtaagcctaataagcctgattataaacttcctggaactttaacaaagattattaatttcaatgctaactctgttttaggtgatgaaaaaatcctcgttgtaggaggtggaaattcagctgcagagtacgcagtagatttggctagttcaaacaaagtaagcctttgttatcgcaagaaagaatttacaaggctaaatgatatcaatcttaaagatatccacgaagctggaaattcaggcaaagtagaattaaaactcggtatagatatagaagagcttgaggatgataatggcaaagctaaagtgaaatttaacgatggtagcagtgagacttatgatagaatcatttatgctatcggtggttctactcctcttgattttttacaaaaatgtggaatcaatgttgatgataaaggagttcctttaatggatgaaaataaacaaagcaatgtaaaaggcattttcgtagcaggggatattgcaactaaaaatggtgcaagcatagtaacaggtttaaatgacgctgtaaagatacttgccgtaatttaatcaaatttggcccttgggctgaatttgacttattaaactttcaatattataatttcttcattatattttaatttttaaatattattatgcaaacacaagataaaaacaataaaaaaattataccgatagaaacctatcgcttagctttctacatactaggacttcaaacactctattagctccttttaagatatttgtattgttaaatattttaaaggattttttatgtcaaatatttttagcatcttaagcccttttaggctttttgttaaatgtgctgtgcctaatgtaataagcatggcatttatttctttttattatattgttgatggaatttttgttggaaaatatctaggaaatgacgctttagcagctttggccttaattattccttttattatgatatcttttgctttggctgatatgatagccattggttcagctgtacaaatttccatgcatttaggacttgggaagaagcatttagctagaaaaatctttggttctagtatgttaattatcttccttatttcatgcttggtaggtattttagaatatcttttaagtcctgttttgatcgattttttagatgtaaatgaagatatcaaatcaatggcaaaagagtgtatgcttgtatttgctttgttcgccccctttacaatgtgttcatttgctttggataattatcttagaatttgtggaaaaacaacttatagtatgataatgaatgtgattatagcattgagcaatatagtgcttgattatattttcatcgttgtgttaggttggggcttgttttcagcagctcttgcgacttgtttgggacttatgttaggtggtatttttggaatttttccttttttatttcaaaatttagagcttaaattctcaagtttgtatatgaatatgaagattttcaaaaatatagtttacaacggaagcagtgaattttttggcaatatctcgggttctttatatggcatatttgccaatttggttttattaaaaatttcaggtactcaagcggttgctgctttttctatcgtttcgtatattgataattttatcattatgcttattatcgctatgggtgatgcgatgcagcctgcgttaagttataattatgctaaaaaggatttttcaaggattaaaaatattttaaaggtaatgttttttgcgggtgcgattttgtctttactgtctatcgtgatgatatttatttttggtaaggatttggtaggattgtttactcaagaaggtgatcaagaatttatcatttttgcttatatggctttgatactgttttcttttaattatctttttgcgtggtttaatgttttaagtggttcttttttaacagcgagtaataaagcgagtttttctttgattttaagcttgagtcaaaatctttttattcctttgtgttttcttttgattttatcttctatcatgggcttaaaaggagtgtggcttagtccattttttgctgaactttgcgttttgattttagcttgtatttttgttagaaaagtttttaagaaactatcgttttcataatgatagtttctttagattgattttagaatttatatcctacgcctgtaagtaagatgtggtatgtttcatcgtaaaaatctatatcgctatttcttttttctaggccataatttgcaaaggcataaagcgagtcatagcctaagaattgattttttacgagcttgagattgagttttgtaatactaccgtcttgttttttgttaaaaataggatctgtgccttctgctttgtattgatttaagcttaagcttggggttaggatatagttttttgcaaaaactagatgtgtacctattttaaagccatatcttgagtagctttgagcttttccatcggcatcattgtaatcatagtttaagcctaaatttaataaagaataattatagcttaattctaactcatgataatttccctctcgcttaagagaagtaaatgttacgctttctttgtctaatttgttttttgcaaaaacataagaagcattaaattttccaaaatcactttcgtaaagttgcgaaattttaaagccgtatttgctcacatcggtttcttcgcgattgcctatagcataaggattagcataggctttttctcttaaagatgaaatgagagaaaaggaagtgctaaagcgttctagataagctctttcatagcccaaagcgataccgcttaaatctcttccattatagtttttaagaaatactctatcgttatcgattaaattcccatagtaaagctcaagacctataagagggatagcagaagtatcggaattatcagcattgtatccgcttagataatcgctatttgctagaggtgagatattgcttttaacatctcttgcgcctattcctaggcttaaatttccactaaagccactttgaaattctatagatgaagcttgacttatcatcaaagaagctaaagcaaaagaaagtaaggtttttttcaaaataaactccttgtatagtttttataattaaaattataactttattgtaactaatattactttaatttttcataaaaagcttatgtgaatttttagattcttttggataaaatctttcaataatttttactcaaaaaaggaaaatagggtgcagcaagagcattttgatttggatttagaacgcgcaattttaagcagttgtatcatgagcgaggatgcttattctagtatagcaggagatatagaacctaaagattttagtcttaaagctcatcaggatgtttttaaagctattattgcttgcgtgaatgctggagagcctatatcgattagctttttaaaaaaacataaaaaaatagatgaacaaattttaacagagattatcgcaactccttcgataatagatcttcccgcttatgtcaatgagcttcgcgaaaaatcgattaaaagacagcttttaagttttgcacatcttttgccaacacggatcaatgataatcgcgcagtcagcgaaatttctgatgaaatcggcaaggaaatttttaacattaccaaccgtgtcaatactaacgatatcaaagatatagaattggttttaagcgagcttttagaagaattcaaaaaacaaaaaagccttgaaaataaaacggtgataggacttgatacgggttttgaagatctaaatactatgactaagggttttaaaggcggggaacttatcatcatcgcagcgcgcccaggtatgggaaaaacaaccctgtgtttaaattttatagagaaggttttaagacaggataagggagtggtaatgttttcgcttgagatgcctgctgctcaaatcatgcaaagaatgcttgcggcaaaaacttctatccctttgcaaaaaattttgacagcggatttaaatgataatgaatgggaacgcattggcgatgcttgtaattattattctaaaaagaaattatttatctatgatagcggttatgcgactatcacagatgtaagagcgattttaaggcgtttaaaggctcaagaagaaagcatagggctttgcgtgatcgattatatagggcttatgatgagcaattctaattttaatgatagacatttacaagtcagcgaaatttcaagagggcttaagcttttagcaagagagcttgatatgcctatcatcgcactttcgcagctcaatcgttctttggaacagcgtgcaaataagcgtcctatgatgagtgatttgcgtgaaagtggagctatagagcaggatgcggatacgattttgtttgtgtatcgcgatgaggtttatagggagcaggatgaaaaagaacgcgaaaataaagcaaaagccgaaggcaagccttatcaaagaaatttcattcctaatcctatgcaagaaaatgctgaaattttagtcggcaaaaacagaaatggtcctgtaggggttgtcgaggttttatttttaaaagaaaaatcttgctttgtggataagccgaaatttgagagtgttgaatttcaggagtagggttaaattgttaaaggtgctttgatacgaaagcaatgttatttaaaatcaatcataaataccataataaaagtgagagcgaatgaaaattttaggttttgatatagggattaactctataggttgggcttttgttgaagataatcaattacaagattgtggtgtgagattgtttaccaaggctgaagaccctaaaacaagagaatctttagttttacctagacgcaatgcaagaagcaatagaagacgactaggaagaagatcaagactgattgctttaaagcatattatttcaaaagaattaaaattaaattatcaagattatatagcaaacgatggagaattgcctaaagcttatgaaggaagacttataagtccttatgagctaagatataaagcgcttaatgaaaaaatagaacccaaagatttagcaagagtgattttatacatagcaaaacatcgtggttatatgaataaaaatgaaaaaaatcaagcgataatgaaaagggtaaaattttaagtgctttaaaaacaaatgctttaaaattggaaaaatatcaaagtgtaggagagtatttttataaagaatttttccaaaaatatagagaaaatacaaaagattttataaatatacgcaataaagaaggcagttatgaaaattgcgttctagcaagtgatttagaaaaagaattaaaactgattttagaaaaacaaaaagaatggggatattcttataatgataattttataaaggaaattctaaaagttgcattttttcaaagacctttgaaagatttttcatatttggtaggagcttgtaccttttttgaagatgaaaaaagagcttgtaaaaattcatatagtgcttgggaattcgtagcattaaccaagattatcaatgagctaaaaagcttagagaaagagagtggagagcttgtatcgagtcagattatcaatgaaattttaaatcatatcttagataaaggaagtatcacttataaaaaatttagagaatacattaaacttcatgaaagtatgaaatttaaaagtctaaagtatgataaagacaatgcagaaagtgtaaaactgatcgaatttagaaaattagtcgaatttaaaaaagccctaggagagcattccttaagtagggaagaattagatcaaatagcgacttatatcactctaattaaagataatgagaaattaaaaattgctttagaaaagtatagtttaaataacgagcaaatcaagaatctgctagaaattgatttcaacgatcatataaatcttagttttaaagcacttaatctaatcttgcctttgatgaaagagggaaaaagatacaatgaagcttgcaagcttttaaatttaaaaacaaaatcaaacaatcaaaaattcgatttcttacctgccttttgcgatagtatttttgcacaagagctcaccaatcctatcgtaaatcgtgctataagcgagtatagaaaagttttaaatgctttgcttaaaaaatatggaaaaatgcataaaattcatatagaattagcaagagatatagggctgagtaaaaagcttagggctaagattgaaaaagaacaaaaagaaaactatgagaataatatttgggctctaaatgagtgtgaaaaatttggacttaaggcaaatgctaaaaacatcttaaaattaaaactttggaaagaacaaaaagaattttgtatttatagcggtaaaaaaatatccatagaacacttaagagatgaaaaagctttagaggttgatcatatatatccttattcgcgaagttttgatgattcttttttaaataaggttttggtttttaccaaagaaaatcaagaaaaactcaataaaacaccttttgaagcctttggagcaaatgaagaaagatggagtaaaattcaagctttagctcaaaatcttccctacaaaaagaaaaataaaattttagacgaagcttttaaaggcaagcaacagcaagattttatcagtaggaatttaaatgatacaagatatatttcaactcttattgttaaatacacaaaagaatatttagattttttacctttggatgaaaaagaagatataaatctaaaaagtggagaaaaaggaagtaaaatacatgtgcaaacaatcaatggaatgcttacatcagttttaaggcatacttggggatttgctcaaaaagatagaaacaaccatcttcatcacgcgcttgatgccacgatagtcgcttatagcacaaatccattataaaagctttttcggattttaaaaaagaacaagagcttttaaaagcaaaactttatgctaaagaacttacaagtgatagttataaacatcaagctaagttctctgagccttttgagggatttagagagcaaattttaaatcaaataaacaaactttttgtttcaaaacctcctagaaaaagagcaagaggagctttacataaggaaacattttaccctaaagatgaaatgattaaaaaatacaactcgcaagaaggtttagaaatagcactaaattgtggaaaaataagaaaaataggtacaaaatatgtagaaaatgataccatggtaaggattgatatttttaaaaaacaaaataaaatttatgctatacctatttatactatggattttgctttaggagttttaccaaataaaatagtaattaaaggtaaagataaaaagggcaatccaaagcaatggcaagaaatagatgaaagctatgagttttgtttttctttgcataaagatgatttggttttgatacaaaaaaaagatatgcaagaacccgaatttgcttattataatagttttgatatcagtaactcaagtatttgtgttgaaaaacatgataataaatttgaaaacttaacagacaatcaaaagctattgtttacaaatgcagaagaaggaaatgtaaaggctaaaaaaataggaattcagggattgagaattttcgaaaaatacattataaccccgcttggagaaaaaatcaaggctgatttcaaatcaagggaagatatcgccttaaagacgagcaaaaaacatggcctatgatgaagcttttaaaagtatattgatatccaatcaagcaaaactaagccttgagttcaatcatcttgtgataaaacaagacgataaagaagccaagttttttctcaaagatatcaattttatcatactagaatctttgcaagcaagtatcacttcaagcttgcttagtgctctagccaagtataaaatcatacttttaacttgtgatgaatctcatcatatcaatggaattttttctccatttttaggtcattttatcagtgcaaaagtagctaaaaagcaaattaaagtaacactacaaagaaaagcgattttgtggcaaaaaatcatcaaaaataaaatttcaaatcaagctcatattttaaaaattaccgatcatatcaaagaagctaaagagcttctagctttggctaaaaatgtaagcttaaatgatgctaaaaatttagaagcgactgcagctgctttgtattttaaaactttgtttggtagcaattttacaagaagtgagatatgttttgtaaattctgctctaaattacggctatgctgtcataagatcacttatagttagagcggtttgcataagtggacttttaccttggcaaggtataaagcacgataatatttataatgattttaatctttgcgatgatttgatagaagtatttagacctttggttgacttgtgcgtatttgatttaaaagatataaaggagagtgaatttttagataaggaagcaaagcaaagattaattggtattttgcaagaagaaatcattattgaaaataaagcttatcctttaaatagggctataaatttttatattcaaaattttaaaaatgctttattggaaaatgatgaacttatgatggtaaatttatatgatagaagataaatttatgagagtgttgttgatgtttgatatacccactaaaagcaagaaagagcaaaaaagtgcaaataaatttagagtttcgcttgtaaaacttggcttttttatgatgcaatttagcgtatatgttaaaatttgtaaaggaatgacttcggctaaaacagcaatcaaatccgtagaaagaattttacctccttgtggcaatataagagtattaaccataaccgaaaaacaatttgacaatatgcaaatacttttaggtggagttacttttaatgaaaaaatgaatgatgataaaaatttagttctttttgaatacgatgaa

SEQ ID NO: 4055 - DNA, 14865 bp, synthetic construct
  source 1..14865: mol_type = other DNA
  misc_feature 1..14865: note = Synthetic
ctttcttttcttaacgattatggacttgtcacagcctatgagattggcgatataggcgtctccaaaaccaagatatttggaatatctcatcaaatcttcgtcaagttcgtccgctgttatagccttaagctttttggctgtgtccacgatattctttagtttgcccaaaaagaacctgtcgattttggtcattccgtatatgctgtcaatgctgaagccccgccacatcgcctcgctgataacaaatatcctttcgtcgtcgggtgtggtcatggatcggataagctcttcatcggtgaatttttttatggattccatcccaatttgataattgagcttgatatccaaggagtctattgctttcaaaaggctttcttcaaagcatcttcctatcgccataacttcgcctgtggctttcatctgcgttcccaagagtctatccgcagtgttgaacttgtcaaagggccatctgggaaccttggtgaccacatagtcaagagagggctcaaaaaatgaataggtcgaacctgtgacattgttttttatctcatcaagagtaaagccgacggcgattttggcggctatgcgtgctatgggatagcccgtcgccttgctggcaagcgcagaagaacggctgacacgggggtttacttcaatgaccacatactcatagctttcgggattgagcgcaaactgtacattgcatccgccctcaatgttcaaggcttttattatttttatggaggcggaccttaacatcttgtattccttgtcggaaagagtctggctgggtgcgactactatgctgtcgcctgtatgaattccgacggggtcgaagttctccatattgcataccacgatacagttatccgccttgtctcttatgacctcgtattctatttctttccagcctgccacagactgttccaagataacttgttttattatgctgttttttaagcctttgagtacaatttcattaaattcatcttgattgtgggcaatgcctccgcccgttccgccaagcgtgaaagcgggtcttataataatagggaagccgttctccaaggcaaaatccttggcttcctctaaggaattgactattgcgctcctgggcacattttcgccgattttgttcataaggtccctaaagagctttctatcttctgcttgctgtattgaggaaagtcttgtacccaatagttctacattgtatttgtcaagaatgcccgcctcagaaaggcttatcgccatattgagcccggtctgtccaccaagggtgggaagaagtccgtcaggtctttctttttctattatttttgtcacggtattgagctcaatgggctctatataaatgacatcggcggtggtcatatccgtcataatggtggcggggttgctgtttactaaaataacatggtaaccctcttctttaagggctttgcacgcttgtgttcccgaatagtcgaactccgccgcctgacctatgacaatgggcccacttccaatgaccatgatttttttcaggtctgtccttttaggcattcttatactccttgagtatttgggtaagtttgtcgtacataaagtctatctcttctttttggataataagaggaggaagaagtcttaaggtgttcttgccagcggtagaagtcaccacgcctttattcaaaagctctttcaaaaccgctttggctgaaatcttttcttcaaattcaattccgaccataagtcccagaccccgaatttccttgacgaagtccgaaagctccaaattctttaatttatgcataagataatcggatacttccaaaatatgctttttatatcttggcttttgcagttcggtaacgaccgcaagggcagccttgcacgccaaggggtttgagccgtatgtcgtgccatggtcacccacttctataacattcgcaagctcttcggtgataaggcatgcaccgattgggaatccgccgccaagccctttggcaagggtgatgatatcgggctgtatcctataatgttcataaccgtacatcttgcccgttctcataatacccgtctgaacttcgtctataataagaagctgtccgttttgtttggtcaattttcttgcttgagtcatatactcctttgtcgcagggttgactccgccctcgccttgaacgcattccaccataaacgctcccacttcggggtcagatagggcgttctttaaggcttttgtatcgttaaagggaacatatacgaaccagtcgggcatgggagaaaagggcttataaaacttttcttgcccagtggcggtgaccgtggcgatagtcctgccgtgaaaggaattcaaacaggtcactatcttatatctgcctttattttgagaattaaagaatttttttgctactttcaaagcagcttcgttgctttctgctccgctattggtaaaaaaaccctttgaaaaatgtgtgttcttgataagtttttcagcaagctgtcctcttggctcggtataataataattgctggctatcataagtttttgggactgctgtttgattgcctttgtcagctttttatggttgtgtccaagcgaacatacagctattcccgcaagaaagtcaacatattcctttccctcgatgtcatatagctttgaaccctcgcctctgtcaaatacgacttcaaaaggagcgtatgtgccaagaataaattcgttgtcttttttgatgatgtcttgtgatttgtacattaaaaaacctcttaatattttcttcatattatataccataatgaatatttatgcaaataattatcttgcaaatactatttaataatgtataatgaattatatgaaaaaaattgtattaaagaacttaagacagcagtacacttatggtgcggttggtattcaagagctatccattgagcttgacgatagagagacggttgcagttctgggcggaagagaagccggcaagacttcgcttcttaaatgtattgctggacttgccccccaaacgggcggtgagatttatatcaacagccgattggtgaatagcgccaagcctaaggacagggatgttttaatggtttatgaagacggcggtttttttgagagaagaacggttttctataacctaagctatcccttaaaaattagaaaactggataagaatgacataacaaatagagtggttgatataagcaaaaaaatgggctttgaataccttcttgactataaaatctatacgctgactctgtccgaaagactaagggtgatgatagccagagccttgcttcgggaagcaagcgtatatctttttgacgacccgtttaagaatgttcagccttatttaaggagaaagctttttaacgaactgtatccctacatcaaaaacatcaatgctcccaagatttttgcgacctcttccgccgatgaggccaaaaccgtagcggacaagattgtcatattgaactatggttttgtgacggacatgggaaaggctgaagatatcataaaaaatccaaattgccttttggcttataggtatatgtatggtgatacatctaatattgtaaagaccaaaatccagcaagaagaagacgctgtctttattgaaattttagggcagaggataaatatagaaaaagataaattgcttaacccaatttatatagggaaggaagtcctggtctgttttctgcttaaagaaaacgataagggcttaaaagctcacaaagaatatatcgaatatgtaaatgacttcaaggttctacatggtaaaatagcgtataccgatgtgaaattctatatagaccgcgagaaagacgaatactttgctttgatagaccaagacaccttaaagatatttgatataaacagccaaagaaatatctatttttagttgacaattttggcgtataggatataagatagtagtaagataacctgaatcgatgatttttatcagagagtaagcttattggtcacaagagaaatattaaacggtattttgggtatgactgtattttagccgctctttgataaaagggcggcttttttgatttattaggaggtcgaaaatgacaagaataggcgttattggaattgttgtggagggagataggactgtctctattgaactgcaaaagatattaagcgactttaatcaaataataatcggcagaatgggagtgcccgaccagagtagcgacatctccgccataagtcttattgtcaaaggaaaaaacgaggaaataaacgctctcagcggaagaataggacggcttaggaatgtaaaagtcaaatccgcccttacttcagttgaaattcaaggaggtaacgaatgaaaaaagtatttatttttctattattaatcgtattatcagcggttatattcgtatcttgtaaccaagaccaaggggtcactatcaatgtggttatgcccgacggtgctcccgctcttgtcatggcaaaagctatttatgacaaattcagttatgagggatacgatatcaattttgagattgtggctggcgctccaaacattcaggctgcaatgttttccggagacgcggatatagccgttttaccctctaatatggcggcaaacctctataacggcggcatagatataaaacttctcagtacgaatgtgtttggtcttttgtatcttgtttccaatcagccttttgaagatatcaacagtctgaaaggcaaggtagtatacaacttggggcagggcaatacgccggattttgttttcaaatatgtattggaactcaatgatatcgaatatgtggaacaagacacgcccgtacaaggcaaagtagcgcttaggtacgcggcgaacgcccaaaaccttatctcaatgatggtggcgggacaggctgactatgctgttttgggagagcctcaagtctctcaagctttggcagtgacacaggatagcgacaatccgtttgagatagtcttgaatttgcaagaagaatggacggacggatatccgcaagtggcgacggtcgccaaaaacagcgtcatacaaaatcacgccgatatgcttgacgcactattagaggtcgtaaaagacaatgtggaatgggtcgtgaaaaacgccgacaaggcggtcgctgcgcttcaagagcatggcagtaatataagcggtttcagctctcagactattatcagatgcaatatcggctttgtgccgtcacaagaggcgaaagaggggattgaggaatattttgaggttatgcacgaattcaaccctaattttatcggcaaaaagatgcctgacaacggtttttatagataatgaaaaatgcggtgaaaaactatctaaatatcatttatcctttgctgtctttagggatatttatccttgcatggtatgtggcggcaaggataattgatgttgaaataattctgcccacgcccgcccgcagtctatctcgattaggcgaaatctttatcacagcggacttttgggcggcggtatccaataccttaataagagttttgataagcttctccatatccttaggactggcgattgtgttttcggtcctttcagcgcttttcaaacccgtatattatcttttgtcgccgcttgtgattatcacaagagccgtacccacaatgagcgtgatactgttaagcttgatatggttctcctctgcgataacacctatgtttattgcgtttttgattatctttcccatgctctatgccagcttttattcggcggtttcgaacatagacaaagaccttatcgagatgtcaaaagtatataatgtctcaaaaaaagatatggcggtaaaattttttgtcccttatattatgcccagctttttagattccataagaagcgccatatcgttgaatgtaaaacttgtgattgcggcggaagtgcttgctcagacaagggacagcatgggggttatgatgcaaaggtcatcaatatttttggatacccccacgcttatggcttggacaatagcggcgattgtgttgagctatctttttgagcttttggtcaagacaacaaaaactctcacggtgaggtggcaaagatgaaactaatagacatcaataagagttatggcagccttgccgttttgaaaaatttctcattagagtttgaagaaaacaagatatgctgtttgcttggtccgtcagggtgcggaaagactactattctcaatattataagctcccttgtcgagtatgagggtattgtcaaaagggagagaggcaacattagctatatctttcaagatcaaagacttttgccaaatctgacagtagaaaaaaacttggaatatgtgcttttatcaacgggaatgaacaaaagtgaaagaatggaaaaaattgacaaagtcttagccttaatggagcttaaggacaaaaaaaagagctatccttatcagcttagcggcggcatgctccaaaggacggctatggcaagggcttttatctatccgtccaatttgctgctcatggacgaaccttttaaggggctggatatatcccttaagaaaagacttatagatgaatttctaaaattgtggtcaagagacaaaagaacggtggtttttgttacccacgatatagacgaggcattgcttatcgcagacagaatagtactgcttagtgacaaagcggaaattattcttgacgaaaaggtaaaccaaagtcacaacaacaggaacctaaacagcgacaatttaataaaaattcgaaaatccatatataaaaactttgtctaaaactgtaagtcgggcaccagcgcccgacttacctttttgatgcggcttaattatttttagccgctttttgatgtggttaatattttttatttcccacatttttagtacattataatataaccaaaactcaatttcaataacaaattttgtcttattttattaataaaacacttaatttgacttgttttatatcccgaaaaaaggttaagattttttaatcaattttgattagcttcaaatgttcttttagtatttttattgaagactcaactgcttcaggggaagtaccgcctttgaactttctttgttcgacaagggtatttatggatatcttttgataaatatcctcttcaacaagaatagagaacttttttagttcgcttaagggcatttcctcaatggtagtatcttgttttatgcaatgatttactaattttcctgttatttggtaggcttcacgaaaaggcactcctttttttgtcaagtagtcggcaaaatctgtggcgttggagtgtcctcttttggcggacttaagcattctctccttgttaaaggtcgctgtacttagcattttattaaagatttttatgcttttcaataagatttcttcgttggaaaagaaaagctccttgtcctcttgcaaatccttattataggcaagaggaagtgcttttaatacggcaagaatagaagtgaggttgcctaacgctcttgcggattttcctcttgtgagctccgccatatcgggatttttcttttgtggcataatacttgaacccgtgctgaaagagtcggacagctctataaagcggtattcgtcagacgcccaagttatgacctcttcagcaagcttggaaaggtgaatcattgtcagcgcagtgttataaatgaagtcagcgacaaaatccctgtcgcttacggcgtccatggcgtttaaggtcagccttgaaaagccaagctcttttgctgtaaattctctatcgatagggtaggtagtgccgctcaaagctccagagcccaaggggcattcgtccaaaatatcataagcgttgttgaacttttttaaatccctaaagaacatgttggcgtacgccataagatgaaaagcaagcgttatgggttgtgccttttgcatatgagtaaagcccggcatataagtatatatgtttttttgggcgatatctataagagtttgaataaaagagacaagctccttttttatagcatttatgctgtctttggcataaagcctaaggtctgtcgccacttggtcgttgcggcttcttgcggtgtggagcttttttcccgcttcgccgatgcgcttagttagttcttgttccacaaacatatggatatcttcggcgtcttgaataataagcgcccctttttggacatcttcaagtatctcattaagaccgtctattatcttgtcggcgtcctctgtcgggataattccacatttgccaagcattttggcatgggcggcgcttgccaagatatcctgcccatacatttttttatccacgggaagggatgagttgaattcgtcggctaattcgtctatatccttatcaaaccgtgctttccatattttagacatttttgtctccgtttagttttttattaatttttccttatagtcgtttattttcattgccctgacttttaatggaagaccaaagagcttaataaatccttgactgtccttttggtcatacacttcgtcttcaccaaatgtggcgatatcaatatcatgcagggaataggggctctttttcttggcgacaacgcagtttcctttataaagtttcataacaacggttccgctgaccgttctctgagtttcgtttacaaaagccattattgaatccataagaggggtataccaattcccgtcatatgcaagctcggcgaatttattggcgactatttccttgaagtgggaagtatttctgtcaaggcatatctcttcaagctccttatgcgcattcataagaatagttccgcctggcgtctcataaacgcctcttgatttcatgcctacaagacggttttcgaccatatctgtaatgcccacagcgtttctggcgcctatctcattaagttttgttaaaaggtccacggcgtccagctcttcaccgttgagcttgacgggaattcctttttcaaattcgatctctacatattcgggtttgtcgggcgcttgttcaggagtcttgcatatcatgagcaagttgtcttttttctcgttccacgggtcttccaaatcctgtccctcatgcgacaggtgaagcagatttctatccatggaataagacctttctttggttacgggaatgggtattcctttagagtttgcataatctatcgcttcttcccttgattttatattccagtcccgccacggggcgattattttaagctttggattcaaagccatgattgttagttcaaatctaacttggtcattgcccttgcccgtacagccgtggcatatggcgtcggcattctctttttcggcgatttcgacaagcctttttgctataatgggtcttgctatggaagtgcccaaaaggtatttgccttcgtataaagcccctgcctttatgagagggaacacagcttctttaacaaactcttcctttaagtcctctatataaatcttgctggctccgctttttatggctttttccctaagcggagaaagctcctcgccttgtcccacatccgccgccatggcaataacttcgcagttctcataattctctttcaaccatggaataataatcgatgtatccaatccccccgaatacgcaagcacaaccttcattttgaactccttttttctcctattttttctgatattatacaactttatgaatatatatacaagcgaatgaactaatttttaaaatatgaaactctaatagtaagtaaaaatcctttaagatttctaaaaattcacgattttatttagttttttatgaaatagatagaaaaaaagtcctaaaaatggaacatattatgaataaaaatgaattactattgaaaaaactttatttttttggtataatttggaaaaacactattgacaaatgttaagttctatgatattttattattaggaacttatataccataccaattagttataggtttctaaattaagggcttagtcccgaagctctgactcacttaacatttgttaggtgagtcattcttttataggaggtaaattatgaagtataagtataggataggtctggatataggtattgattctgtcggttgggctgctttagagcatgatcatgaagaaaaccctattaagattattaatcttggaacaagaatcttttcggcagctgagaatcccaaagatggaaaaacgctgacccaattgagaagggaagctagaggagcaagaaggcgcttaagaagaagggcgcatagaattgatagagttaaaagattattcttaaagtatggcttattgaaagaagaagaattaaattccctctatgataaagaaaatttgatgccaactccagactatccctttggttttgatgtctacaaagcgagatatttggctttagaaaagaaaattggaaatcaggatttagcaagaatcttaatttgcatagccaaaagaagagggtttaagtccaatagaaaaagtgacatcatacaggataaggaaggaaaagaattattgaaagctcttgaaaagaacaaggcatatagaatagaaaatggatatagaacagttggggaaatgttctataaagacccccgttttcaagaacaattttatagcgataaaagacaaagctttttaagtagacctcttataagaaatagtgaaaacgattattccaaaacaattcttctggaagagaatgttgaagaagttaagacaatctttgaaagacaaagtgaactagggaatcagcttcctcaagagttttgtgaggaatatatcaatattttaacttcaagaagagcttttgacgaaggtccaggcgaacccagcaaatatagaggtacctttaaggtagggaattgcacttttgaaaaagatgaattaagggcaagcaagggttgttatacatttgaatatttcagggccttgaataatataaaccatattaaaataagtttaagatacgggaaaataggagaaccgttgacagaggatcaaagaataaagcttattgaaaaaattaaatctgtaaaaagctttacatacgctcaagcgaggaaccttttaggtcttacagaagaagcccaatttagcaatttaaattacggtgtatatgatagaaagaaaaaggaatataaagatccagagaaagcggccataagcaactttgagaatagtgcaaaaataaaaaaggtaattcgtgacgcctcaattgaagagcttgacgccattgctatggtcttagcatttaacaagagcgatgagaaaattaagaacgctttaattgaaaaaaccttaataagaccattctccgaagaacaaataagcttattgcaagacataaaatttgaaaaatttggccatttgtcattaaaagctatgagaaagataaacgaacaaatggaaaaatacggatatacttatgataaggcatgtgaggctgcgggatatgattttagagcgcaaaaaatggggaataaaaccaaattcctcaacactaaagaggtatacgaacaggtaatggatattcctaatcccgttgtcagaaggagcgtttctcaaacaataaaggtacttaatgcgattattagggaatatggttcgcctcaagcgattatgattgaattatcacgagaaatggcaaagagctttgaagagagaaatgaaataaggagaatgcaagaggaaaacagggaatataatgagagtattaaaaaagctgtaagagaaataaagcctaatgctgtaggtattgattttttgaaatggaaacttttcttggaacaacaaggtatatgtgcatattcgttaaagaagatagacccgagcagagtatttgaagagggctatacagaagtagaccatataataccttatagcagaagcagtaacaatagcaatgtcaataaagttcttgtttttaagacggaaaatcaagcaaaaaagaacatgactccatacgaatactacaagtcaattggaagagatttttctgaacttgaagcgtttgctgagaattatataaagaacaaaaagaaaaaaagttatttgttaaataaaaactttaccgagcaagacgctttagcgatgcaagagagagcacttgctgacaccagatatattactaaattgataaaaaatcttataagagacaatctctattttgaagaatccaaaaagtttagaaagagcccagtgaatcccgttaacggaagcgtgacatcatttttaaggacgcgttgggggttaagtaaaataagagaaaaaggagatttgcatcatgctcaagacgctgttgtaatagcctgtacaacgagaagcatgataaaaaaagtaactacattctttcaaaaattagagaacccttatgctaaagaattcatagattttgagactggtgaaatattaactagggaagaattttttgatcgttattctgagaagtttccttctccgtatccaaactttagaaaagagttaataataaggttgttcggagacccgttaaaagaatgttatatagatgaattaataaaatcgggttatactcatgaggatataaggggaataaatagggtatttgtcagtagaatggcaaaatataagaaaaaaggcaaaatcttcgaagataaaatttatagcgctaaatataagaataccgaaggtgtatatgtaataagaacggatataaaaaatattaaattggataaaaatggagaaatagaaggctattttaaaaaagaaagtgattggcctacatataacgcactaaagaagcgattaatagagcacaatggtgacgcaaagaaggcatttattgaaccgatttataaaccaaaaaaagacggcacgtctggaaacattatccgtaaagtaaaaatagaacataagaagtccttgcaagaattaaaaaaccataataaaagcagtgcagccaatgattcacaaataagagtggatattttcaaaaaagacaataaattctatatggttcccgtttatgttttagactattataagaatagattgcctaataaagctataaaagcaaataaaccttatgaagaatggccggaaatagatgaaaattatcaattctgtttcagtctgtatccgtatgagcttgtctatgctcgaaaagataagggctttaatatgaaaagcgttgctaacaaactcaataaagacaaaaaaacagaaaagattactattaaagaagagtatttatattatgttagtataaatagaagaaatggtgcatcaagtgtttgtaatcatgataatagttttataggagaagtgtgtttcatgggatttgacgaattaaaaaaatgtcatatcgacttattgggaagggttagaataatcgataaatatgaaaagagaaaacctttaaggtaaaaattaaaaagggaaaaggatgccgtatattaatatgcttgtctctaaccctgctaaaattactattaaaaacaataagcttgtcgttagaggcgagaaagagattaaattaccaattgaggatataaattcattgcttattgagagtagagaatgccttatatcctcttttgctttaagcaaacttattgaaaagaaatgtgttatttatgtgtgcgacgataagcatataccgagcggttatcttattccgtataactcatattacagaaagctgtccactttacaaaaacaaattaatattccaaaacctttgaaaaagagattatggcaaaagattgttatacaaaaaataaagaatcaagccaaggtcttagaatatcaaaatagacttcaagcggataagttaattgagctcagcaaaaaagtacaatcaaacgataagacaaatgtcgaagctcttgctgcaaatatctatttcagatctctttatggcgacgaattctcaaggacgcaaaatattttaataaactcaattctcaattatggttatacaataattagaggtttaatagctcgtaatatcgctattgtagggtttgaaccatgtattggaatatttcattcaaataacttcaatccatttaatcttgctgacgatttgatagagcctttccgacccgtagtggatttattctcttgcagcatcgattatggtatacaaaaagagcttacttcaaatattaaaaggcaaatatacaacctattaaattgcgatgtaacaataaacaatcaaaagtatgctttgtcttatgctgtcgaaataatggtatccagtttgttaaagagtatctcaagcaatcaagatcttttattattacccgatatattgccattaaaggtacacaggtatgagtagatttatgagaatatttgttttttttgatttacctgtcaaaacaatgagccaaagaagaaaagctacaaggtttagaaacgacctattaaaggaaggtttttatatgatgcaatattcagtttatgtaagagtatgtcacaatatagaaagttgttataaatatatgtctcgagtgaagaaaatggcaccaaaagtaggttgtataaggattcttcctattacagaaaaacaacatcaagatatggtaattgtaactgggaaaagaaaagaagaagaaaaggaagtaagagaataccaattatcgtttttctaaaaaagagtcaaatttcccaaataaatcttctttttataaccgaaaaaacaaaaaaatagaatgaagattaatgagaaaatacttaaaaaaagtacgattttttatgagaatcgtactttttttaggcaatattgccgtgatttagtttcctctattataccataccaattaattatagggaactaaatcagcgagtttttgcgtatggtggtcaatgccattataccataccaattaattatagggaactaaatcagtatgacg

SEQ ID NO: 4056 - DNA, 20557 bp, synthetic construct
  source 1..20557: mol_type = other DNA
  misc_feature 1..20557: note = Synthetic
cagtttactccgcgcaggccccatgcatttcctcgggaaaaaagaactgttccagggcccttttggctggatcttccgtgccctgggcggcaccccggttgaccggcaaagcagtaaggggatggtggaacaggtggccgatattttccggcaaaaggaaaagtatatcctggccctggccccggaaggtacccgcaaaaaagtggagaaactgcgcagcggattttaccagattgcgaaaacagccaatgtacctatattacttgttggatttgatttcaaaaccaggcaggtctgcttctccccggtgatccggcccacagaggaagaaaaggatatgcagaccatcctgcgcttttttgcttccatacagggaaaacatcccgaaaaaggaatgagccatttgctgaaggactgagttcagagacagaataaatcgcgggtattcttttccgttatagctgaaatttccgttaacgggattcctttcagttccgccagcttttccgccacatagcggagataggcgggttcattccgtttgccccggaagggcacgggagcgaggtagggtgcatccgtttccaggatcagtttttccaggtccatttctgctaaaaccttgtcgagcccgctgtttttaaatgtcagcaccccgccgataccgaggtaaaaacccagtccggtgacctgcctggcctggtccgtatttcccgaaaaacaatgaaagaccccgcgcaagcggccatcctggtgtttccgcaccacctcaatacattcagctgttgcattccgggaatggatggcaatgggcaggtcaaattccagcgcccagcggatctgctcatcaaaagccaggtattgctgatcggtaaaggtcttatcccagtaaaaatccagcccgatttctcctacagccacaaaacccccttttttgaggtaatcccgggcgatccggagttcttcccggtagttttcttttaccgaacagggatgcagtcccatcatcggcaaacaggtgcccggatgggcggcggccagagccaggagggactcgtgggtttctgcatcaatggcgggtaaaataattcttttaactccttctttatcagcccttttaagcatttcttcccgatccgcttcaaattccggcaggtaaatatgggcatgagtgtcggtaaataacatggattacgctgataagggaacaaaagtccgtaaaaaactttaggattctcttaaactttccggcattaaaaccatcctaaaggcgttaacttgtacacaaacacaaaactcagctttatgaaaatcaggtttatatccgctgccctgctggcaaccggattccttttttccagcctggtgtttagctcctgtaaaaaagagagcagccagaccgaacaggatctccaggaagccgaagcctcccgggtttccagtgaatctgaatcagaggccgaaaccttctttgaccgggtatttgatgatgccatgggggtgaatgacgaagtgggtatcggcggaaccggcattttcggtcgcctgaatgtctgccctactgttaccgttacccgccccacatccaataccttcccggttcgggtggttatggatttcggcaccaatggctgtgtgggtcccgatggtcatttccgtaagggaaaaatcattgcagaatataccaaccgcctgctcgttcccggtgctatggccgtaaccacatttgacggtttttacgtggacagcgtaaaggtggaaggcacccataaaatcaccaatatcagtacggctgtgacacccggcactgccccggttgaccgcaaattccgcgtgctggtgctgcagggtaaactaataaaacccaatggaaactatgtggcctggaacagcgaaaagaccattgcccaggtggaaggcctgctgacccagataccgatggatgatgttttcaaaattaccggggggtcaaacgggcaggtaaaaagaggaaatctgctggttgcctttaactccacgatccaggaacccctggtcaagcgctttaactgccgctggatagtacggggggtggttaaaaccgtccggctgaacgtcagcacctccagtccctgggtggccgtcctgaattttggaatcggcaactgtgataacctggccctgatcacaattaatggagtttctcaccaaattactttgccgtaataaaaaaattattatacctttaaaccagttttcatagggtacggattaaaaacgggccagggtttctacccaggccctaacttttttatacccgaacggccgtttttttggccggaagggcgacaaattcatatcctttttggctaaaatgctccaatacagccggtaatatatagctcattctttcccatgctttttcactgtcatgcatgaccacaatggatccgtttcggctatgcctgattacatttttcaaacagagttccggacgaattgtcctgtcaaaatcggcactaagtacatcccacattacaatctggtaagcggctaagtattttgcctgagctttccgtattctcccataggggggcctgaataaaccggactccacccagcaggctgcctgttcgatatccgccacgtaagtaccggtatctgtttcccatccattcaggtgatgcatggtatgattgccggtcgtatgcccctcatccaggatctgccggtagatttgcggatacgcctccacgtttttcccgatacagaaaaagctggctttggccccataggcccggagctggtcaaggacaaaagctgtaatctgcgggtgggggccgtcatcgaaggtcaggtagatctttttttcccggcggtccatatgccaggtccggtccgggtaaaaccggccgatccatcccggcatcctgatggggtataaacgcatggtgcaaagataggcctgccgtaaaatcatttccgcctgcgccgggggccttctatctttgcagcctatgaataaagaagtgcgtgtccgttttgcacccagtcccaccggtggcctccatctgggtggtgtgcgtaccgttttatacaattacctttttgccaaaaaactgggcggcaaattcatcgtgcgtattgaagacaccgaccagagccgctttgtacccggtgcggaggaatatatttttgataccctggaatggtgcggactgataccggatgaaagtgtaaggcatgggggcgcttatggcccttaccggcagagtgaacgaaaagcctcttaccggccatatgcggaacaactggttgcctccgggcatgcttattatgccttcgataccccggaagaactggaaaaaatgcggcaggaattcaaaaccgccgataatccctctccgcaatatgaccacaccctgcggatgcagatgcacaattctctcaccctttccgcagaagaaaccgcagctctgctggcagccggcacccggcatgttatccggatcaggatgccggaaaaggaaacggtcagttttaccgatatgatccggggccaggtaagttttgatacctccctggtggatgataaggtactgctgaaagcagacggcatgcccacctatcacctggccgtggtggtggatgattacgcaatgcggatcagtcacgcattccgcggggaagaatggcttccttccgcgcccgtgcatattttattatggaagtatctttttggtatggagcagatgccgcaatgggcgcatttcccgttgatactcggtccgagtggtaaactgagcaaaagggatggcgcgaagtacggatttccggtatttgccatgaactggactgatcccaaaagcggcgagttcaccgaaggcttccgggaaaaaggatttttacccgaagcctttatcaacctgctcgcgctgctcggctggaatgagggcactgaacaggaaatatattcactggaagaactggtacagaaattttccatggaaagggtacacagtgcaggagcgaaatttgactatgagaaagcgaaatggttcaatcacgaatggattaagcagtcgggagccgggagactggaggcgggggtcagaaacctgctgactgaaaacggattgacggtttcggatgataagatgctggagaaagtaattgaactggtgaaggaccgttgtaccctgttgcccgattttgtacagcaggccggcttctttttccggaggccggagcagtttgatatcgcggccatcaaacccaaatggaatgaggccaaacaattgtttttcgcggaactgatccgtaattatgaactgcatcctgactgggaagcgcataccctggaaaataattttaaggaaatcgccgcggccaatgagctcaaacccggtgaactgatgctgcccctgcgtatcatgctggtgggaggcaaattcggtccgggtgtatttgagattgccgcgctactgggtaagcaggagacgttgaagagaatggagatttgtctgggaatgatgaataatgagtaatgaataatgagtaatgaacttgcctgccggcaggcaggtaatgagtaatagagaaccctccggatttcggggggtctttgttatgaaaacattcgggatttagagactactaactactatctgctacctgcaaacttcacccatcaacctgcttctcccgtctccatactcccgactcccgtctccggactccgtactcccgcctccctaccctcttgcttttatcatttccaacaccggccggaaatccgtttcacccagggtctgcagaaagtcccggtcaccaggtgagagcaggaactgactatggatattatcagccacctgttgcgcggtacggataccgggaatggttacactgatttccggaaaactcaggataaagcgaagggccaggccggtaggggtgcactggtattgctcacagaggggccaggctttttccagggcagcggttgcggcttcaataatttcgggtaccagtctcttgctccggtggtcattaacggggaaccgggtttctttatcaaattttccggaaagcagtccgaactgcaggggcatgcgtgcaataaggccatagcccttttccgctgccagccggatcaggggcaggctttgctggttaagcaggttaaagaccagctggaaaccatggcccagtcccctttccatcaggtattgggcttccggcgcgggttcaaaagtattcagcgagagcccccagtagcggatcttgccggctttttgcagttcctgtacggcttcaatacattctccctgttgcagctggggcagccgggcggtatgaagctgataaaaatcaatggtctcacgctgcaatcttcgcaggctgtcatcacaagcctgaagaatatgttttttactgtaatctgtggtaaactgtccctcgcgggcaacatttcctcccttggtggcgatgataatatctttccggcggccgatccattgtccgagcagttcttctgagtggccaaggccatagatatcagcggtatcaaagaaattgatgcccgcatcgagggcggcaaagacagcttcccgggaaagctggtcattggtttcgccccagccgatggccgtagagccgatcatagctccgccgcccatggcccaggcgccaaagccggtttcactgacccggagatctgtatgaccgaaattcctgtagtgcatgacgtaaattaagtgctggttgcggaaagcgcctaattttgccaaagaaaatttgccagatgaacagacccatacgtgtgctggtagccaaggtaggcctggatggccatgaccggggcgccaaagtaattgccaccgccctccgggatgcgggcatggaagtaatttataccggtttgcgccaaacccccgaaatggtggtcaatgcggcccttcaggaagatgtggatgcgattggtatcagtattctttccggtgcgcacaatactgtatttcccaaagtgatggccctgatgaaggaaaaagagatgaatgatgtgctgctgaccggcggcggtattattcctgatgaagatatcgcggagctcaacaaactcgggatcggccgtcttttccatcccggtaccaatacccatgagattgctgattatatcaccggctgggtaaaggaacaccgggatttctgatgcctgtatttaatccgggcagcactcccactttttttagcgggccgggataaggtttgtacaaacttggccatttcccggaagcatactatcttacggcagtcgctgacgattcatttccactcaaaacttttattaccgtaatttattttgcgtatggaagcaactaacctgctttcccgctatggcacagatatgcgggtatgggacgaaatgtttggcagcgaaggaatccgtccggcttaccgcagcctggtggaagccatccagaacctttcggctgcggagatgacccataaagacgaactggccaaaaagctttttatgagccagggcatcacattcaccgtatacagcagcggagaaggtattgagaaaatatttccctttgatatcattccccgtatcctggaggcggcggaatggaaacatattgaagaaggaatcagacagcgactgaaagccctcaatatttttctgaaagacatctaccatcagcaatttatcatccgggatgggattgtaccggccaaactgatatattcctgccccaattttgtccgccagatggtgaatgtgccggttccatttgatatttacacgcatatatccggcattgaccttatccgggatgccgacggcagttattatgtactggaagataacctgcgaaccccctccggggtatcgtatatgctggaaaaccgcagcattacttaccgcatatttcccgatctgctcccgcggaacaaagtacggtcggtaaaagactatcccgatctgttgctgaaaaacctggtggccctggccagccggcagaaaagtgatcccacggtggttttactgacacccggtatgtttaactctgcctattttgaacacagtaccctggcccggatgatgggtattgaactggtggaaggaagcgacctggtagtggataatcacaaagtttatatgaagaccacttccgggctcaggcaggtggatgtgatctaccggcgggtggacgatgattttcttgatccgctggtattccggcccgacagtattctgggtgtgccgggtctttatggcgcgtaccgtaccggtcatgtggctattgtaaatgccatgggtaacggagtggcagatgacaaagccgtttattcttttgtaccggccatgatccgctattacctgaatgaagaaccgatcctgaaaaacgtacccacttatccgcttgagcagcccgacaaccgaaagatggtattcgaaaaaatggacaggatggttatcaaaaaaacaaatgaatcgggcggatacgggatgctgatcgggagcgcggctacagaaaaacaaatggaggagtttaaagtggcggtggaggaggatccgcgcagttatattgcccagccgattatcagtctgtcttccgccccctgttatatcaatggggtgctgcaaccccggcgggtagatctgcggccctttgcactttatggcccggacggaattgatattgttcccggcggactgacccgggtggccctaaaggaaggttcactggtggtaaactcctcgcagggcgggggcagtaaggatacctgggtgctggagtagtgagaggtgcgcttgtctgccgtcaggcaggtagtgagcggggaatagtgagtgggggctgctaagaatgtgttcgatgcttaggtaatctctcaactccccaaacaacaaactataaacaacaaacgcttatgttaagtcgtgttgccgattctgttttctggatggcccggtatatggagagaaccaacgggatgctgcgtattctgcgtaccaattatatttcttcccaggatgaagtgcccgattttaactgggagacactgctgcacaattacagtgatgccggggcagaggaaatcaaggccattggcaaccagtcggtaaaagtgctggagcatcttctgctggaccggcacaatggctcttctgttatcaacaatatcagccgggcccgggaaaacggccgggcggtacaggatcatatcaccaaggaggtctggcagtgcctgaatgattattatcacctgatccgtgacccgcagattgccttccaggtaagcagcggagatccggtaacggccctcgacagcctgattcatcagggtatgctgtaccatggcacagtggatattaccatggcccgcggggaagggtttaattatctcaataccggaaaatttctggagcgggcgattctctcatcggatatgctgatgattaaacttaccgaactggattttaacctgcagcagccggtggaactgccctctttgcgttacctgctgtattctctttccggttacgaattatacctgaaaacacaccggggcaacctgcaggcagattttgtaattcagcaaattctctacaatgaacattttccccattcggtagcctattgcctaaaccagttgttccgttactttgagcggctggaagccgacagtctgccggagaattaccggcaactggaattcctgatagggcgggccatgaacaatgtgaaatacagcagtatcaataccgctgatggcgcgggactgaagcatttcctgcagcagatccgccaggagttatttggcatagctgctgccttcagccgatattattttggaaattcctgaaaccgctcaaatttgtaaaaaatgcccgagtatcatatcagtcatattacccgttatacctatccggcccctgtaattgacagcgccaaccaggtcttattatttcccgtcagtgacctgctgcaggaggtaaaaaaacacgaactggtaattacccaccaccccgcagtagaggtttttaccgattattttggcaaccgtacgggtatattctctgtactccggccgcatactgaactcagtattcgttcccatattgaggtgataacccgagcggtcagtttgccggaagacagcagcgccgcttccctgcaatgggaaaaactcagcgccgaaagggagcagttcccctatatggattttatgctccaggaaagtttctctgcctatgcggacatagcggaacgggtaaaagggctgatcagcggcgactgcactccttttcgggctgcggaaaaaatgtcggcctatgtatttgagcattttgcgtaccggaaaggcatcaccagtgtggaaacagaagtagatgagatactccggctcaaagcgggtgtttgccaggattttgcccatgtgctgctggtgatgctcaggattgcgggtattcctgcccgttatgtaagcggctatatctgtccgaaaaatcatgaattacgcggtgaaggcgccacccatgcctgggtagaggcttttattcctttttatggctggctgggactggatcccaccaacaattgtatcgtgagtgaccggcatgtgcggctggccgtggggcgtcatttctctgactgtaccccggtaaaaggcacctacaagggaccttccgaacacagtcttgaggtatcggtaaccattgataatggcgagcagaaaaaggaaaatgaagaaaacacgccggttttttcctaccaggtacaccagcccggggtcagcaataactcataccggaagtttctggagatgcagcagcagcagtaataaaaaagccgagttgccccggcttgaatgttttcacaacagaataatctttattgtgatttgcttcatcgcgaatatcggaatattaatttaaaaaaacaatggccagaaaatggtattttttgatatttcgcaatgcttatcttagtccaaattgctttgtatgaaaaaaattttaggccttgatctgggaagcagttcaattggttgggcatttatagaagagaacgaaaattcatcaaaaattaaaatgttaggtgtccgggtaataccctatacgggtgatgaaaaagaccagttttccaagggacaggcaatttccgttaataaagaccggacacttaaaagaacggcccggaaaacgcttcatcgttataaacttagaaggaaaaatcttctttcctttctggaaaaaaacaacatgctgccagatagtgaaaaactgttaaaaattgaaccacttcaactttatggtattcgcgcaaaagcagttaccgacaaaatagagcttacagactttggccgtatactttaccacctcaatcaaaagcgcggatataaaagcagcagaagcagttcaaatgatgatgataatggcaaaaaactgagcgactatctgtctgaaatgaaagaaagaaaagatatacttgaaaaagatcatataaccatcggtcagtatttttattcccgtctgaaagaaaattgtcatttcagagtcaaacaaaacgtattcccccgcgagtgctatatcaatgaatttaatactttatgggaggcccagcaaaaatattatcctgaagtacttacagaacaaaacaaaacggttgtcagggatcagattattttttaccaacgcagactgaagtcacaaaaaggactggtcggagaatgccagttcgaaaaacaccataaagtcactcccaaaagttctccattattccagatagaaaaaatatgggaaagtattcataccattagtattacaaataaatacaaagaagcatatactctttctcaggaacagcggctccagattttcgattaccttgatcagcatgaaaagctgacccaaaccgaacttttcagaattcttaaaattaaaagaacggatgggtggtttgcgaatgaaatgatcagaaagtccggacttcagggaaacctgacaaaaacaactttacttaagaagctgcaggaactgaatattccccacactgaacttacccgttttgaactaacaataaatgaaaacgaaacacctgataaagaaacgggtgaattgctaaaacgtcctataatttctccggattttgaaaaggaaccactttaccagatttggcatttattatattccattgacgacccggacttactgattaacactttaaaaaaaagatacgcagtaacttcagaacaggctgctcaattgagcaatattgattttaaaaaatcaggatttggcaataagagcgcccgggcaatccgaaaaattctgccctacctgatcaatggttctgattacacgcaatcctgccaggcaaccggatataatcacagtaatagtctgacaaaagccgaaaatgaacagcggattttacaaccagatcttaaactttacaagaaaaacacactccgtcaaccagttgtagagaaaatactgaaccagctaattaatgtggtaaatgccatattaaaggatgaaaatcttggcagacctgatgaaatcagagtagaactggccagggagttacgacaaagccaggaagaaagaaataagacatttagcaataacataaaagcagataaagatcataaagccatccgggaaagacttgaaaaggaatatccagggcttcccgttagtcgtaaagtcattgaaaaatttaaactttttgagcagcaggatggaacctgtatgtattcgggtaacaagatggagctgtcaaaagtgctcagaggtgaaggcattgatattgatcatatcattccccagtcgcgtctttttgatgattcattccagaataaagtacttgcctacagaaaagaaaatgaagccaagaaagatcttacggggtatgactatatgaaatcaaagtcagatactgagttccggcaatataccgaaagagtcagccaaatgtttgaaaacgggaatataacccggagcaagcaaacaaaactactcatgtcggtcaatgaaatacctgacgatttcatcagccgtcaaatgaatgaaacccgatttatttcacgggaagctacaaaacttttaaagggtattgcccgtgatgtttacagtaccagcggcatggtaaccgatttcctcagaaatcaatggggttataatgaagtattaaaacaactcaactggtcaaagtatgaagcggcgggaaaaataaaagatgggaaaattgaagggtggagcaaaagagatgaccaccggcatcatgcaatagatgcattggtggttgcctgtacccggcaatcaatcattcagcgactgaaccggctgaatagcaaccagaccagagaggaaatgctggatgccataaagggaaaagtgaatgaagggtggcaggcaaagaagagcctccttgaacagcatgttcaattattacagcctttcagcacccaacaggtaaaggaagctgttgaccaaatactcatttcgctgaaacccggaaaaaaagttgctacccggggtttaaataaagctgatggcaaacggcctttaacacccagaggccagctccacaaggagcaggtttacggtaaaatacaacgttatagtaaaaaaataccgctaacaggccgtttcacgcaggtggacaagatttcagacccgcgaatacagacattaatccgtgaaagacttagcgcgttcaatggggatccaaaaaaagcattcaaaagccttgacaaaaaccccatctggacagatgaagctaaaaccgtacctgttaccgaggtcaccatctgggaagaacattttgtttacaaataccctttgggtataagctttaaagaaaaagacattgaattcattatagataagcgcatccagtcacttgtcagacaacggtttgaagaaaaagccggaggaaaagatcaccctctgaagaatattgagaacgaacccatctggcttgataaaaaaaatgggatagcggtaaaaagtgtgagatgttttacagggcttaatgacctggttcctcttcatgtagcagaaaatggctttacaaaaccaaagcgagaagtctccgaaaatagcatagctgttgactttgttagtacaagaaataaccatcatatggcaatttacaaaagtcaggaggggaaactatttgataacacagttagcctatgggaagcattggaaagaaagaaattaaaattacccgttattgttgaaaaccctaaaaaaacctgggatttcgttattgataaaggaattgacaataaaaaaatccttgagaatctaccttcagaaaatagcacttttctttatagtatgcaacaaaacgaactatttgtatttgacaccacccgcgattatgtcgaaagagcaatccaaacaaataactattcacttattagtagtaatatatacagggttcagaaaatgagtaaaaaggctaacggctctgttgatatctactttcggcatcatcttgaaactactgtggatgacaataagacgggaggagagcttgtttcaaaagaattaaacaaagtattaatccttaagagtattaattcattatcagcaagaaatccattaaaaatagttatttcatctataggaaaaatttcattggtataataacaaaggttttgtatcgttaaaatacaaatccttatccatgataaagcgaaccctttattttggcaatcccgcctacctgaaaaccgacaacctgcagttggtggcggaactgaaaaaagaagagcaggaagcccactctattcctatagaagatatcgggattattatccttgaccatcctcagatcaccattacctccggactgatgtcccggctgctggaaaagaatgttggactggttacctgcgacggcacccaccaccctgttgggctcatgctgaacctggaggggcataccctgcaaagccagaaacaccaggcgcaggtggaagccagccagcccctgaaaaaacaatgctggcagcagaccatcatggccaagattgataaccaggcccggttacttaaaagcctggggttggaaaccaattacctgactactttacgggataaagtaaaaagcggggacagtgacaactgtgaagccaaagccgccgtgtactactggaaacacctgttttccgaagtgccggatttccgccgcgaacgatatggccctccccccaataatctgctcaattacggctatgcgattcttcgtgccctggtagcaagggctttggttggctcgggattactgccaagtctgggcatattccaccgcaatcagtacaatgcctactgcctggccgacgatatcatggaaccctaccgcccctatgtggaccggctggcataccaaatctggcaacgggaaggagaaaaggcttcttttcttgaacccggcctgaaaaaagaactactcagtattccggcaactgatacccggatagacgggaaaaaaagtccgttgatgacggccgtaagccggacgacagccagcctggtcaggtgctttgaaggagaaagccggaaaatcctctacccggaattataaaacggatgaaaaactattatgaacggataaatgcttaccggatcatgtgggtactcgtcatgtttgatctgccgaccgaaaccaagctccagcggaaaatctatgcgaagttccgtaaaatgatgctggccgacggattccagatgttccagttcagtatgtatatccgccattgccccagccgggaaaatgcggaagtgcatgccggccgggttcgccggatgctgccccctaaaggccatgttggcataatgaccattaccgacaagcaattcgggatgatggaggtcttttatggcagggaggcggcggaaacacccccggtagcccagcaactggaaatgttctgaaaacccggtatgcaggatcaaaaaaatggtttccagccccggatttttgatcctgaaaaagggctgaaaaccaataccggcgggccttttggcgattccggttgttgatagccgaagctacctaaaaatttgaaagcaaatcacaacaccgtccaatacatcagtaaaaacaggctcgttgttgatagccgaagctacctaaaaatttgaaagcaaatcacaacttccggctggcctgtttggttgcgggctttgttgttgatagccgaagctacctaaaaatttgaaagcaaatcacaaccctccattgatcccgaactcggacggctcggttgttgatagccgaagctacctaaaaatttgaaagcaaatcacaacgctgacaggttatacttcgcctttatctggttgttgatagccgaagctacctaaaaatttgaaagcaaatcacaacgaggatgccgggttaaaaaactctcaggtggttgttgatagccgaagctacctaaaaatttgaaagcaaatcacaactatttttgcggcactatcgccattgatctgttgttgatagccgaagctacctaaaaatttgaaagcaaatcacaacggctccaccttagttactacccggaaaaccgttgttgatagccgaagctacctaaaaatttgaaagcaaatcacaacgtccgggttaatcaccatttcaaatactggttgttgatagccgaagctacctaaaaatttgaaagcaaatcacaactgaaactctcctccttcctctccgcaattcgttgttgatagccgaagctacctaaaaatttgaaagcaaatcacaactaattaatctggtaaattcttccgttagccgttgttgatagccgaagctacctaaaaatttgaaagcaaatcacaactattgaaccgctgaagattttccaaaaaaagttgttgatagccgaagctacctaaaaatttgaaagcaaatcacaactatttggttacaaaatgctgtcaggtaaggttgttgatagccgaagctacctaaaaatttgaaagcaaatcacaactgacaggggtcggccttcggtagggaaaaagttgttgatagccgaagctacctaaaaatttgaaagcaaatcacaactatgataccttcgtacaggcaagatatgtgttgttgatagccgaagctacctaaaaatttgaaagcaaatcacaacaatgatgctgcgggatacgatggaattatcgttgttgatagccgaagctacctaaaaatttgaaagcaaatcacaactcctccggtgtgctcgctggcggtaaggctgttgttgatagccgaagctacctaaaaatttgaaagcaaatcacaacggggaccgtcttccggaaaggttggccaatgttgttgatagccgaagctacctaaaaatttgaaagcaaatcacaactatatcagtcagggtatcggaacggatcttgttgttgatagccgaagctacctaaaaatttgaaagcaaatcacaactcaataaccttctgcataatcagccggtcggttgttgatagccgaagctacctaaaaatttgaaagcaaatcacaacggcgacgttgatcaaaatgatttcgttgtagttgttgatagccgaagctacctaaaaatttgaaagcaaatcacaacaggcgctttacgcttttctgcttccaacaggttgttgatagccgaagctacctaaaaatttgaaagcaaatcacaactgggcgtttgcaaaatctttcatcccagccgttgttgatagccgaagctacctaaaaatttgaaagcaaatcacaacaatacgaatacacaagaacgggtgtaaagtgttgttgatagccgaagctacctaaaaatttgaaagcaaatcacaacgcgcccgctggggtgcgcgtagctgccggagttgttgatagccgaagctacctaaaaatttgaaagcaaatcacaacttgcacactaaggtgcgatatgtcaccccgggttgttgatagccgaagctacctaaaaatttgaaagcaaatcacaaccttatgctccacatcggtgcaaaataccgggttgttgatagccgaagctacctaaaaatttgaaagcaaatcacaacggcaaccaccacccgattatcattgtattagttgttgatagccgaagctacctaaaaatttgaaagcaaatcacaactttgtagctgttatctttcagcgtggtcaggttgttgatagccgaagctacctaaaaatttgaaagcaaatcacaacaaagaactgttccgtattcaagcgggttaagttgttgatagccgaagctacctaaaaatttgaaagcaaatcacaactctaccgaatcaaaagacggggaaagtttagttgttgatagccgaagctacctaaaaatttgaaagcaaatcacaaccggcggttagttaatatctaatttccggtcgttgttgatagccgaagctacctaaaaatttgaaagcaaatcacaactactggatgggacttactggcatagcaaaagttgttgatagccgaagctacctaaaaatttgaaagcaaatcacaacactgatcccagcactgaggttgtgcttaagttgttgatagccgaagctacctaaaaatttgaaagcaaatcacaacaggacgaattctttatacacatccactttggttgttgatagccgaagctacctaaaaatttgaaagcaaatcacaactactcgttaggcatattgtaaattgtaacgttgttgatagccgaagctacctaaaaatttgaaagcaaatcacaactttgaacaaaagcgcattgctccggctcatgttgttgatagccgaagctacctaaaaatttgaaagcaaatcacaacttatgtcgagcaatcgaacgaatagtcttggttgttgatagccgaagctacctaaaaatttgaaagcaaatcacaactgcgggaagcgccggccggcacgaatgggtgttgttgatagccgaagctacctaaaaatttgaaagcaaatcacaactgacgggtttgtgataggttcatggagcctgttgttgataaacgaagctacctaaaaatttgaaagcaaatcacaagaggcaagacggcttagcctttcgccagcaaaaaatcttcgatattctccggcgaaacaacctgcattgttgcatccggataagcaccgcggaaggtgagcgggagcctgggatttttttttctattccatttgaattccaccgcattcatttttccgttatcttcttccaccagatcaatctcctgctgctgggtggttctccagaaataaaggcgggtgtcattacctgcattccgcaaaaattttatccgttccgcaatgatgaagttttcccaaagggcgcctgtatctgacctgctattcaagggagtaaaattgcctgttacggcattccggattccacaatcataaaagtaaatttttctgcttttccttatttcgttgcgtacattttttgcatacgccggtaactgaaatatcacgaatgccttctccagcagatcaatatacttctctaccgttttacggtccgttccggtaagctggcccaactcggtataattcacttcctgccccagttgcagcgccaacgcccgcagcagcttttccagcaaaacaggttttttaatgttatccatcataagaagatccttgtagagataactgcctgccagcagttgcaaccgttctttttcctcacccggactggtcacaatctccggataataaccataaatcatccggtgttcaatcagccgcttctcctccagcaaaccatgatgattcaccatctccccaaaactcaggggatacaacatgaattcatacttgcgtcctgttaacggctcgtttacctggcctgatagttcaaaagaggaggacccggttgctatcacctgcacctctttcagctgatcggtgatgagcttaatagccagcccgatttgcggaatgcgttgtgcctcatcaataagaaccagttttaccttgccaaataccatcctgagccgggtggcagttgccttcataaacaaatcccgcacatccccgtcatccccgtttaacacgctgtactcctttcctgatttttccagtatggcttcagccagcgttgattttccggtttgccgggccccaaaaagcaggatcgccttcttcttataaagccgctgttctatagtctgctgcaactgccgaattatcatataaagggattttattcccaaatttatataataatatggtattttattcccattttattatattttaacctcttgcactaaaacttcattctctatatgattatcaatccattatatggaacggtacaaaaaagtgaccggctgcaaccccggggagcagcaagcgcaagaaattgccgcttctcttttttaattttttccctgcactaacccatccggcatttaaaagtcaatgttgacgcagcaattaaagatgggttccgctgccttcgcagcaccggcacaggcggggtgaaggaaaatggcgggttccctatttttgccaaaactattcccatgtaccagaccctgcttgcctctctcgaaaacggtatctatacagttacgatcaaccggccggataaactgaatgccctgaataaagacgtgtttaccgacctggataaaatgctggatgaggtagcggccaacccgtctattcaatctgttatcatcaccggcgcaggccccaaagcttttgtggccggagccgatatcagcgaattcaccgccctcaataaagaacaggccatggccctggctaaaaggggacaggatatttttgcccgtatcgaaaatgcgaccaaacccattgtggccgctgtaaacggtttcgccctgggcggcggctgcgaactggccatgagctgtcatttccggattgcctccgggaatgccaaatttggtcagccggaagtgaacctgggactgatccctggttatggcggcacccagcggctcgtacaactgatcggcaaaggcaaggccctggagctgctgatgagcgcaaatatgatagatgcaccggaagcaaaatccctcggcctggttaatcatattaccacccccgaagaattattaagttttacccaaaacctgctctcaaccattaacagcaaggccccgcttgccgtggccggctgtataagagccgccaacgccgtatttgatgaaagtaaagacggctacgccctggaaatagaagagttcggaaaaaccttcactaccgaagacatgaaagaaggggtaactgccttcctggaaaagagaaaagcggcttttaaagggaaataacagaaagatttcgagcgcagcgagaaatcttatactcccggcctaaaaaaaaattgtctttccgaatggagtgaggaaccttacttccccccctaataaaattgtctttctgcctgcccgccgtagtgaaacggaggtgggaacaaagtgaggaaccttactcttgccccccaaataaaattatcattccgcctgcccgccgaagtg

SEQ ID NO: 4057 - DNA, 18127 bp, synthetic construct
  misc_feature 1..18127: note = Synthetic
  source 1..18127: mol_type = other DNA
tcggccatcctgccgggttggggacaggtatacaacaaaaaatactggaaagtacccatcgtgtacggggcccttggcacctgtgtgggcttctttttctacaaccgcaccgagtacatcgccgcacgcgatgcctaccggtacaaagtggacaatgacccttccaacgattttctcatcgacccccggttccggcctgttgacgcggaagccatccggcgctaccgcaacgatgtgcgccagaacgtagactattcggtgctggccttcctggtgtgctggggactgaacgtggtggacgccaccgtggacggtcacctgaaatcctttgaagtgggcgagaatctttccatgcggatacatccctcctaccagccacaaacacggcaaagctccatcggacttgtgttcaccttccagggaggaagatcatccgcccggtaacgcacatacacttctgtaaaaaaacgaaaacatgaaactggcattaatcgggtacggaaaaatgggcagggccatccaagagattgcccggcaacgtggtcatgaaattgcactgatcattgacctgcacaaccggcacgaactcaccgcacaggccctccaacaggttgatgtagctattgagttcaccagtccgcataccgccttccacaacgtactgttctgcctgcagcaacaggtgcccgtggtgtgcggttccaccggctggctggatcaactggaggaagccaaagccgccgccgaagccgcccgcaccggcctgattgtagccagcaacttcagcgtgggcgtcaacattttctttgaagtgaacaagcggctggcccaactcatgagcgggcagcccgactatgccatcagtctgaaagaaattcatcatacccagaaaaaagatgcgcccagcggaacggccatcacgctggccgaacagattcttgccgccataccccgcaaggaaaagtgggtaaacaaccccacttcaaatgaagctgaactgggtatcgccagcgagcgggtggacccggcgccgggcacccaccacgtaaaatacagctctgaggtggatgacattgaaatcatacacaccgcccacaaccgcaccggttttgccctgggcgccgtactcgctgccgaatttctcaaagaaaaaaccgggttctttggcatgaaagaagtccttaacttgtaaggatcatgaagcgcttgctggtttcttcttttctcgttgtttgcatgctgcaggctgcaccggcgcaggtcgctaacctgctcgacagcctgcgcggggtcataggcagtaaggaacgggatgccgaccggctgaatgcctacgtgcagctttcgggacgtctcagcatgagcagtttcaacgagtccatcaaaacagcagaagaaggattcacgttggccagcaaactgaaagactccgttgcctacggccagttatgccgcaacatgggagtagccaattatttcaaaggcgattacgagcgcgccactgagcggttttacctggccgccggcatctttgaacggagaggcaaacgtgccgaactggccgttctgtacaacgacatcgccaaactgtaccggaagttacgggacctggaacgggccaatgccatgtacgacaaggcaatggagttattccaggtactgaacgactccagcggcatccagatggtttacaacgaaagcggggtggtgtacgaatacatgggcaattaccgcgaagccctccgccggtaccaggcttcgctgcggtatgcgacactccggaacgacgaaatgggaaagagctggtgctataatttcatcgccggcgtgtacctgttgcaaaacaaattcattttggcagaagattaccacatccgcgccctgtccatccgccagcgggaaaaagatacgttcgccctcaccctctcctattccgacctgggcgaactctacagcaactggggcaaatacgacatggcccgctattactatgaccagagtaattttctggccgaaaaaatggaatacaaagagctgctgtcaaacaattacgccaagatgagcaagatggccaacatgatgggcaactacaaagaggcgcttgactttttcacctggcacacccaactgaaagactctattttcagcaaccagaaaacacggcagattgaagaaatcagcaccatctacgaaaccaacaagcgggaacagcagattgagctgcagcaactcaccatccgcaaacgcaacatccagttgctggccattgccgggctggcgctactgatcgccgccggcgcgtggttgttctacaaacgctaccaatggaagcaggagcttaccatgcagcaggaactggcccggcagcaggaactgtctacgcaggccatcctggaagcggaggaaaaagaacgcacccgcattgccaaggacctgcatgacagcgtgggacaaatgatgagcgctgcccgcatgaacctctcctcctattacaaccaggcacagcctgcagccggtgagcaggaggaatcgctccggaaaatcatccgcctggtggacgacagctgccgggaagtgcgggccgtatcgcacagcatgatgccggctgccatgatgaaacggaacctgcccgaagccatccgggaactgatcaaccggatcgaaagtccgcaacttcgcattcactttcataccgaaggcgaacccggggaacaggaaaaccaaaccagttccatcctctaccgtgtcatccaggaatgcgtgaacaacgtaatcaaacatgccggcgccagcgagctggacattgccttgctgtacgaccacgaaggcatcagcgtaaccatcgaagacaacgggaagggatttaacctggaacggttgcccgaaggtgccggcatcggcctgcagaatatgcgggcccgcgtggagtttctcaaaggcaccattgagttcgattcatcacccggcaacggtaccctggtggctattcacctgccggccgctcagcccgtgtaagcaggaaaattcattacatttgaaacatgtcgcaccccaaaaccaccctggccattgttgacgatcaccagattgtgattgatggactgaaatcgctgttgaaaggtcatccccgctttgaaattctttgcgagtgtacccaaccagaacaatttctttcccggatcagccaacaggtccccgacattctcatcaccgatgtgatgatgcccggcatgaccggtgtggagctggcgcgggcggtaaagcaacagcacccgggcatcaaaatcatcgcgttgagcatgaacggtgaaggcagccttataaaccagatgattgatgaatccgacatcgccggttacctgctgaaaaacatcggtcaaaccgaattcatccaggcgctggataaaattgcaggcggcggcatttacttcagcgacgaggtattgcaggagatgctgaaagacagcgaacggaaaaaagaaacggccgaaagcaagctcactaaccgggaaatagaaattgtacgcctcatcgaaaaagaatacaacaacaagcagatcgccgaacaactgttcctcagcgaacgcaccgttgaaacgcaccggaaaaatattttccggaagaccaaaaccaactcgctcatcggcctcatcaagtatgcctacgagcgcaaactgatctgaactcagcgaagcgccagtcccagcttcaactgcacggagttggacgtacccggattgcttttccgcttccatccatcgtaatggatacccagctggcccagggccccgtggtaaccgatccccgcatcgtaggtgaagcgggcggcacggctgctcatctgctggtctttgatgaagacggcccccaggttacccgcaaggaaaatcttttttgtggcatacaggcgcacacctcccttcagcgggatggaggatatgcggccaaaaccgttgttgctttgattggcataggaaagaatacccgtggtggccagcaggtaaaccccggaactaccggctccaagggatgcctccacacctcccacccgcttgtacccgttggcaaagtcgccggtgggaaagccatagacgatattgccgcctatgaacgtggaacgatcctggctcgcagcccgttgaaccggtataaacaacccgcagctcattaccagaaaaaaggaaagcagacgcatggaataaattttaccgaaaatagcaccagcaaacagaatgccggatacccgctaccccgtaattttagcgcaacaattgtacgtcatgctttcgaagaaaacccaatacgccttccaggcgctttcctacctggcgcaacaaccgggaaacgagccggtattaattgcagaaatcagcaggaagcggaagatccccctcaagttcctggagaacatcctgttgctgctgcggaaagacggcatccttgaaagcaagaaaggcaaaggcggcggttattttttccggattccgccaaagaagataccgctggcccgggtgatccgcctgctcgacggtcccatagcacccctctcctgcgtgagcctgcatttttacgaacgctgccgcaattgcgatgaaaagcattgcggactgcacgacatgatgatcaaagtgcgtgacgccaacctgaaaatactcgagaaaaaaaccattgccgacattctaaacaggtaacctgttcccttttcacctgcatcattcatccattgctttatggaatcatcgcagccgcacctgttgcatacctgccgtatcgcagtgagcggcaaggtgcagggtgtatggttcaggaaacacaccgtgcagcaggcagcagaacgcgttatcaccggcaccgtggaaaatcttccggacgggtcggtgcagatcgtggccaccggtacggccgaacagctgaaggagttgatcagttggtgccaccagggaccgccactggcgcaggtacaaaaggtggagttcagggaggtaccgctgcaactgttttcaacgttccggcaaatccggtgatcaggcgggaagggaacggatccgccggcgcatcaacacataattcagcaacatccacacaggtatcagcaggtacggaaagccgctggcttccggaagttgcagccaggccagaaacaggcttgccgcgcccaccagcaggttaaaaacagcgtcgcgctgttcataccgtagtacctgcgcttcatagccggacagtttcagtaggatgcgttgttgccaggcatgacggtagagcaggaaaaacaacagccagaggatgcaatagccggcactgaagaaaacaaccaggcggggaaaatcggcttcggccagcaccatatcgccggcggcggccacctccgaaaaataatttacaccggtaaaccagctgagcaggatggtaaagagaaacttgagcggaaaaatgtacaccaataaccacgcaagcaatgccaggttcagcaggatcacccggcggctctgcaggccgtaacggcggaaataagcgttttgctggtaccagaacagaaaaaccaggctgaaggtggcgaggaaaggcggtatgtcgcggatggtgtgctgcagctcggcaaaggtcttgggcacttccagcgacatgatgagcagcgacaccgaaaaggcaaagacagcatcgctcagggcctcgatccgctggatctccgtaccccgcacctgcaggtgcttattaccgggaaagatcttcttccgcaacatagacgaggcggcaaggtagccaccggcccggccggatacaatgaccaaaataaggtccgcacgtgaggcggagcagccggtttcaacacagagccgcggagaagaggagtaacacggagtgctttccccgtgacctctgtctctccgttcctccgtgttgaaccgttgcggcagcaacagcctctcttgctcccttacccgatctttttcttcaggttcgcatcaatggcatccaggaactcttcggtgtagaggtaatgctcgccgtgttgcaccttgttgccgtgaatgcataccgccaggtccttggtcatcttgccgctttccacggtttcgatgcacaccgattcgagtgtttcgcagaaatcaatcagtggttggttgccatccagtttaccccggaaagccaacccgcgtgtccacgcaaaaatgctggcgatggggttggtggacgtgggccggcctttctggtgttcgcggtaatggcgggtaaccgtgccatgtgcggcttcggcttccatggtcttgccatcgggtgtcaccagcacagaggtcatcagccccagcgagccgaagccctgcgccacggtgtcgctctgcacgtcgccgtcatagttcttgcaggcccacacaaaagcgccgttccacttgagggcgctggccaccatgtcgtcaatgaggcggtgttcgtacgtaataccggccgcttcaaactgcggtttgaattcctgttcaaacacttcctggaaaatatccttaaagcgcccgtcgtatttcttcagaatcgtgttcttggtactcatatacaacggccagcctttctgcaggctcatgttcatgcagctgcgggcaaatccgcggatgctttcatcggtgttgtacatgctcagcgccacgccggcacccttgtactggtacacttcgtgctcaatcacctgcccgtcttcgccttcaaaccggatggtgagctttcccttaccgggcacaacaaagtcggtggcgcggtactggtcgccaaaagcatggcgccccacgatgatgggcttgtcccaggtggtaaccaggcggggaatattgctgatgacgatgggctcgcggaacacggtgccgtcgaggatgttgcggatggtgccgttgggactcttccacatctgcttcaggccaaactctttcacccgggcttcatcgggggtgatggtggcgcacttgatgcccacaccgtattgtttgatggcctgggccgcctccaccgtcacctggtcattggtggcgtcgcggtgttcgatcccgaggtcgaaatatttgatatccagctcgaggtagggaagaatgagcttgtctttgataaaagaccagatgatacgggtcatttcatcgccatccagctccacaaccgggttggccactttaattttttctgccataaatggatttaggtttgaacgtgaacaatgcttggttgttacgggtcagcaaagatataaccggcaggaatacacccgccgaaaatccccgggaacgttggcgttattcgttcagcaggcggttgatggtgcggtaaaaatcgtcgcggaagcgggtgaaatactcaccggtacccggaccgtaaaagccctggtggatcttatggaccgatccgtcttttgccaggaagatggtggtgggaaaataatgcacactgttgagctggggcagggttttctccgtcttttgagggtcgctcaccgttaccggcgccaccagcaccgggtagcggatgcctatgcgttgcaccagtttgcccaggccggaccggatgcgttcgggctgcagcgtcagttcgtaggccagggccaccacttccacccctttttcccggtattcgttgtaaaaagtactgagaaaacggctctcatcgaggcagttgggacaccagctacccatcagctgcaccaccaccaccttgccgcggaagcgctcatcgtccagcgaaacgggctgtccggtcaggtcggggaaacggaacgaaaggcgggtgaacccgggcttcagttgggtctgcagcaccgtatcgggcagggtggcccgggcatcggctaccgcccgccaggtttccacgggggcggcattgctgtaaaagcgcccggcggtgagttggccgttgcgcagcgcggcggtaaagaggtaggcccggctgccatcaaagcagctcaggcgcagggtatcggcatccagcaccccttcgaggtaacggtagtcgccgctgggcgtgagaaaagtgccggtaacagcggagccgttttgttcaaacaatgcgagggcggggcgttcggtgccgttggggcgggtaaaagtcaccgcccatttgggggccagttgtccgctggcggggcggctgccgggaaatcgttcttccccgcccggtgtggccgtcaccggcagttccaggtcggcgccggcggtgcccttgctccaggtgcctgtcagccggtcgttgggtaagaccctgaaacggagacgggcttcaaagaagggcatttccgcaaaaagggagtcgccctgttcccgcacttcctccaccagcagccgctcgctgccgttacggatgtaaaggcgcagggagccggtagtgcgctgtgcttcaaaattgaacaccagtgccgccccgtcgggccgcagaacggaagcgcggtaccagcccgccggcagctgggccgcggcggtctgagccagcaggaaaaaggcaatgaaccatcttttcataccaaaacagggaaaaggtgcaagataaccgccgccggttgtacccgggcgtaaaaagggataaccggcatcaggcgggcgggttcagctgaggttttccttcaggttggtgagcatgtcggccgtcattttgggcaggtcaaacgcgggttgccagccccagtcggtacgggccaccgaatcgtcaatgctctgcggccagctgtcggcaatggcctggcggtagtcgggttcgtagtccatcgcaaagccgggacggtggcgggcgatttcggcggcaattgcgcggggcgagaaactcatggcgccgatgttgtaggaatggcgcaccgagatgcggtcggccggcgcttccatcagttcaatggtggcgcggatggcatccggcatgtacatcatgggcaggtaggtatcttcccgcaggaagcaggtgtaggcgttgtgctccagtgcttcgtgaaagatctccacggcgtagtcggtggtaccgccgccgggagccgatttgtaggagatgagaccggggtagcgcaggctgcgcacgtccacgccgtagcgctggaagtagtagttgcaccagaactcgccggcgtatttgctgatcccgtacaccgtgatgggttcaatgatggtttgctgggggcagttctgtttggggctggtgggaccaaacaccgcgatggacgaaggccagtacactttatggaggtgttcctcgcgggcaatgtcgagcacgttgagcaggccggtcatgttgaggttccaggccaggttgggatttttttcgccggtggccgagaggatggcggcgagcaggtaaatctgtgtgatgccctggcggatcacctgtacgtgcagcatctctttgttcatcacgtcgaggctcacgtaggggcccgtgcccaccagcagcgggttctgttcccgcaggtcggaggcaatcacgttctggttaccatagatgttacgcagggcgagggtgagttccacccctatctggccggaggcgccgatgacgaggattttttctttgaccatggcaggcaattaggagcgcaagttacgggggaagggcgaatgatccatgcggatggggtgggttgattggttgactggttaaatggttaacaagttgataggttgacacggttgagttgaagactggaagatgggggctatcggcggtggtgcccgcttcggtggtggtccgggctgttccgggctacgctgcgctacggtgttccgctgcgctgcacactacccctgcacatcccgcagcccgtgggcggggggaaggcggggcggcaggtgtggggcggcctgcggccgcttgaattattattttatcaaaacaagattttaatgatttgatataaaaaagccccgcattgtaaggcgaggcggcttgaatgttttcacaacagaataatctttattgtgatttgcttcgtagcaaatataaaaaatgagaattgaaaaaaaatattttcttgtattttagatataaagctactaccatgaaaaagattctgggactcgacctcggaagcacatctatcggatgggcctttattgaagaaaacaaaacaagccgtgctatcaggaaactcggcgttcgcatcattccctactcaggcgacgagaaagaccagtttaccaaagggcaggccattacgctcaacaaagaccgaacgcttaaacgcacggcacgcaaaaccatgcaccggtataaaatgcggcgtacggatttgttacaggttttctccgactggggaataacgatatcgcccaaactcatgcgctcgctgactgctttggaattatacggccttcgtgccaaagctgtcagcgaaccggtaacacgcgaggaactggcaagaatcctctttcacctgaatcaaaaaagaggttacaaaagcagccggcaggcagcggaagaagaaggaggaaaaaagttaagtgattacctgacagaattgaaagagcgaaaagaactgctggaacagcagcacatcacgattggtcagtatttctattcacaattaaaaaacgacacaactttccgtgtaaggcagaaggttttcccaagagaatgttacattgacgaattcaaccgcatctggaacgaacagaaaaagcaccacccgcaactgctgacggaagaaaataaatcacgcatccgcgacgaaattatttattaccaacgccgcctcaaatcacaaaaaaagctcgtgtcggaatgccgcttcgaactccatcacaaagtggcacctaaaagttccccgttgtaccaggttgaaaaaatttgggaaagcatcaataccatttcattaaccaacaagttcaaggaaaattataccatcactccggagcaaaaacaggcaatatttgagcatctcgacaataaagagaaactgactcttacggatctgctaaagattcttgggctgagccgaacgagcggatggcacgcgaatgaacaaataaaaaaggctggcttgcaaggcaacacaacgaaagcccggctcctgaaagaatttaaaaatctgggaatcgaacgccccgatttactggaatttcatttggaaatagaaaccaaccaaaaagttaacaaagaaaccggcgaagtttctgagtatgaaatgatcagccccggctttgaaaaacagccactataccgaatctggcacctgctgtattccgttgacgaccccggccaggtaataaacgtactgcagcagcagtaccactttactaaagagcaggcagagcaactgagtaaaattgattttacaaaagccggattcggggcaaaaagcgcacgggctattcgaaaattattaccggggctgatgcagggacttacctatgcttatgcagcggaaattgtgggttataatcacagcgacagcattaccaaagaagaaaacctgcagcgccaactgctggaacaacttcctcgtatccccaaaaacagcctgcgtcagccggtagttgaaaaaatacttaaccaactggtaaatctcataaacgcgattttacaagatcccggcctggggcgtcccgatgaaatacgggttgaactggcacgggaattaaaacaaaaccaggaagaacgaaataaagcctaccagaatacgattgatacggataaacgccacaagctgattcgcgaaagactgcaatcagaatatcccggattggctgtgacgaggaaagtcattgaaaaattcaaacttttcgaacagcaggacggcctctgcatgtattcaggaaaaaccatgcagctggcacaggtattacggggcgaaggagttgatgttgatcacatcataccacaatccaaactgtttgatgactcttttcaaaacaaagtcctggctttccgcacagaaaacgaaaagaaagacaattttacggcttatgactacatgaaatcaaaaggtgatgaagcattccggcaataccttgagcgcgtggataaattactggaaacccagaaaatcacaagaagcaaacagcagaaattactgatgagcaacgatgaaattcccagcgatttcatcaaccggcaactcaacgagacccggtacattgccaaagaagcccgccagcttttacaacaggtatgcctcaatgtgcatagctcaacgggaatggtaactgatttcctgcgccaccaatggggctataacgaggttttaaaacaactggggctgaaaaaatgggaagaggcgggattactggatagcgaaaacatgcccaaatggagcaaacgcgatgaccatcgccaccatgcgctcgatgcattggtggtagcctgtacaaaacaatccatcattcaacggctcaacacactgaacagcagcaatacccgaaccgaaatgctgcaggccattcaaggaaaaaccgctgaagggtggcagaagaagaagagcctgtccgaaatgtacatacaaaccgaacagcccttcaccacccaagatgtggccgaagccctaagtcatattcttatttccataaagcccggcaaacgggtggctgcccgcggcaaaaacaaagcgaccggacaacgcccgctcacgccccgcggccagttgcacaaagagtcggtttatggtagaatccgccgttacagcaaagagaaaataccgttgaacgggcgcttcaacaaagcggatctgattgccaatgaacaggaaaagaaactggttttggaacgcctaactcaatacgaaaacgaccccaaaaaggcatttaagaatctggagaaagatcccatctggctggatgccgaaaaaacaaagtccctgactgccgtaaccgtgtgggaagattattttgtgataaagtacaacctcgatcagaacttcaaggaaaaggatgttcccttcattgtagatgatgccatccggcaaaaagtgcaggaacggtttgaccaatacaaagagcaaaaagaacacccgctgaaaaacctggaaaacgaccccatctggctcaatgaagcaaagcggatacccattaaaactgtacgctgctttaccggtcttagcgatctggtacccctgcacagcgcctccaatggcataacaaagcccatgagccggaaaacggatcaggatgcgccggtagactttgtaagcacgcggaataaccaccacattgcgatttatcgcacctccgaaggcaaacttgaagaaattgcagtcaccctctgggaagcgctggaacgaaaaaaactgggactacccgtaattgtaacacaaccccagactctatgggatctggtatggtccaaaggagttgacaatcaagaagtattagcgcagctacctcaacctgaatgggaatttgttacctgcctgcagcaaaacgaaatgtttgtattgggaatgaatgaagatgatgtgcaacactgtattgaaattaacgatcataaaactatcagtgctaatttatatagagtacaaaagatttctgtaggtatgtactattttagacatcatcttgaaacgtctgttgatgataaaaaaaatggaggagaaagtcaatcaatagtcttaagaaaattaattagaattcaaagtttgagatcatttatgcaaaataagcctattaaagtatttgtttctccattaggtaaaatagaaatttcaagggtataataaataaaataattctgcgttatcgtaaggctctaatctaaccctatgattaaacgtactttatactttggaaacccggcacatctgaaaactatcaaccaacaacttgttgctgaatttccggagaccaatgaccagaaatcgtttccgattgaagacattggtgtattaatcgcggatcatcagcagatcaccttttcacaggccctcctggcccgtctgcttgaaagcaatgttgccttcatcacctgtgatgccacccaccatccggcgggactacttttgaacctcgaaggcaacaccctgcaaagccagaaaacccagtaccagcttgatgcttctgtaccgctgaaaaagcaattgtggcagcagacagtaaccgccaaaattaagaaccaggcagccgttttagccggtctgcgccaacctgtaaactatctcctgcaattggccgatgcggtaaaaagcggtgataccgacaaccacgaggccaaggcggcggcttattactggaaacggattttccccgattttctggaattcaagcgggaacgctacggccctccccccaataacctgctgaattacgggtatgccattctgcgggccatcgtggcccgcagcctggtgggcagcggcctcatgccaaccgtgggcattcaccacaaaagccagtacaacgctttttgcctggccgatgacatcatggagccttaccggccctatgtagatggggtcgtttgcaatattgtacgcaacaacggaaattttttagagctcacaaccagcatgaaaaaagagttgctggcacttcccgccatggacgtgcagctggagggcaaaaccagtccgctgatgatagccgtgagccgcacgaccgccagcctggtaaaatgctttgagggtgaagcccggaaaatcatctacccggaaataccccgcccatgaaatcctattccgaacgcctgaatgcctaccggatcatgtgggtactcgtcatgtttgatctgccaaccgaaaccaaaaccgaccggaaaaactatgcccagttccggaaaaaaatgctggccgacgggttccagatgtttcagttcagcatgtacatccggcactgccccagccgcgaaaacgccgatgtgcaccttaaacgggtaaaaaaaatgctgccggccaagggtcatgtgggcatcatgaccattaccgacaaacaatttggcctgatggaggtgtttcacggaacggaaccctcccagctaccccctacggttcagcaactggaaatgttttaggacaaaaaccggtccgataggataaaaaaattggttttgaggttcggtttttttatcctgtaaaccacctcaaaaccagtcccagcaaggctttcagccatttgtgttgttggtagccgaagctaaccaaaaatttgaaagcaaatcacaacacaattacgttatcttccgtaaaacctggagttgttggtagccgaagctaaccaaaaatttgaaagcaaatcacaacaggatgaaaagctcactaccaaagacaaagtgttgttggtagccgaagctaaccaaaaatttgaaagcaaatcacaacatcgtaaccgtgggtaataccgtcggaacagttgttggtagccgaagctaaccaaaaatttgaaagcaaatcacaactggcagaattctttgcggcaaggtttactgttgttggtagccgaagctaaccaaaaatttgaaagcaaatcacaacacaggggattgaataccgtaccgttactgagttgttggtagccgaagctaaccaaaaatttgaaagcaaatcacaacgccacagttgcagcgcaatacgccccgcaagttgttggtagccgaagctaaccaaaaatttgaaagcaaatcacaacaatatcgaattgaatgagctgcgccatgagttgttggtagccgaagctaaccaaaaatttgaaagcaaatcacaactcttgcctgggggtggataagatagaaagagttgttggtagccgaagctaaccaaaaatttgaaagcaaatcacaacgatctgctgcttgtgatccaccgcccgggccgttgttggtagccgaagctaaccaaaaatttgaaagcaaatcacaaccggttgtggcttagtttttcaaagggagcgttgttggtagccgaagctaaccaaaaatttgaaagcaaatcacaacagagaattggtagatggcagaaacgatagtgttgttggtagccgaagctaaccaaaaatttgaaagcaaatcacaaccagaatccccatcaaaaaccaccacaaaaagttgttggtagccgaagctaaccaaaaatttgaaagcaaatcacaacagcgttgctcattaagcccttgtcgagtgtgttgttggtagccgaagctaaccaaaaatttgaaagcaaatcacaacaagccggtagaatgccatacgtgtccgtaggttgttggtagccgaagctaaccaaaaatttgaaagcaaatcacaacggaattgctttcgggcaatctcaaaaagggttgttggtagccgaagctaaccaaaaatttgaaagcaaatcacaacttaccgggtctttcatttcaacaaatctttagttgttggtagccgaagctaaccaaaaatttgaaagcaaatcacaacatgaaggggatatactttgtaatgacaaatgttgttggtagccgaagctaaccaaaaatttgaaagcaaatcacaaccggaacctgggctttgtggtggaggtaatgttgttggtagccgaagctaaccaaaaatttgaaagcaaatcacaacatcgcatttgtaggagatccgggttgtgtgttgttggtagccgaagctaaccaaaaatttgaaagcaaatcacaacatgagtgttcaagttgcaaaactgtttatgttgttggtagccgaagctaaccaaaaattttaaagcaattcacagcggccaaaccaccagttacgctgaactggtgaatgcagccgttccgtacctttgcgccatgcaaccctttctgacgaatctttttgcgggccagcagtacgacccggataactttttcctcctcgccggcccctgcgtggtggaaagcgaggaactggtgctggaagtggccggaaaagtgagcgccatctgcggcaaactgggcatcccctacgtgttcaaagcttcgtaccgcaaggccaaccgcaccagcgcgtcgtcctttaccggcctgggcgatgaaacggccctccggatgattgatcaggtacgcaccacctaccggctgccggccaccaccgacattcatgcgcacgaagaagcggccctggcagcgccctatgtggacatcctgcagatccccgccttcctctgccggcagagcgacctgctggaagcggccgccgctaccggcaagatcgtcaacatcaaaaaaggacagttcctgagcggaccttccatgaaatttgcggtggataaagtgaaaaaagcggggaacgaacaggtcatgctgaccgaccggggcaacaccttcggctaccaggacttaatcgtagactaccgcaacatcccctggatgcaggaacacggcgcgccggtggtcatggactgcacccattccctgcagcaacccaaccaaaccagcggggtaacgggcggcaatccccaactcatcggcaccattgccaaagcggccatcgcagccggcgccgacggcctgtttattgaaacgcatcccaaccccgcggctgcaaaaagcgacggtgccaatatgctgcggctcgaccggctggaagatctgctggtgcaactggtgaaaatcagaaaagcggtggtgtaagaggaaaatgtttcggctgcgtgaacgtatgtatgaccgtgcgcaaaaaatccggaatcgcaaatccgttggccgtgggccgtatttcgttagccggctagtgacgtacggccggcagatggcacccatttacacatcggtacattaacacatttgtacattcgtcccgcgtccgctggcgggggaacgcgtcaaaaaatctgaaatcctgaatcaaaaatctaaaatctcccatccggaatcgcccctgccacacctggaaaaaatgcagtgctgaattaaagaccgcaatagctactgcttaccgcatggggtccttcgctgacgctcaggatgacgttattttttttaattttttctttcctgacgattcttcagcagcagccttccttctatccacaacggcaccaacaccgaacatgttccacaaaaccgccgccggggtgtggaaccaccggcgggggaatgcgtcgcccacaatccgaaatctgaaatcgcaattctgaaatccaaaatcccagcttccggacgaacgcgttgccataaatccgaaatctgaaatcgcaaatctgaaatccaaaatcccagcttccggacgaacgcgttgccataaatccgaaatc

SEQ ID NO: 4058 - DNA, 23285 bp, synthetic construct
  source 1..23285: mol_type = other DNA
  misc_feature 1..23285: note = Synthetic
acagcagtataaattataatttatagacaaattcaaagacagttcagaaggcattagattcgagcaatggcgacgaaggcgtataatacatactcctaagagccattgcgaaaaagatggtgccttataaactgttttaagcaaggagatataagattatgaacaacaaagccctaatcgctatgagcggtggcgtcgactccagtgtagcggcgctgctcatgcaggaacaaggatactgctgcaccggtgtcaccatgaagctttttgacaacgaagatataggtctgccggttatggacagtaaatgctgtagtctggacgatattcttgacgctaaaagggtatgtgaaagcatgggtatggaacattttacctttaattacggcgcccgcttccgcattgaggttatcgaccgctttatcaacgcttatgtaaacggcatgacgcctaacccctgtattgactgcaaccgttatttaaaatttggcgaactgtttgccaaggcgcaggaaataggctgcgattttgtagttacaggccattatgcccgcattaaatatgatgaggaaaagggacgttatcttttgctcaaagcagtaaatcccgaaaaagaccaaagctatgtgctgtacagcttaaatcaacagcagcttgcccacgctaaatttcccttaggtacattatccaagcctcaggtgcgcgaaatagctgaaaagcacggttttgttaccgctcataagcacgacagtcaagacatctgttttatccgcgagggtaccacctatgcagattttatcgagcagcgtttaggccgcaaattcccgccgggaaattttgttgatactaaaggcaatattcttggccgccacaagggtattattcactataccgtcggtcagcgcaagggcctaggcttagcactgccccaacctatgtatgtacaagagattgatactgccaaaaaccaagtcattctttctactaacgacgagcttttttctgccagcgtaaccgctacggatatcaatctcattgactgcgagcgtattgaaggagcgcgcagagtaaaagcgcgtatccgctaccatcatcaggagcagtgggcgacagttacccaaccggacgctaacactcttcacattgaatttgacgaaccccaaagagcaatcacccgcggtcaagccgtagttatgtatgacggcgacgtagtagttggcggcggcagaataatttaataagagtaaagtaacggagatacaaaaagagcattgactcacaaatgtgggacaatgctcttttgcttatgaaatatcagttttcagcttctgccttttcttcctgccgcaaaagcgccataaactcatcaccggtgatagtttctttttctaaaaggaagttagctagtgcatccagcttgtcgcggttagcatttagtatttcatgtgctttcacgtgagcttctttaataatagacagcacctttgcatcaatgcgtcctgctgtttcctgactgcatgccagagaggtatctccacctaaatattggttcgtaaccacctccgttgccatcatatcaaattcttcggtcatacccaagcgcgtaaccatgctgcgggcaattttggtagcctgttcaatatcattagcagcaccgctggtaatgctgccgaaaactatttcttcggcactgcgtccgccggtgatggtaacaatcttattgaacagctcctctttcttcatgagtacggagtcgttgtcgttaatctgcatggtataacccaacgcaccattagtgcggggaataatggtaatcttatgcacgggcgcactgtttttctgcatagctgcaactaaagcgtgaccaatttcgtgataagctataaccttcttttcttcgggactgataactgcgcccttgcgctgatagcctgcgataactacctcaatggattcttccaaatctgcctgctcaactacctgacggtgcatttttactgcacgcagcgcgccttcattgataatattcgccaattcagcaccgctggcgccggcagttgttcttgccaaggacagaaaatcaatatcatctgccatcttgacatcgcgggcgtgtaccttcaaaatcgcttcacgaccgtgcaaatctggcagctctacaggaatacgtctgtcaaaacgtcccggacgcagcagcgccttatccaaagactcaggacgattggtagcagctaaaattactacgcccttgctgccatcaaagccgtccatctcgcttaaaagctgatttaaggtttgctcgcgttcatcgttaccgccaaattgaccgctgtcgcgacgtttaccaatagcgtcaatttcgtcaataaaaactatacatggtgccttttcctgcgcctgcttgaacaaatcgcgaacgcgggcagcacccatgcccacaaacatttctacaaattcactgccgctaatggagaaaaacggcaccttggcttcacctgccacagccttagccagcaaggttttgcccgtaccgggaggccctactaacagcgcacctttaggcatgttggcgcctatttccttgtacttgccgggattatgcaaaaagtccaccagctccatcagcgcttccttagcctcgtcctgaccggcaacatcagcaaagcttttgccagtttgggcttctacatatactttagcgttactcttgccaaaggtcatagcattgccgcccatgcgcttacccataaagtgcataaatagctgccctaaagcgaaaaagataagtatgggcagaatccagttagtaaaaaagcttacaataggattttgctccttaggcacaacctgcgaaaactctaccttacttttaattaaacgatcagccagctgcggatcctctacccgtcccgtaacataaatttctttttcgttaccgtccttgccgaaggctgcaatacgtttatcggtaatttctatcttggacagcttgccctcgtctaccatctgcataaaggtgttatagggcacatcatttaccttgggactgaaaaaggttggtacaataacggtattgatgagtaaaataattaaaagcgccattacataataatacagtaaaggcttcttttggttattatcactgttcatcctgtcatctcctttataaatttcttttcttttattgtactattatccatctaaatatacaaatgaaatgtttgcaaactaattatgccgcggcaaccccttttaaagcgtgtactctctaagaatacctgtatacatataggttacaccttgcaaagccggcaccttttatatacaattagcatgtgattataaaggaggtttcaccatgtctaaaatcaaaacagttttagttgctaaccgcggcgaaattgccattcgcgtttttcgcgcctgtaatgaattaggcattcgcactgttgctatatattccaaagaagatactctttccctgcatcgaaataaagccgacgaggcttatcaggttggcgagggcaaaagtcctaccgacgcttatttagatattgaagatattctgcgcgtagccaaggagcatgacgttgacgctatccatcccggctacggctttttgtccgaaaacagtaatcttgcccgccgctgcgccgaagaaggcttaatctttatcggtccccgtttagagcatttagtgatgttcggtgacaagctcaacgcccgcaagcaggcagagctggctgatatccccatgattcccggcagcaacggcaccgtcaacagcttacaggaggtgctggattttggtgaaaaatacggctatcctattatcattaaggctgtcagcggcggcggtggacgcggtatgcgcgtagtaaaatctgccgaagaagcaattaccgcctatgacctggctaaaagtgaagcaaaaaaagcttttggcaacgacgatatttacttagaaaaatatttgcagaatcctaagcatattgaagtgcagattattggcgatacccacggcaatttaatgcacctgttcgaacgcgactgctccgtgcagcgccgtcatcaaaagctggtagaaatcgcccccgccttttctctgcccctagagcagcgccaagctatctgcgacgcggcggttaagcttatgaaaaacgtagactatgtcagcgccggtaccgtagaatttttagctactcccgacggcaaattctactttattgaagttaatccgcgtattcaggtagagcacaccgttaccgagcaaattaccggcattgatatcgtgcagacgcaaattaaaatcgccgaaggctacagcctccatgatgcagaaatagctttgccacagcaaaacgagctggtgcctcacggtcacgctattcagtgccgcattactaccgaggacccagccaacaatttcatgcctgataccggcaagctgatcacctaccgcagcggcggcggtatgggcatccgtttagacggcggcaacgcgtttaccggctccgtaattacgccctattatgattccttgctggttaaagctaccacctggggtcttacccaccaaatcgctattaccaaaatgctgcgctgcttaaaagaattccgcatccgcggcgtaaaaaccaatattcaatttttggagaacgtactgcaaaatccgcatttcgtcaaaggtgattatacaacagattttgttgaccaaactcctgcgctgtttgttttccccaaaactctggatcgcggcaacaagctgcttaattatattgccgatattaccgttaacggttattccaatgtaggcgtacagcctaaacccgattttgtaccgctgaatatgcctaaaccctacaacggcattttagctttaggcgctaaacacgttctggatacccaaggtccggaaggcttggctgaatgggttatggcgcagcaggaggttcttgttaccgacactaccttccgtgatgcccatcaatccctgtttgctacccgcctgcgcactgccgatatgctgcgcgtcatgcgcgatactgccggcaagctccccggattattctcctttgaatgctggggcggtgctacctttgacgtagcctatcgctttttagacgaaagtccttggcagcgtttggcgcagttccgtcaggccgctcccaatattcttttccaaatgctgctgcgcggcgctaatgccgtaggctacaccagctatcccgacaacgtagtaaaacaatttatccagttagctgctaaaaacggtattgatgtattccgtatttttgacagccttaacggtttggataatatgcgcctgtccatcgacaccgtgcgtgaatgcggtaaggttgccgaggctgcgttgtgttataccggtgatattttagattcccgccgcgataaatacgatttacaatactatatcaatatggcaaaggaactggaaaaagccggcgccaacattatcgctattaaggatatggccggtcttttgaagccggaagcagcctatcgtttagtaagcagcctaaaatcctgcgtaaatgttcccattcacctgcacacccatgaaggcagcggcaacgctatttatacctatgcccgcgccattgacgcaggcgtcgatattgtcgacacggctatgagcgctatgagctgcggtacctcccagccttccaccgccagcctgtattacgctttgagcggtcatccacggcaaccacgcttagatgccgactctctcaacgagctgtcccgctactgggaaaccgtacgtccctattataaggctgccgatagaaccgaaaacttccctaacccggaggtttatgtacacgaaatgcccggcggacaatataccaatcttaaacagcaggcacaagcacttggcctcatcaaccgctgggaagaaattaaggatatgtaccaccgcgtttccatgatgttcggcgacttaatcaaagttactccttcctctaaaatcgtaggcgatatggcgctgtttatggtgcagaacgatttaaacgaagaagatgtttatgctaaaggcgaagtactggacttccccgcttccgtagtagaattttttgaaggacgcatcggtgttccttatcaaggcttccctgaaaagctgcaaaagattgtgctcaaaggccgcaaacctattaccgtgcgtcccggcgctgctttgccgcccgttgattttgcagaagttcgcactaaattgcaggaaatgggcgctcctgttactgacgaggccgtaagctcctactgcttatatcccaaggttttcaccgattgggtaaatcgttacaataccttcggcgacgtttccgtacttgatacacctaccttcttcttcggtatgactcccggcgaaacaatcaaggtggaaatcgaacagggcaaggtgctcgtaattaaactggaccatatttccgaagccaacgctgccggtatgcgcaccgttacctttgaattcaacggcctgccccgtgagatagaagtcaaagaccgcaacgccaaggctaccgaagtaacccgtaaaaaagcagataaagctaacctgggcgaaatcggtgcttctctgtccggctccgtcgtaaaggttttggttgaaaaaggtcaatctgttactaaaggcacgcctttaattatcaccgaagccatgaaaatggaaaccaccctttccgcgcctgtcagcggcattatcagcgctatccatgtagctgccggcgaacgcgtagaaagcggcgactgcctgctggaaattaccaccggcatgtaatccttttataaaatttagcgatacccgacttaataacgggtatcgcttttttatccgtaaaaaaatgttttaaccgcagcaaaatattttcgtctctaaacggcgttgtaatttttgtgtttctatgctataatgcggcggtatacagatgatgcaataaatattttatgtaaagttaccgctgtacttttattcaagttacagcctaacaaataaaggtatccttatttatgaaagaatctatttttcactttatccaatcacatattgacgaagacggctttttcaccgaagccgctttgcctgacgaaaatccctacggccatatttggcagcacggcaacgccgacgcctattattatacctccgacaagaacgaaaatatggaagctgccagcaagctgctcaagctgctgcgcgactatttaagcgagcctattcaggtgcgccgtcaggctctctacaataatcttaacgatatggcgatggcggaatactgcgatttttttgcttccagctttgaccaagacgagatgaacggtatttgctttgatttggcgcgccgctttttctataacagcctgcaccgcgaaccgctgaaatttgctatactgctttttggcatctatggtatgcaaaaaattcacgaccatgacccggagctgtggcgcgacattttgactgccgctcattgcgaagaattcacctttagctttttttatgcctgccaccttactaactatatcaatcaaaaggctatttgggagcttttaggctgcactaggggctggggcaaaatttttgctattatcgactgccaatgtccggacgacgaccaccgcctgtggctgctaaaaaatattaacgctattattaccgattatctgccgatttcggttaagcttattcaagtaaccaagctggataagtttttacagcaagctgttattgacctagaatgttaccaaaacgctctccaaatcatcggcagctttctaattttgcttttgcattccaagcctagcgagattcgggagcattataatcttgcagaaatcaacatttacgatatgctaaaaaatctgctgcgacatgcagaatacctgccccttgccacagcagaccttgtagacattagtgcgcttgctaccgccatgcacaaactgctggaaaagcacagcttttatctgttaacccccaatcagctgcaggagcttatcgccgcctgcgacgcgcagctatatgtgactgattggcatgatattttagaaaggtatttagtcaaagacgggcagataaactatccgctgatagatttagcctttgaaatgaacatcgacctttggcagaaggtctacgatttatatttgcaccgtcccgaagagtacagattgctgccttatctcttcatttttggcgatgaagagcaaaacgcggccgccataaagcagcttactaagtccatgccgctctacaccgccgataaggaagccatgctgacaacgctcaattatttgaactgcccccaaggcgaaggcgaagcaatttactgcgccgcacttacttccatgtttgaggacgtgcgcgtcatggcctgcgagcagttggaaggctgggataaagaagcgctgacaccggctattaaagcagcattaaagcaatcctatagtactagctccgacgaaattactaaggagcatattcattgcctgctggcaggcaaaaaaccggatatggattatattcatagtctgctgcataagaggaaaatgtaaaaagcataacaaaaaggccgtactgtaaaagcacggctgtgaaaaaaaggtagtgaaaatatgaatttataccgctaccggagtgagtagttctttgatttcttcaataggtatgttagtaaatttattcatttcttcgtatgtaagtccgttggcctgcataactaataaaatttgtcttgcttttgttgcttcccctttttcgattcctttttcgattcctttttcgattaacatttcgcttaagttacacatattagatacctccttgtcaagctgttcatcaattttaatattgaaatctttactgagtttttctttttttatttcagatggttcttcagaaaagagagtatttaggaggttgataacctctttttcgctggtttcattggtcagataaaggataataactctaagcagatcatattgctctttatctgctttttggtagccgagaatattatgttctttgatttcatattcttggatgttattttcacgtttgcgtgccggtttagggcatatccaaatagagtagactttattgatatcttgatagttgctgttagtaaaaatagttccgtactgctcggaaatcattcttgcgcagtagtagaggcctcttgttactaaagcataccccggattgtcgcttttttggatttcaaagttgattatcagggttataggtttatcttgaggaatatgcgctttaatttttatatcgtagtaaatggtctgctctttaatgcttcctgattcgctgtttaattgtgttactctatcagcatggtcttgatggactgctttagtagcgatatcaatgtcatcattaaggcagtttttttcaatatattcaaggtctaagtttttgaattcttctacacactgcttaaggattcttgcaacaatagctttgtgggcaagtattcgtttggcagcgttatcgtacaacgcacttttttctgctgtttccagcgtttgagcaaggtttgtttccatatatatctccttatgttagcttaattatatcacaaaaggttgtgtttgtagtagatttttagtgaaattacccacagaaatagcagcaaagagatagttggttattcgttttcatgagcgatagttataactgtaaaaaaatgtataaacctataatttatagtagtataccattgaaaaaactttcgaagtaaaaatataattacattaactctattttagcaggataaaattactttcataacgaatattataaaagtaatttagttgtaccatttacaacaagcgactaaaatgttatactataggtaatcctttataccataccaaggattatcgggttactatgataaggtagtacaccgaaaagctctaacgctctgtcgcttttgacagagcgttatctttttttagggaaaggatgaattttatgaaatacgctattggcttagatatcggtattgcctctgttggctacgcggtagtagcgcttgaccatgaagaaaatccatggggcattatcagaatgggctcccgtatttttgatgtagccgaaaatcctaaagacggagcttctctagcattaccacgtagagaagcacgcagtgttcgccgtcgtttgcgccgacataaacaccgcatagaaagaatcaaagaactgcttattcaagcaaaacttttaacaaaagaagaattactgcatttatacgagggcgagcttactgatgtgtacgctctgcgtgtaaaggcacttgaccataccgtaaataattgggaaattgcacgtattcttctgcatttggcgcagcgtagaggttttaaatctaaccgcaaagctgatgctgcagacaaagaagcaggcgaattattaaaggctgtaagcgaaaaccaaaaacgtatgcaggaaaatagttacagaaccgtcggagaaatgtttttaaaagacgagctatttgcccaatgcaaacgcaataaaggcggtcaatacttaaccactgtacatagagatatggttgccagtgaagcaaatttaatcatttctcagcagcgtttattaggtaatacacttttaactgaagattttcaaaagcagtatttagcaatactcttaagccaaagacaatttgatgaaggtcccggtgaacctagtccctatgccggtaatcaaattgaaaatatgattggtcaatgtacttttgaaccgtctgagaaacgtgcggcaaaagcttgttattcctttgagcgttttaatcttctgcaaaaaataaatcatttacgtttaatggaaaatggtgctactgtaccactaaatgacgcacagcgtcaaaaggttattgcgcttgcttatagtaaagctgatttaaagtttacacatattcgtaaagaattaggtttaagcgataaaatactttttaacggtcttatctatgataaaaacgatattaaaacagtagaagataaaacaaaatttaattttctgcctgcctatcaccaaataagaaaagctttagaaaatgtaggcaaaaaccatattagtgcgttagaaacaacaactttagatgaaattggccgtatcttgtctacttataaaggcgatgctaaaaggaaagaagccttttctgctttaaatcttagtgaagaagaaatagcagcactactacctattgcctgtttagccaaatttggccatctctcattaaaagcattgcgaaaaattctgccttttttagagcagggcatgatttacaacgaagcatgtgctgccgccggttacaatttcaaagctcacgataatcaggaaaaaacttttctgcttcctgctaaaaaagatgagatggataatatcactagtcccgttgcccgaagagccattgcgcaaacaattaaagtaatcaacgctattatcagagagcaggggtatagtccttctttcgttaatattgaacttgccagagaaatgtctaaagcctttgacgaacgtacacaattaactaaaagcatgaaagacaatcaagcggctaatgagcgtattaaagaagaaatcagaacagaacatcataaaaccaatcctaccggcctggatattctaaaattaaagctttggaaagaacaggatggcatcagtccctattctcaaaaaagtataaatgtcgctcgcatatttgaaccaggctatgtggatatagaccatatcgttccttacagcatttcttttgacgatagcttaaaaaataaagttttagttttgtccagcgaaaaccgcgataaaggcaatcaactgcctttacaatatttacagaaaaagtttggtcaaaaagctgctgacagctttacagtatgggtacaaaacaatattaaaaattataagaaaagacttaatcttttaaaagctaaaataacggacgaagatttaaataaatttaaagagcgtaatttgcaggatactaaaactatttcccgcttcctctataattatatcaacgactatttgctgtttgcgccttctgaaaccggacgcaagaaaaaagtaacggcagtaaacggcgcaatcacctcttatttaagaaaacgctggggcatcaacaaagttagagctgacggcgataagcaccatgctgtagatgcattagtaatagcctgcactaccgataaaatgattaaggatttatcaaattattcaacatatcgggaaatggaatacacgcaaacagataaatacagtattttagctaaccctgcaacgggagaaattatcaacaaattcccctatccgtgggaagattttcgtccggaacttatggctagactagcagaaaatcctgagcaagcattacaaaagctgcagctactgttttacagcacaatggatttaaatactattaaacctatttttgtatcgcgtatgccaaggcataaggtaaccggagccgcccacaaagctaccattaaaagcgcccgccatcttgaccaaggtattgttgtcagcaaaaaagatttaactagcttaaagcttgataaaaacggtgaaatagctgattattatgcaccggaaagtgatcttctgctttataacgcgctgaaattaagattgcagcagtttaataataaaggcaaagacgcctttgccgaacctttttacaaaccaaaggcagacggtacacaaggccccttggttaaaaaagttaaagtaatggaaaaatccactctaaatgttcctgttcagcaaaaaaccggcgcagcagataacgacagcatggtaagagttgatgtgtttaaagttgaaggcgacggttattacttagtacctatctatgttgccgataccttaaaaaaagacttgccgaataaagctattgttcaaagaaaaagttatgctgaatggccggaaatgaatgataagaattttattttttcattatatcttaacgatttgattaaggttactcataaaaaagagatgaaattctctaaagtcaatgctgatagcagtttacctaatgaattctcatgcaaagaagcctttgtatattataaaggaactaatataactgttggaagtattagtattattctaaacgataattcttatagcattgatagtttaggcgtaaaaactctgcaaaacttagaaaaatatcaggtagatgttttgggtaattatactaaagtaagcaaagaaaagcggcaatctttcgccaagaggtgaaaatatggcttatcgtaatctaatgatagcaagctcggctcatattaaaataaaaaatgaacagcttattataagcaccgataaggattatagtattcctattgaggatatcaattctctgcttatcgaaagcaggcaagctacgattacgatggcctctttatccaccttagcgcaaaagggcgttacggtttttctgtgtgatgaaaagcatactccttgcgccgtgatgatgcctttcgcacaacattcacgcaatgtgtgtatgctaaagatgcaggaaaatctttcccagcctctgcaaaagcaattgtggcagcaaatagtcaaagccaaaatcaataatcaaggcaaatgtttggaattgctaaataaaaccgcagaagctaaacaattatatactttaagcaaaaatgttttaagcggcgatactaataatacggaagcgaccgccgctagattttattttaaaaatcttttcagcaccgattttatcagaagtgatgatacagatatccgcaacagctttttaaattacggttatgcaattttgcgcggacatattgccagactcattaccagctacggtttcatacccatgctaggcatccatcatcgtagcgaagtaaattcttataatcttgccgatgattttattgaaccctttcgtcccatagttgatttatatgtagctagaataacaaattttactgcattaaatacgcagcacaaagcatcactatataatctgcttaacatggatgtcgattccggaggtcaaacccattccgtatcctatgctgccgaaagaaccatccaaagctttagccgctgttgtcaaaaaacttccaaggagcttttactgccaaagcttttagagcttagacagcatacctatgaataagtttatgagaatgctggtcttttttgatattcccgtaaaaaccaaacgacagcgacgtatagcaacggcttttcgtaattttcttttaaaagatggctatcacatggtgcagttttccgtttatgcccgtgtctgcaacggtatggattcggtagaaaagcatagaattaggcttaatacagccttgccggaaaatggttcagtacgtttactagttatcacagagaaacaatatgaatctatagaaattttagtaggtaatctgcatgaagaagatactccgttcatctgtgaacagctttctattttttagaaaaaatcactttttaactagatatcgagaaatttattttgatttttttgtacagcaaaaagcccttgtaccaacgtacaagggctttttaccgttctcaattataccataccaagaatcatcagggaactacaactacacccatatcgctaaaagtttgcaatgcattataccataccaagaatcatcagggaactacaacatacagacagaacgctggaacgagctaaagattataccataccaagaatcatcagggaactacaactattgggtgaggtgggataatgcaggttatattataccataccaagaatcatcagggaactacaaccacaatacgtctctatcgcttctgctaattattataccataccaagaatcatcagggaactacaaccagtgagattagccagagaaagttttgcatattataccataccaagaatcatcagggaactacaaccaaacgtagcagcgctttattaatgctattattataccataccaagaatcatcagggaactacaacaaacgcacccgtttcgtaatgttttggatgattataccataccaagaatcatcagggaactacaacgcacgcggttatatgaagcgggtacagtctattataccataccaagaatcatcagggaactacaacaattgcagcacgttgagaatctttttcatcattataccataccaagaatcatcagggaactacaaccggatattctcttctcaattctttttcggtattataccataccaagaatcatcagggaactacaactaatattgcatttaaccaattttgtgttttattataccataccaagaatcatctcggcagcatcagaaatggctgctctttttttcttcatgtctatttttacataaaacaactatatagccattatcccattttaatatcttagcatattttcccaatcgttttccggtaaaaaagttattactctatcgcgaaatttaaaataggtttttactccgctgctgccaataaaatgccgtaaaccatcagcgcagtgttgtaaaggtcctcttcctttaaaaattcttctaccgtatgcacgttagccataccggtgcccaaaattacgcagggaacacctgcttcgttgataaagttagcgtcgctgccgccgccggttaaagtaacattggacgcaaaaccgcagattgcgcaggagcgttctgccagcgtaactaccttgctgtctttatctaccaagaaagagctgtatttatggtcaaccttagcctcagcttgagcgccgtatttttgtgcgctgcttacaatagtattaactatttcgtcgcggatagccgccagcttctcgttgttgcggctgcgggcatcaccctcgataactactaaatcaggcactacgttagttgccacaccgccgccgataatacctatattggcagtagtttcctcgtcaatacgtccgtagcgtttaacgtccgctaaagccttagcagcaatcataatggcgttaatacctttttccggctccaagccgccgtgagcttttttgccgtgtacggaaattttatatttatactgaccgggtgcgcctaccacgatttcaccgggtgcgccctcgccgtccaaagcgtagccaacgtctgcgcgcagacgagttctgtccatacagcgggagccgttgacgccgccctcttcggcaatagtgaaaagcacttgaatatcgccatgctcctcgccgcttgccagcagcatgcgcagaccctctaaaatgccttccacgccggatttatcgtcaccgcctaaaatagtagtgccgtcgctgtacagcacaccgtccttttgcaccacggtagtaccgccgcaaggttctacgccgtccatgtgagaggaaagcaaaacggcggtcgcgtccggcttattgcccggcaaaaacgcccacaaattgccgcaattacctcctaattgcttgcccgcatcatcttcctctactgcaaagcccatggcttccagcttcgcctttaaataatcaaacacaggcttttcctgtaaggtatggcagggaattgccacgatttctttaaattctgccagcatacgttctttattaacttctaccatttttcttcctccttaaataacagctgctcaaaacatttttatgttataaccaaccggtgtgttccagtaaaatcttaacgccgatagcgataagcactaaaccgccgataatattagctttttttcccacagcagacccaaggcgaaagcctgccaaaccgccaaaagcagcaatggcaaaggtcactacgccgattaaggtcgctgccaaccaaatattcgtgttcaaaaaagcgaagctgatgcctactgccagcgcgtcaatactggtagcaacagccagcaccgccatctccttcgccgtatagctgtgcttaatgctgcacgcttccgtggcctcgcgaatcatatttacgcctaagtaaagcagcagtgcaaacgccagccaatggtcataattcataatatattctctaaaggatatggcgcaaaaataaccgataataggcatcagaaattgaaaaaagccaaaccatacgccaaaacgcagcgctccctcggttctctcctcgggacaaagcaccatgctgccgcaaattgctacggcaaaagcatccatagccaaactaacggacaacaataataattctataaatcccatgttcccctcacacaaaattttctcaagcaaaaaccgcttccaagcagtatgctttcgtaaactgctttatatctattgctcctgctctttggcaagacgttttaaattgatacggtcttgatgcagcttcacagctctgaacagactgcccaccgccataacgcccagagcaatagcggaagcatccatgcctgcctgcaaaagcagcgacatacctaaatcataatttttttcgattatttgggtcatgcccttgtacatggccagtcccggaacaatgggaaatagtccgggaataacaaccaccgtcaccggataatgccacaagcgcgcgttaatctcgcttaacagcgaaaccgccagcgacgcagctaaattggcataaaaggtatctacacccaaggtctggctaagatgaatatacaccagccagcccacagcgcccactacaccgcacacaggcagcgcgcttttaggcgcttggaaaatcacggcgaaagccatggatgaaagcacggcaaaggcaaaagcctctggataatctaataaaatcacgcttactacctgctttctaaaaaattatttaaccattggccacaaattccaaccccagcgataccacagaagcaaggtcaaagccaagccaaaggcaatagatactgcaaacagcagcgcctcggcaatgcggctgttgccgctgataaggtcgccgcttaaataatctcttaaaccgttagtaaaagccagtcctggcaaaaaaggcatcaaggagcctacaataatattcatgcgagtacactgcacgctgacagcacagcatataatcgccagcacgccgatagcagaaccggctaaagcattctcccaaaaagcgctgaggctgtaaccatcaaactgacgcaatagtgtcatagctaaaccacccgtaacaaaggctgctataaaatcatggctattgccgcccagcatactggcaaaggctgccgaacaaatcgcagacgccagacaaaccgtccatttgccatagggaggacgcttttgcagcaaataccgcagaaaggtcatagcttcatcataattaaaattgggcggatcaatgttataggaaaaatcattgattgctttcacattacttaaattgttactgcggtaacgaatacggcacattaaggacgcattcaccgcagtttcgtcgccaataataatcatggtcggcgtagcaaaaacattgatgtcatgatagccgaaggtacggcagaagcgcatgattgtatcttccacgcgggaggtttccgcgccgcttttcagcagcaccttgccgatattcagcgccacattgagcgtctgctctcttgtgatgtaatgcttgtcagcggtcatagacgccacctcccagcagttttgccacctgagctttaaaggtttctgcgccgcccatggacggatggcgcacagctacgcagtcaatgccgtaacggcgtaaggtatctgccgctttttgtccaatagccacaatctgcatcttaggcactagctccagcagcattttggcatatcctacacctatatccaattccgcagtggacggggtacgattacttaacagcttgccagccttatgcggatgaaagggaaaaatattccacaaaattacatcaaaggccgccagtccgtggcggtttaaagcgttccaaaccacagtatccgttggttcgttaaagcccttcgccttttgggacggattgagcagcgcgctctctggattgctggtacgctgatagttccactcacctaaaacgctctccggctgcacatccttatgctgccccagcaaaatacgctccgaagtaatggctacgccgctgaaatgcccaccctgatagccaagcgcttcggcaataaacagataatgcgccttgatacgcagctccaaataacgccgcagattagcgctgcggatggcgggagcctgcggagtgatatcgcagtcagggtcataatcacgccaaggattgaacaccagctcgctgtgataggcttgtaatttatcaagaaaggtattgatatccataatttttccgtgcgcttaatataaatccgacgcactttcctccgctctttattataacctaaataccggtcaattagcaaacaatctaaaggtaatttaacgcccgccaatatacacaaaagccgccgctcgcacagcgaacgacggcgaaataattttttagttacagcctgcttcttagtacagcaaaagcaccatgcctgccagcaaagcgcatacaatacccagtgcattacgtttgcaaacctccatggggtctacgccggcaatgcctgcgcagataatggttgcaccagcgataggagaaatagtacggcccagggtaccgcccaaagcagcaatagaacccatattcatggtggaaatgccaaactcaacagcatgcggagttactgcttcgttaaaggcaacggtagcagcgtcgccggagccggaaatcaacgccaatataaaaggaccgaaggttgcggcaatttttacaataccggtagaattcagcatccaggcaatcaaggctttaatcaagcctaaagcatttaagccggcaacaaaaacgccaacggagataataatgccgataatattagcataagcgtctcccataccgttaaagaagtttttagtaagctccacaggatttttgcgggttactgccaacgccaaaatcgcaccgataaccatagcgtgaggcacgcccatttttaagaaaggcactttagtattgccaagcagcaaaataattacgggaaccaaaggcataacagcgtacaaaggattgattatgaagctggtgtcgtccataacactgccttcgggaacgtagcccttattttccttgagcacaacggcaacaatggtcaaaacaacagcggcaatcaaaacgcctactacggtagccatcatgtggttgccgataacggtggtaatttgcgtattagccagcttggcgataacagcgttatgcactaggcctgggttcagcatactgccataggtaccggattttacagcggcagcagccatggcaggatggatgccggcagccatcaaaataggaataaagataacgccaacggcagcgctgcagcctgcggcgctgggaatagcaatattaacaacaaaggtagccaaggtagcgccgggaatcagcaaaaagcccatttttttcaaaaccttgccaatagcaactaccaaatgtttatcacattcggtgtacttcatgcaccaagcaaagcccatgcaggaacaaacagaagtaatcaagcccgcattagtcatgcttttggcaaaagcgtccaaggaagccataggcttgcctgcaataatgcacattaaaataccggcagcaattaacaccatacgcgattcatggcgtttcagcagcaaataaattacgccgataacgaccaaagcgccaataattaaaaacatacaaactcctccactctaaaaattgtgttctttcgtgtaaattatattataaatcaaataccggcgaatgtgtaggttcgccggtattgtatacagaatacttctttatgcagttaatttttactccgtttggtgccattggccgtaattatggataatataattagtcaaggcatcatcggtttcattgggattaggattatccatttggtctacaaaatgccgcttatccgaccaataaaaggccttaccgccaaaataacctaaggcaaagggtatttcggcaggctgcaaaagattgcggccgataaatttctccggaatatccacgcctaaaagatacagcagcgtaggcgccaaatcaatctgcgaggcgtattcgttagtacgcaaagcatccagaggctgcaaatttttgctgacaaaaatcagcggaataggcgcaatgctctgcttatcatcagccttagttaccagctgggtatattcgccgccgctgtgaggattgtggtcgctggtgatgataaacagcgtgcgttcgtccatcagcccctgcttttctgcctgggtgaagaaatgctccagggttttatccacccaatacacgccgcgcacagtaaaattaggattatcccgcacgccctcaggcatttcctcccagcgataacccgtatagggatatggctggtgcatgtccagggtttttgttaccaaaagcattttcttatcgcggttttcctgcaaaagcttcagcgtatgctcatacatcacgtcattatgatagccccagccgctggcgccggtatagccgcatttttccagctgctctttggcgatataatcctgcattccaaactggtcgggatattcccgcagctcgttggcataatactgactggacgcattcataaaaatacccttcataccagcctgctgcacggagcgaaacagggacggcgtctttttaccgggaatatccttatccataatcaaatgcgaacgaaacgtagcatttaagccctgggtagtgggcacggcagaggaataatatttgttaagatgaggataccgaatcaccagcatattaagaaacggcgtagcctgctcggggatgtttttattataaaaattgatgtaatcacggtgcatggattctaaaatcagcagcactactctatcgtattggggcgcaatttgggctaccgcaggcttaggaattgcaattcccaaaccctccagcgtctttttatccttggcggtcagctcccgcatttccacatgcttggcgcctgccattttatccgtatcaaacagcgccttactgataaaattgatattgataggcacggacagcatattgcgataaataatgcgggttttttcgttttcaatagtcacatagttgccaataatggtttctacgcaccacataccgcccgtcagcagcaaacggtccgccaaattaagtacaatggtaaacatagctacgcatagcagtgaccacacaaaattaggcttgcgtttattaggcttaggcacgcgaaacagcagcagcaccaaagcgatagcgcccacaatagctgctaacagtacattgctcatggtggctaaaacgcccttaaccgcatagatgttgagattttgaaacagcacgctttccacgtgcatagaggtctgccaaaaataaaaggcgtcaaaaatcagcgccagcgccgtaaaaacatacacggcaaaataaacggttttcatcagcagattaggccatttatagtagcacatagccgtaagcagcaccagcaaaatattattgttgatacctgccgtaatcgccagcaccgtctgcacgcctttatcaaggctcagctgataaaccataaagcaggccacgcccacatacaaaaggccgatgactaccacgggaaaataacggcgcacacggtccaccaggcgattgcgcctaaaatacagcgtccaggcaatcaaacccaaaaagcagtcacgcaaaagatggttaaatatttcaaagccaaattcttctactggcatagggttaaggctgctaaaactatcgtaagccaatttatattcaattgcccctgccagcaaaataaatagcgctattaccagcttgtttactgattttctcaacttacatccaacccttatgccaaaaatttaacaggaacctcttccatcactatctccagcggcgcagccgtaacagcgtcgccgtccagctctgctgcaaaatgctctacattacagcggatttccagcttcttcaccttgcggataacaatatccttatcaaagcctaaagcctccaaagcaatgcaggcagcatagcggataaagtcgctgcgcttggagccggtaaacaaagcggcatataaccagggagaagacagcgaagcactgcggaataaattataacgtcctgcataataacggcttttgcccacaatgacggaggaagcctcgtgccactggctttcgtcgtcaaaacgcacctcgaagcggtagcgccagttgctgaacagcagctc

SEQ ID NO: 4059 - DNA, 23264 bp, synthetic construct
  source 1..23264: mol_type = other DNA
  misc_feature 1..23264: note = Synthetic
aagttgaatccgtctaaggacagtctgctggttgaacgcgccgataacccgtttgttaacatcttcgtaaccaccaaggctaacgaaaaggatccgcgtatggaacagctgaagaagatttacacctccgctgaaaacaaaaaattcatcgaggatcacttcaaaggttccattactccggcattctgatttatcaaagcatagcacaaaagctcccgcagacttctgtgggagcttttcttacactaatagaatttctaaaaaaatttcgcgtttagcactttacaaatttagcatactaaagtataatgggtacatagttaaatgctaattaacaaatgaggtgtgaaaaatgaaaaaattagtagctttagtaatgggcctgatgatgatgctcatgatggttgccggctgcggcagcgacggcccgaaaaaaatggtaatcggtctggacgataacttcgctcctatgggttaccgcaatgaaaagaatgaaatcgtcggcatggatatcgaccttgcacgcgaagcctgcaagcgtgccggcatggaagtagaatttaaaccaatcgactggggtgcaaaggaagcagagctcaaatccaaacgcattgacgctatctggaactgcttcaccgttaacccggagcgtgaaaaggtatatggcatgtccaagccttacatcaacaactctcagctggttgttgttcctaaggattctccgattaaaaccctcgaagatttaaagggtaaaatcgtagcggtacaggatgacagcacaggctcctacctgctcgagcagcctgcacacaaagagctggcagcttccatgaaggaagttcgcaaatatcccgacttcgcagctatttacatggaaatagacaacaaacgtgttgatgctgctatcgtagacgcagttcttgctcgcggctattatgacaaaaagaaacccggtgcctacagaattcttgaacagaccatgggcgatgaggttgtagcaattgccttccgtaaggacgacaaagacttcaaagaccgcatcgacaaagctatggatgaaatgaaaaaagatggtacctgcaaaaagatttccgaaaaatggatgggcgcagatatcacaaaatattaatttgttatcacttgagggctgtcgcatttagcggcagcccatattataattatatggagagaaataatttatggattacgttttaaatatcatccctcagatgatggatggctgcctggtatcatttcaagtttttattatcaccatcgtactgagcattccgttgggcattttgctcagcctcggccgtgtttccggcattaaacccctgcaggccctcataggcggctacgtttggattttgcgcggttccccgctgatgctgcagattttcttcgtttacttcgtactgccgtccgtaggcattcgcctgccggactttgaatcagccatcgtagcctttgttttgaactacgctgcctacttctgcgaaatcttccgtgccggcatccaggcaattcctgcaggccaatacgaagcagcgcacactctgggcatgaactatgtgcagaccatgcgccgcattattctgccgcaggttatccgcatcattctgccgcctatcagcaacgaaaccattactctggtaaaggatacctccctggtatacgtcctggcaatgaacgatctgatgcgtaccgcacgcaatctggtacagcgtgacttttctattacccccttcatcgttgctgctgtcttctacctgctggcaactctgattttaaccattgtttttgaacgtctggaaaaacgcttctccagatatgaccaataggaggagtaaccactatgactactaaaatcaaagcaaccaatatctggaaaaaattcaataacctcgaagtactaaagggcattgaccttgaagtaaatgagggcgaggttgttgccgtaatcggcccttccggcggtggcaagagcaccctgctgcgctgcctaaacaagctggaaacaatcgataaaggcagtatcaccatcgacggcgaagagctgtgccgtgaaacctccggtggtacggaatatgtcaagaacaatgatgtccgccgcatcgcctgcaaaatgggcatggtattccagcagttcaacctttttccgcatatgactgttctggaaaatctgattgaagcgcctgtcaacgtacaaaagcgcgataaagcagaagttatcaaggaagcagaggttctgctggcaaaggttggcctttccgaaaagcgcgacgtttatccgcgcaagctcagcggcggacagcagcagcgcgtagctatcgcccgcgccttggcaatgaagcccgccattatgctttttgacgagcctacctcttctctggacccggagctgaccggtgaggttttgcgcaccatgcgcgagctggccgacgaaaaaatgaccatggtagtcgtaacgcatgaaatgggctttgcccgtgaagttgccaccaaggttgttttcatggctgacggccatgtgcaggagcagggcagtccggaggaaattttcgttaaccccaaaaacgaacgtctgaaatccttcttaaaagtaattttaaagtaatcagataaaggtttctaaattaattcacagattacacctacctttgtcatatatgtttgttataataatacttgaggatgaaaggaacctattgaacaaggcaagcaaagaaaggtgatttcaatgcacgttaaaattcttggccccatgactaagcaggcagagctgctgctgcagaatactgctattgctttaaagaagctcaaggttaaggctgagtttgaaaaagtttccgaattccaaaaggtagtggcctatggagtgatggccttccccgctttagtcatcgacgaaaaattagttgctgtcggcagcacgctttcggtagatgaagccatgactcttataaagcaactctcctaaacatatcttttcatcatacacctctccttaaaatacaccgcaccgtgcgaaatgtgcggtgtatttttttgctttgaaagcattttgattaatgtaaaatttatgtaaagttctttacgcacttttaacatcccagtttttcgagtataataaatatagaatgctgtttttacagcaataatagatgcatataaactaaaaaaaggggacttattttttatgcttgcttatttcttagcatttttaggcggtatcgccttatttatgtatggcatgcagctgatgggcgacggtctgcaaaaggctgccggcgccaagctgcaaaagattttggaggccatgaccggcgtgctcgccatgggtattctgttaggcgcggttgttactgcagtactgcaggccagcggtgctaccaccgttatgaccgtaggcctggtaaatgcgggcctgctcacactgaagcagggcttcggcattatcatgggtgccaacatcggtactactatgacggcacagctcatcgccttcaagctttccgattatatcacgattttaatcttcatcggctttttgatgcagctgctggcgagaaaaagccgcacaaaatatcttggtcaggttatgctgggcttcggtattctgatgctgggcatggatatgatgggcaaggcggttatgcctctgcgtaactatcccggctttgtgcatttcatcgaggttttctccagcaatccgttgctgggcatcggcatcggtatgattatgactgtgctgattcagtccagcagtgctaccatcggtattcttatcgccatggccggtcagggacttattccgctggagggtgcgattcctgtactgctcggcgacaatatcggtacctgtattactgccgtactcgcttcgctgcgtgctaaccttacggctaagcgtgtagctgcagcccatgtaatgttcaacgttatcggcagtataattttcgtaatcttgatgccgttcttcatcaagttcgtattaatcgtttcacctgccaatgatatcgcacgccagattgcgaatgcgcactcggcgttcaacattttgaacacgctgctctttatgccctttgttaaccctttcatcaagctggtagaaaagattgtgcccggcaaggcagaaatcatctccatgcgccctgtttatcttgacaaaaacatgctgaacactccctctatcgctatcagccttgctgtcaaagaggttgtgcgtatgggcgagctggcacgtaaggacgtgcgtcttggcatggaggctattcaaagctttgatgccgacaaggtaaaatacgttttggagcacgagcctgttgtcgatgcgttggagcgagatattaccgactatctgacgcagatgagctcctctgaaatgagcgaaagcctgacgacacgccacaccggtcttttgcacgcctgcacggatatcgaacgtatcggtgaccatggtgaaacattggctaaacgcgcacgtaagcttgttgaggaggatgtagttttctccgatgaagctaaggcagaactgctgcagctcagcgaaatggtactgcgtgcctctggacgtgcgctggaagcgctggagaaaaatgataaggttattgcggaggacgctgtgcgtctgtgccgtgaggttaagcaataccagaaggaaatacgcaaaaatcatattacgcgccttaacgagcacatctgcaatccgactgcaggctttgttatgatggagctgctgattaatatgaagcgtgtatccgatcattccaaaaacattgcccagcttgttcagggaacattctaaagcttataaagcaacagcaagcatacagactactgctcaacatagtctgtatgcttttcttttgcgtaaaagcattgttaagctaacagagtacgtacataattaatccgcactttctcatatgcgcttatgaatttactcaagtatacttcagtaaatcgtacttgagtaaatttactcgaagtactgcaacccctactcgcctaaaacaataatataattacaacagccttatcattacaagcctatattaatacacttataaaatcacaactttttcacaaaatctttgctataatttagataagcaaggactgcgcttccgactgctacagtcttagcacagtccttttgttatgcgtagagccacatatggctttacggttttttattatatttattactaaaaagttttttatcatgtacatgcttagcaaatatatgctacatattgaacacaataaaagtaaaccacaaggtttcacactttttttactttaaatattgttggcaccttttactaattacagctaaagtattacaatatagactgaggaattttcagcctagattataaaaaagaatgtgaacaggcatcaggcaccagtctgaaagtcatattcgcaggaggttactatgcagataggattagatgttggcagtaccacaattaaaatcgccgtactggacgatgcaggcaatctgctattccataaatatgaaagacattacagccagatagcagaaaaaattctggccctacataaagaattgatgactaaattccctacactgcatagcgcacgtctggccatcagcggcagcggtggtatcggtatagcggacagctgcggcctgcaattcgtacaggaggtttttgcggaaaaaatctgcgctgaaaagctcaatccaggaaccgacgccgtcatcgaattaggtggcgaggatgccaaaatcctcttcttaggccgccattttgacgcacgtatgaacgacagctgcgccggaggcaccggtgcctttatcgaccagatggcttccctgctgaatgtcgaaacaccccagatgaacgagctggcacagcaggcacagaacacctacaccattgccagccgctgcggcgttttcgccaaaagcgatatccagccgctgctcaaccagggtgcggaaaaaagcgacttggcagccagcatcttccacgctgtagcaagccaagccatcacaggtcttgccaaaggccgtcccatcagcggcaatgtgttgtatcttggcggaccgctcacctttatgagctgtctgcgcgatgcctttgacagtgttctgaatatcaaaggtgtctgcccggaaaacagcctgctttatgtagcaatgggtgcagccttctgtgccgagcacgaggtggaccttaccacgctgccagaaaaactgcaggcagcagcagcacagcacagctttgaacatctgccgccgctgtttaaaaacgaaggcgaatatactgtttttaagaagcgtcactctaaggaaagtgtcgctataggcacccctgcggaggcaagcgaagcctttatcggtattgattccggcagcacgaccattaaaatcgctgttatgagccctgatggcaagctacttgactccttctatcaaagcaacaagggtaatcctgttgttgccgtccgcaattatcttaccgatttctatacaaaatatccccactgccgcctgttggcaggtgcagtcaccggctacggcgaagagctgattcgccacggctttggtgttgactatggtatcgtagaaaccatggcacacttttatgctgcccaatatctggagcctgaggtagatttcattctggacatcggcggacaggatatgaagtgcctgaaaatccataacggtgccatcgataatatctttttgaacgaagcctgctccagcggctgcggcagctttttgcagacctttgccgaaattctgggctacacagccgagcagttcgcgcaaatcggtcttaaagcagatatgccggtagatttaggcagccgctgcaccgtgtttatgaacagcagcgttaagcaggcacagaaggacggtgcctccgttgccaacatcagcgccggcctgtccatcagtattgtcaaaaacgctttatataaggttatccgtccggccagcaaggaggccatcggcaagcatatcgtagttcagggaggcaccttcctcaacgactgcgtactgcgcgcctttgagcaggaaatggatttgaacgttatccgccccaatattgccggccttatgggagcttacggtgccgctctgtacgcacaacgccgctacaaggacgcaccgcatcagacaacgctgctcaacctgcaacagctgggtgaatttgttcataccgtcaagggtatgacctgcggcctgtgcaataatcattgccacctcaccgtcaacacctttgccggcggcaaacgctttatcagcggcaaccgctgcgagcgtcccatcacccacatggcacccaaggatgagctgaacctgtaccgtcaaaagctgcagctgctcaaggaattgcctgttaacgaaactcctaaacgcggcattatgggtatacctatgggcctgaatatgtatgagctgctccccttctggaatgccttactctctagcctgggcttcaaagttgtccatagtccgattgaagacaaaactatttaccgtcttggtcagggaaccatccccagcgacaccgtctgctatccggccaagctgatgcacggtcatatcaaatggctgctgcagcagggaataaccaatatcttctatccctgcatgacctataatatagatgaacagggtacggaaaactgctataattgccctgtcgtagcctattatcccgaagtgctgcacgccaatatccgtgatctgaataagcccgagatacatttcttctatgattatcttggcctgctccataaaaagaagctggtcaaaaagctgcaggaaatgtttgccaagggttatccggatatcaccaaggaggaaatccgcaaggctgttgatgctgcctttactgccttttatgactatgaagcgcaggtaaaggctaaaggacaggaaatcatcagcaaggcacgcgaagagcataagcctatcgttgtactggcaggccgtccctatcacatcgaccctaaggtcaaccacagtatcgaccgcctgattactaacatgggtgctgccctcgtcagcgaggatgccgtaagcagtcatattaagaccaaggaactcaaccgcgacctgcaggtgctcaaccagtggacctatcacggccgcctgtacgcagcagccgaatatgttgcccaaaatcctgatatgcatctgattcagcttgtaagcttcggctgcggctgcgatgcgattacggccgatgaatgccgccgtctcctcgaagaacgaggacgcatctatacacaaataaaaatagacgatatcgacaaccttggtgctgccaaaatccgcatccgcagtctgttctccgcagcccagcttttcgatatagataataattaaaggagatttgcatatgctaccagcagctaacgttaagtttacccccttcacggaggatatgaaaaaaacgcatactatacttgtacccggcatgctgcctatgcatttttcactgctgcaggcagcactcgtaagctgcggctacaaagccgaggttctgcacaacaccggccgcgaggtaatcgaaaccggtctgaaatacgtcaataatgatatctgctatccagcactgctggttatcggccagctgataaacgctttggaaagcggcaaatatgatttggagcacactgcgctgattatcacccaaaccggtggcggctgccgtgcctccaactatatctatctgctgcgcaaggctttggaaaaagccggccttacgcacatccctgtcatcagcctcaacgtcaacggtctggagcagcagccaggcttccatctggacgcatccatggtgcataagttcttggctgccgttgtttacggcgataccctgatgtacctgacgaataaaacacgtccctacgaagttgtacacggcgctgccgacagactggcgcaaaaatggctggcacgcttaagcgaagccttcaagagtggcaaggcgcaggctttaggtaccatcaagcagcttactaaggctattgcgcacgaatttgcggatttgcctatcaccaacaaggagaaaactaaggtcggtattgtcggtgaaatctacatcaaatatgccgctttgggcaacaacaatctggaagccttcctgcagcgtcagaactgcgaatatatgctgcccggtctgatgaatttcattatgtactgtgttgatacttatcttacggactataagctttacggtggcagtctgctcaaatacagtgtcaacaagggcgctatgtggtatttaaaatatatggaaggcatcctgcatcaggctctcagtatcgctcccttcagcgcccccgccacctatgaggaaaccaaggctatggctaaaggcgttatcggctacggcaacaatatgggcgaaggctggctgctgactgccgaaatgctggagctggtgcacagcggctacaccaatattatctgtgcccaacccttcggttgcctgcctaatcacatcgccggccgcggcatgattaacaaaatcaaggagattgccgaggaggctaatattttagcactggactacgatgccagcgctgcccgcgttaatcaggaaaaccgcattaagctgatgctggcgacagcaaagtaaaaatttttttaatgctaaagtcgcgaactgcctgctgtattttgttaattacagtatattcttgttccagcaggtgagtttctttatgaaatatcttaactttttgtttttcattttcgcttaaaatattgtgttatttttcataagtatagcaggatttatatagcctcatctagaattataaaaatatattttattttgagatttacaatttgaggcagacgtgttatacttaaatcaatccttataccataccaaggattatcgggttactatgataaggtaacacaccgaaaagctctaacgccctgccatctggcagggcgttatctttttacacgcccaaataagaaaggatgttgagaatgaaatatgcaataggccttgatatcggaattgcatctgtcggctatgccgttttagcattagatcacgaagaaaacccgtggggaattatccgccttggttcgcgtatctttgacgtagcagaaaatcccaaggacggtgcctccttagccttgccacgtcgtgaagcccgcagcgtccgcagacgcctgcgcagacatcatcatcgtttggagcgtataaaaaatcttttgattaacaccgagcttataacaaaagatgagcttttgcatttatatgatggtaatctttctgatgtatacgaattacgtgtaaaggcccttgattattctgtaactaatgcagagcttacacgaattttattacatctcgcacaaagacgtggttttaaatccaacagaaaatctgatgccaacgacaaggaagcaggccagcttttggaagcagtttccgcaaacacaaaacgcatgcaggaaaaccattatcgtactgtaggcgaaatgttttataaagatgatttgttctcaaaatacaaacgcaataaaggcggcacctaccttactacagtgcatagagatatgattgctgccgaagccagaactattcttgaaaagcaatttgctctaggcaacgatatctgtactcaagattttatagacaaatatttatctattctcttaagccaaaggcaatttgatgaaggtcccggcgaaccaagtccctatgcaggcaaccagatagccaatatgatcggcaaatgtacctttgaaccgaatgaatatagagcagccaaagcaagctattcttttgaacgcttcaacttgttgcaaaaagttaatcatttgcgcttattgcttgaaggaaaatctatcgcgcttgataacgagcagcgtaaaaaaataattgctttagcacatgaaaaagcagatttgagatattctcatatccgtaaggcattaggcttagacgaaaaggtattgttcaataccattacctacaacgaagatgtaagcgtaatagaaaagaaaacaaaatttaattttctccaagcctatcatcaaatcaaaaaagtcttggcagaagatatgcagaaacttacaacagaacaactagacaatataggtcagatactttctacatataaaagcgacaacaaacgtacagaagaactttctgcactaggcttagaaaagaaaattattgatgcattacttggcattaacggcttatcaaaatttgcccatctttctctcaaagccttacgcaaaataaatccctatcttgaagaaggtaaaatttataacgaagcatgtgctgctgccggttatgattttaaaggtcatgccaacacacaaaaaactgagcttttacctgcatacaaggaagagatggacgatataaccagtcctgtagcaagacgagctattgctcaaagcatcaaggtcattaacgctattatcagagagcaaaaatgttctccggtttatattaacattgaattagcacgtgaaatgtccaaaggctttgacgaacgtactcagatttataaagcaaacaaagaaaaccaagccaaaaacgagcgtattatggaacgtatccgtacagaattccataagtcaaatccaagcggcatggatttaattaagctaaagctttgggaagaacaggatggcagaagcccctacagccagaaagcaataagtataaaccgcctttttgagcccggttatgtagatattgaccacatcgttccctatagcataagctttgatgacagcttcaaaaataaggttctcgttttttcggatgaaaaccgcgacaaaggcaatagacttcctattgcttatctccaaagtaaatttggcgcaaaagcagctgagaattttatgatttgggcacaaagcaatataaaagattataaaaaacgtcagaagctattgaaacgagaaattacggaagaagatattaataaatttaaagaacgtaatctgcaggatacaaaaaccatctctcggtttctttataattacattaatgattatctgctgttcgctccttcagatacaggcaagaaaaaacgagttacagccgtcaacggtactattaccgcttatctgcgaaaaagatggggcataaataaaatcagagcaaacggtgataaacatcacgctgtcgatgctgttgttattgcctgcacaactgataaaatgattaaagatctttctgctttttcccaataccacgaattggagtatacgcacacagagaaagaaagtcttttagtcaattctctaaccggagaaatcttaaaacgcttcccctacccatgggaagattttcgtcctgagctaatggcacgcttatccaataatcctgccgaagctttgcgcaatcttaatctgctattctatcacggcacagatttaagcaatataaagccaatcttcgtttcacgtatgcctcgtcacaaagttaccggcgcagcacacaaagcaactattaaaagcgcacgctgcctaactaatggtattgtaatctgcaagacaagcctgcaaaatctgaagcttgataaagaaggcgaaatcgccaactattacgcacctgaaagcgacaccattctgtacaatgctttaaaggaacgcttacgcgcctacgataacaagccggcaaaagcttttgccgaaccgttttacaagccaaaagcagacggtacaccgggtcctttggtaaaaaaggtcaaggtatacgaaaaatctaccttaaatgttcccgtacagcaaaacaccgctgttgccgataatgacagcatggtgcgtgtagatgtattccatgttaagggcgatggttattatcttgtgcctatttacatagcagatactctgaaaaaagagctgccaaacaaagctattgtagcttataagccttatgctgattggcctgtaatggatgacagtaactttattttttcgctatatcctaatgacttaataaaattcgaacacaaaaatggcgttaagtttgccaaagtaaataaagatagcacattaaatgatttttatagcaccaaatcagacattgtatattttaagggatgtaacattaatactggtgctattactataataaatcacgaaaacacctatgttgtatctagtcttggagtaaaaaaattaccttctcttgaaaaatatcaagctgatgtcctcggtaactataccaaagtaaaaaaggaagtacgcaagccttttcgttaagaggtgataaaaaatggcttatcgtaatctgatgattgccagcaatgcgcaattaaaaataaaaaacgagcagcttctgatcaaaacagatactactcacagtgttcctattgaggatattaattccgtactcgtcgaaaatcatcagagcacgataaccattgccaccttagccaaattagtgcaagacggcgtaacaatttttgtctgcgacgaaaagcatactccttgcgctattatgatgccttttgcgcaaaacgccagacaatacggtgttgttaaattgcaggaaagcctatctctgcctctacaaaaacagctctggcaacagattgtgaagtacaaaataaacaatcaggccatttgtctggacttcaataagcgggacaatgccgcacagcagcttcgttcattggcaaaaaaggtaaccagcggagatagcaataacacagaagccgttgctgccgctgtttatttcaaagctctatttggcccagactttatcagaagcaatgacgatgacctgcgtaacgcggccttaaattacggatatgctattatacgcggacatattgcgcgattgattgccagctatggctttttgcccatgaaaggcattcatcacaaaagcgaattaaacgcatataatttggcagatgatttcatagaaccattccgtccggtagttgacctgtttgtagcacaagaagcacaagcctttgaagcattaacaccacagcttaagcaaaagctctataatcttttgaacatggatatcaaaatagcacagcaaaatcattctgtgacatatgcagctgaaaaaatgattcaaagcttcagccgctgttgccaaaaaacatcaaaggaactgctgcttcctaccttagtagccttgaggcagcacacatatgaataaatttatgagaatgctggtattttttgatatccctgtaaaaactaaaagagaaagacgcattgctacagcgtttcgtaattttttgctaaaggacggctaccatatggtacaatattcggtttatgctcgtgtctgcaacggcatggatgcagtacaaaaacatcgcagcagattaaatacagctttaccggaaaacggctctgtccgtttattagtcataacagaaaagcaatatgaaactattgaaatattggttggcaactatcacgaagatgatacaccatttgtctgcgagcagctttcaattttctaaaaaactaattttactgctcatttaatgcttttttcattatttttctcaataccaaaaagcccttaaagccaagctttaagggctttttgcagtggtctattataccataccaagaaccaccggggaactacaacacgcaaggcattggtggttctgttaatggtattataccataccaagaaccaccggggaactacaacatcctttattcgctaaacgttctgctgttcattataccataccaagaaccaccggggaactacaacgtcgacgaagtgcgctcgcaccggctggaaattataccataccaagaaccaccggggaactacaactggaagtggtcgaagcctacgttagagctgattataccataccaagaaccaccggggaactacaactgttaagttcaacttaaagtgtatccgtccattataccataccaagaaccaccggggaactacaacatcattggtggtgctctttctaactctgctattataccataccaagaaccaccggggaactacaacaaggtaacgcaccggtgaaatagtcatatcattataccataccaagaaccaccggggaactacaacgacgtggtgaagcgtcgcagagaggttacaattataccataccaagaaccaccggggaactacaactatgcataaaacagtgttttacggaggcgcaattataccataccaagaaccaccggggaactacaacataggaaaagtggtgaacccgtttataagaattataccataccaagaaccaccggggaactacaacgcaagcggatttcttctcccacctgctcacattataccataccaagaaccaccggggaactacaactatgctccagacaagggatatcaaggacgaattataccataccaagaaccaccggggaactacaacctggctggctctattaatcatccgacgtttattataccataccaagaaccaccggggaactacaacattcaggaggattataaaatctatgaggaaattataccataccaagaaccaccggggaactacaacaagttccatatataaacacctcccagtgcaattataccataccaagaaccaccggggaactacaacagattgaacttgtccaccgagagccatctgattataccataccaagaaccaccggggaactacaacgtatttgtctcgctagttttggcagcggtgattataccataccaagaaccaccggggaactacaacgctggcaatccccaactatgacaatcatgtattataccataccaagaaccaccggggaactacaacgtgacacaagctcactcaatataataataaattataccataccaagaaccaccggggaactacaacccttgaagtgcgtgctgaaatcgaaggcgtattataccataccaagaaccaccggggaactacaacaacgctccgatgctccgtatggcctgctgaattataccataccaagaaccaccggggaactacaacttgctaatgttacgtttgatacgtgcgcctattataccataccaagaaccaccggggaactacaactatccataagtgcatagtatttttcagtgtattataccataccaagaaccaccggggaactacaacaatatcggccgttgaaactcgcagtcatcaattataccataccaagaaccaccggggaactacaacgttgtctaaaaggttagtaagctaactttaaattataccataccaagaaccaccggggaactacaacgtagccgatgcctcgtataccgtggcgctagattataccataccaagaaccaccgaggaactacaactacacactatgtgatattctcggtggaagcattataccatatgtatctggaaatattatatcatactcaaaaaatctcaacatatcaaaagaagctctcataaaaagtatatcttcttgacatttcccaaaaattcaagtaaacttaaaccatgttcttccaaaactgcaggtaacattacgcttccagctaccttacctacggacaagaaaataagcagtatatcctacagctcaactttaactgcagaagcttaagcaaggccatttatatttatctggtacattctaagagtagtacgaactgacgattttttaatcgccagggtactactctttttgttttttagcagcaaaaaactgcttatgtatttttttattcgcatgtgttaaaatgaaaggagagaaaccatgcaagacctgctaacaaaatttgccaacctgactatccaaagtgacttcatcttcaaaaaggttatgtcgcgcaagcgtatctgcaagcatctgctggaggagctgctacagattgagattgcggacatcaactacattgaggcagaaaaaactattgatcctaactacacgagccacggcatccgcctagatatcattgtagcagacgacaagaatacgcattataatctggagatgcaggtaaagaacaataagaatcccaatacgaacactcacgttctgcccaaacgctcgcgctattatcaggcgctgcttgattttgatttactgcaagcgggacagccttatgatttgctaccgccgacatttatcatcttcatctgtgtttttgatttctttgaaaaaggcaattacgtttatacatttaaaaagcgttgcctggaaaatttggagttggagcttcctgatgaagcaaccacgatgcttttaaacactaagggaacgcatggcgatatctctaaggatcttaaaagcttttatgattatgtcaataatcacattgtaactactgatttcaccaagcagattgacgatgaaatcagctatctgaagcttgatacgaaagtgaggcgagaatttatgcttatggaagcacgtttgttagatgaaagacgtgaaggcattgccgaaggcgaaaccaatgccaacattgctactgctaagcgcatgctggctaagggctgctattctctgcaggttattgcggagctgacaaatttgtctctcgctgatgtggaaaagctaaaggaagatatgcttgtgtcggataaggattaaaaaagtgaggcgagaatatatgcttaaggaagctcgtttgttagacgaacggcgtgaaggcattgctgaaggtattgccaaaggcaaagcaaatgaaaaactcgcaaccgcaaagcatcttttcagcatgggactttctgtacaggatatcgctaaggctacttctctcccgattgaacaagttgaagctttaaaagaagagtagcaatcacaaactaaaattaatgttataatcaaaggcgttctaccatacttaagtagaacgcctttactgtttttgctccttaacgacagtccttttcaaagaaaacctccgcactatcccgcaacaaataatttacaatctttttgcttgtagcacacaaatatgctgtgctataatatttagcgcaattttatagaatgaaagtaaggtgctttatatatatggaaaacaaaatcacaacgcgcgaatggctgccgttaatcggcatgaccgtttccgcctttatttttaacacatcggaatttatgcccataggccttttgtccgatatcgccgcagatttccgcatgacggaagcgcaggccggtatgctgattaccatttacgcctatgttgtaatgctcatgagcctgccgctgatgattgccgcttcccgctatccgctgcgcaagcttttgctggccaccatcagcctgttcgccatatcgcatgtagcctccgccttcgccaccggcttttggacgctgctgctttcgcgtatcggcgtagcctttgcccactccattttctggtcggtcgcttcgccgattgccgtgcgtcttgtaagcggtccctttaaggcactggctatgagcatgatagtcaccggcactgccatcgccattatcgtcggcctgcccttaggacgcatcatcggcctttacgtaggctggcgcatggcctttatgtgcatcgccgttttggccttcatcgtattggcctatatgttctttgttttccccaagctggaaaaaagcgaaccatttacgctgtcccaactgcctgtaatgctcaaaaatcctgtactcatcggcctctacatgatgtcctttttactgccgaccggctattacactgcctacagctatatcgagccttacctgaagcagattgcgctgatggatgatgcctggataactataacattggttattttcggtgcagccggacttttgggtagcgcagccttttccaaatggtatgataaatgccgctatcacttcttccgcatcaccgtacttggcgttgcagttgttttgctgctgctctaccccgtaagcatcaatcattatctgctggtgctgctctgcgcaatctggggcatcttcgttacggccttcaacgttgtaggccaggcagagcttttgcacacaactactatgagtacctccgctgtggctatgtcgatttactccggtatttataatcttggtatcggcagcggcagctatctgggcggacttatctgtacgcatgcttccatcgcttatatcggtctcggcggcggcgcgcttgtgctgctttcctttatttactgtgcctttttccttattcccgctatgcgtcgccagcaagaggaagctgaaaaataaatttaacagccgaaaaacgtataataaactgtatattaaatttcctcacttgctatatttcctgtttttatttataattaagagatacgcaagattacaaagaaggagattttctatcaatatgtctgcaagtacaactaaaactaagaaccaaccatcccgtaagcctgtattgctggattacttaaaagccttcactaaggataaattgatttttgcagcgcgtcagctctgcattacctacagcaagctcaaaaaggacgagctggcagaaaaaatctgcacagaaatgcaaaagccggaaattgcagcaaaacgctttgctattatgccggacgaaaatattcaggccttcgaagcagccctggagaaaaaatgcttccaccctacctacagtgaatatgcactgctgctgccctttatttctatgggatacattgtttcctatcccgatgactgctttgaagcagtaaaggaagcacgcactgtctacaaaaaaatcaacaccgcagatttccaggcacaccgccaacagctagcatggcttttggactgcatcaccgctatgtccagcctgcaccttatcctgccagtggaatttttctgcgaaatgtataatcaaaaagcaggctttgagcttactccggaaactctgccgcagctgctggccgaggttccgagcaactttaacccctgcgcaattaaagatggccgcatcctgctcaagaaaaatgacagcgatgatttctacaccagactggagcaaggtagaaagcccttcggcctgtacctgcctaccgtaaaggaaatcaccatgctttcccactacggttatatgcaatctactaccgcatatcaggatctgcatgacttcttcactcaagagctgaatgttgcggcactggatgcacattactggtgccagtacatctatgaatttgaaaactccaacaccgacggcaatacctccgagctgattcaaaagctgcaggccaacattcctgcctggaacaattacagtcacctcggcagactttccgtactgctgcagaacgcccgcaacagtgcaacccgtatgttctgcctcggcggccacactcccaacgaaactatcaagctgctgcgtgacgcacagcagacagctcagcaaaatacccgtgtaggtgccaaagcgaaaaaggtttatcctaacgacccctgtccctgcggcagcggcaaaaaatataaaaaatgctgcggtaaaaagcactgagcagcaggctatgctttagagcaagaaggaattacaatgaaaaaatttttagtcgttgattttgaatttactacatacgagcgccctgtcggccgtccacgcggcttcttttccgagattatcgaaatcggcgcggtaaagctagacggagaaccgctcactgactgcggacgcatccaaagctttgtccaaccgcatttttatcctaagcaggccaaggattctatggagttttgcatgataactgccaaggatatgcagcaggccattgaattccctgctatggtgcaggagctggcaaagctgtacgaaagcggcgaaacatactttgtagcctggggaaccgaggattacaaggtactgcagacaggctgcgagcgtcacaaaatcgaaaaccccgtaaagtacgaggactatcttgatctggcgctggcctaccgcctgtggaagggtgatgattacaccaccggtctgaaaaaggccaccgaggaacaggaggtcaacaccgccggcctgtggcacaccgcctttgacgatgccaacaacaccggcaagctgctgattgaaatgtttaaccgcggctggaagctggaggatttcttcgctgcccgcgaggcttacgaagcggagcgcgctgcccgtcaggcagaacgtgccaagcaccataacggttacagaagatggtaaaattttaaagcgcataaaaaaagctatcaccgggcttcgcccgctgatagcttttttgctttttatgctgtttatcttttagtaacggctgaaaatctcctgcacctcgttgcgctcctgcgtccgcaaaagtgccagctgcagcaaaaggcgtgccttttgcggattaaggttatccgcatacaaaaagccctgctcctgccaacgctccaggcctgcggcaacaataccgctgcctgtgcggctggaacgcacaaccacaacgccgcggctgacagcctccgccagcgccgcttccacagcctcatgaatgctgcccatgccactgccggcgtagataatgccacgcgcgcctgctgccaatgccgcatccacaaatacgcggtcctcaccgatatgcgtgtagatgatatctacgcgcggcaatgcagtaacaccgcttacgtcaaattcgctctgcagtgtgtgcggacgcatgctgcggtagtagtaatgcacctcgccaccgacgatgcagcccaaagcaccgccgttcggtgccttgaaggtcgccacgttcgccgtattcgtcttggtcacgtcacgcccgctgtagatttcatcgttcatcatcaccagcacgccctgacctgcgctttcagcgcacaccgcagtctttaccgcattaatgatattcagagggccgtccgcgcttacagccgtcgccgggcgcattgctcccacgactaccactggcttatcgctcttcactgtcaggttcaggaagaaggccgtttcttccatagtatcggtaccatgggtaataacaacgccgtcgacatcatcctgcgccagcagctcgttgcagcgctgcgccaagcgcagcaacaaagcatcggtaatgctgctgctgtcaatattacaaagctgctcaccgctaatctgcgccagctcgctcaaggcaggcacgctcgcgagcaaatcggcaacgctgtaggcaccggcagtatagcctgtcatctgggtgccagaggcagccttgccggcaatagtgccgccggttgctaaaattacaatgttcttcaactcagttttttccatcagcctgacctccatcagtccttctttcagcttcgcagccaatgcttattttaccaggcccttttcctgcagataatcggataccatgtctgccgcttcggcagtaatcttaatacatttagttctgtattccggtgtaccgaagctcaggcgattcagtgctctgcagcaggaagtgccgaaatgcttggtaaagcgctcatgaaactcatgcgtatatttatagacctctgtctgatgcttttcagacggatccaatctgccaacgatagaactgataaccaggcaggaaccgctcagcgcaccgcacacgcaaccactgcggccgataccgccgcccatgccggacaccatgcggattgccacatccggcaggcccaactctaagccgtcattgcacgccttaactacggattccacgcagttattgccatcgttatgatattgttctgctaaatcataaatttccttcatattctatgcctccaaaaaataacctaatcctgtttattttagcaagcatagaacaaaatagcaagaaaaatgctgtgaccgaaaagccacagcattgtatatcaaagaccgaacatagtctttgccagctttattccgctctctgttttaaaaatccgctccacagccttggcaatattctccttcggcgtaccgtcctcataaaaatttactataaaatcagcttccacaagcaactgataatcaagaccgtcaatgatattatacgtatggtgatgagcgacaagatagcagatgcgttcaattttttcaggggcatacccaaccttttgcaaaagtttgcgtgctaccgcaggtccttcctgctcctgaattttgcctgtgcagtgaccggcaccatacttggcctcgccgggtttaataccgcagtcatgcacaaaaccggccgcctccacaagctctgtcagctctgcatcagcagcctcgctctcagccagctgcttggccaggctggcaaccttgataaaatgctggcagcggcgtgcatctccggcaaaa

SEQ ID NO: 4060 - DNA, 23255 bp, synthetic construct
  source 1..23255: mol_type = other DNA
  misc_feature 1..23255: note = Synthetic
actcttttgtcgtcgttttgcccacgctgcctgtcacgcccgccagcagcgggctgtacagcgcgcggtagttcgcgcccagccggatcatcgcatccagcgcgtccggcacctgcacgcatttctccggcggcacgcccggcaccgggcgctgcaccacaacgcccgccgctccggcctccagcgcccggagcgcgtaatcgtggccgtccacgcgctcgccccggatgcacacgaacaggctccccggcccggcctcccggctgtccgtcaccaccgacgcgatctccgggtcccctgccagggcgcccagcccccgcagcagcacactcgacaaaacaggctgcatatacaatcctccatgctctgaatactcgccgggcggcgtcaggctttgtccagccctttgcgctccagccactcgcggacgatcctgtgttcgtccaggtaaagggtcaccccgtcgatgacctggtaatcctcgtggccctttccgcacagcgccagcacatcgcccgggcgcagcatatccagcgcccggttcacagccgtgcgccgctccacctccacgatgtacggcttgcccgaagcggccagcaccggctcggcgtcctttattatagcacaaggatcttccttgcggggattatccgacgttaaaactgcaaaatcagcatatttcaccacggcttcgctcatcagcgggcgtttttttgcatcgcgctcgcccgcgcagccatacagcaccaccagccgcccctccacgaaaggcgcaacgcccgcgagcaccttttcaatggcgtcgcccgtgtgggcatagtcgcacaggatggtgaacgcgccgtgatacagcacctcgcaccggccgcgcaccccgcgggaggccgaaagcgcggccgcggcgtcccgcgcggggatgcccagcgcaatggccgcggccgccgccgccagcgcgttgtgcaccgagtaatccccgggcatggggaaatcgatgcgctggatgaagccgcggcccaccatctcgaacttcacgcccgaggccgagagccggatgttgcgggcggtgtaatccgccgcgtcgtcgcccgcggaaaaggtgatgcgctccggcccccgcacctcgtccagcaggcggcggccgtagctgtcgtccaggttcaccaccatgtgcttcacctggctgaacaggcttttctttgcggcgaaatagttttcaaaggtcttgtgataatccagatgatcctgcgtcaggttcgtgaacacgcccacctcaaaggtaaggccccacagccgcagctggtccagcgcctggctgctggcttccattaccgcgaacgtgcagcccgccagcaccatgcggctgaacagcgcgttcaggtcccacggctcgggcgtggtatattttgcgggcacgtccatggcgtcgatctcggtgtggatggtgccaatgagccccgctttgcagcccgcctgctccagcgtctgcttgatgagcgtggtgacggtggtttttccgttggtgcccgtgacggccaccagccgcagcttttcggcgggacggccgaaaaaattctggcacagctgcgcgtatgccttgcggccggaggccacctgcacctcgccgggcaggcccagcggacgctcggtgacgatgcacacggcgcccgcctccagcgccttgcgcgcgtggtcgtgcccgtcggtcgtcatgcccctggcgcacacgaacaccgcgcccgggcaggcccggcgggaatcctgcgtgacgagcaacgcctcgccctgcggcagcgtgccggtatacggcacgccgctgaacaatacctgtaactccatggatgcactcccctttcgtgccgcgccgcgcggcccgccgccctgacgcggcctgttaatccagaacggtggtatcgtggaacgtcacctcgatgacggacccgatctccacctgcgtatcggccgcaatgtcctgctctgtgaccacgatggtcttgccgccgcccgtcacgcccttttcgctgacgttcaggcccagcgatttcagcgtggcgcacgccgcgtcgtagctcatatccgtcaggttcggcaccgtgacaaggtcgccgccgctctcggaacggtcctccgaatacaggatgatcgtggactggcgcggcacgatggtgcccgccgccgggtactgatacagaacggtatcgcctgtggcgcgctcgatgtccacattgaagccggattcgcgcagcttgccggcggcggcgttcacactggagcctgccacgttgggcaccgccgtctccacctttgccagctccgcctcggtgtactccttgggcacccccagcgtctggagcgcctcgtccagcacactttgcaccacgggcgcggccagacggccgccgtaataggttctctgttcgtcgtgcggcgtgtccagcatcaccagcaccgcgatctgcgggtcgtccccgggcgcgaagccccagtaagaggaataataggtctgctcttcgtccgacagcgcctgcttgcgctggctggtgccggatttgccgcccgccttatagccggccacatagcccgtcttgttgccgccggtcagcgtcttgccatccgcagccgtcatatttacgcttctcgtcagcagctcgcgcatggtggcgctggtctcggccgagagcacctgccgcttcacttccggctccacgttttcaatgatattcccgtccgcgtccagcacctgcttcaccacgtgaggctgtaccagatatccgccgttgatgacggcgcaggccgctgtgatcatctggatgggcgtggtggacgtcgtctgcccgaaggcggaggaggccagctccacgggccccattttttccagcgggacgtactgtgtcgttccctcgtcgtccatgtcgatgcccgttttctcgtagaagccgaaggcctgcatataattgcagaacgtctccgcccccatcatctgccccagcgtgacatagtaggggttgcacgagccgtccaggccgccgaagaagtccagcgtgccgtggttggtgtgcgcgcaccgcatggtgcggcccgccacggtgatggagcccttgcaggtgtacgaggtgttcaggttcgccgcgccggagtccagcgcggccgaagccgtgatgaccttgaacaccgagccggggtagtacaggtcggccaccgccttgttgcgccattgcgcccactgcgcggtatatttcgcgtccgcccgttcgttttcatccgcaatggccgcgatctgtgccgccagcgcctcgtccgcaatggtgtaagggtcctgcaggttgtagtccggcatcgtcgccatggccaggatcgcccccgtgttcacgtccatcacgatgcccaccgcgcggttttccacatgatactggtccacggcgttctgcaggtatttttccaatgtgctctggatgctggcgttcagcgtcagcaccaggccgttgccgtcctcggcgtcataggccgcctcgtaggtgccgtttggcaaatcgtacccccaggcgttcttcatgcccaccacgcgcccggcggtgcccttgagcgtatcgttgtaatagctctcgatgcccagcacgccgtcgccgtccgcgttcacaaagccgatgatcgtggaggccagcgtctggtagggataataacgcttcgcgtcctgcaccaggctgatgcccgcgacaggagtatcttttcccttgtccgatgcgttatactcggtgatccaggccgtgatggcgtccgccaccggcttttcgatctgccgcttgatgagctgatagttgctttcgctcttctgaagcttttccaaaatgctctgggcgtccagctccagcagctcggccagctttacggcaacgtcgttgatattcgtgccgcttttggccatgtcccggggcgaggcgaccaccgtccacaccttgttgctgcgggccagcaccttcatatcggaatcgtagataacgccgcggttgggcgtgatggtctcgtccgcaagctgctggttttcggcgcgggcggccagttcgtcgtgctgcacgatttgaagctggtacaggttgtatacaacggccccaaagcccaccagcacgaacagcgcggccagcacgatggcgcgcgtgcgcatgctgcgggacaccgcgctcttgggcgccttcgccgtgtcctgcggcggtacgttctttcgattgtgttccggctgttttttcatctctgcctcccgggatattgctgttgtcaaagggcgcgggccagccgcgcaaacggtcgaacgcgggcataaaaagaattatcaccggcttttcccgcacgaacggctcggcagaggaagaaaggcggtgataatacttattgattcagggcgtgaggtattccataaagctggccaccgtctgcgatatctcgcccgccaggcgggccagcccggtgtccgagcgctccaccttgttctcctgcccggtggtcacatacgtcacctgtgagcggtccatctttaccattttcagcgtattcgttgcatattcctgcaccgccgaaaggtttgttttcatttccatctcattggacaggtatgtatattcgctctgaaggtcggccagggtgtcctcctgcgtgcggatctgggccgaaagctcagtggactgcacctgcgagtacagcacgctgcaaaccagcgccagaaacacggaagcgaacgccacggctttgatccattttaaattgtaccgcgccagcccccgtttgggctttggctgcccggccacgcgcagacgcggcttttgctcccgcggagcgaaccgctcaaggtcgtacgctgcattcgtctgcatggcgtcctctctcctttcttttttgtttcaaggcaataccgtacaattctaagcgtcgaatcgcgccggccggttttttggcaggttaaacaaaaagcgcagcgaatactttgtgtattcgcgagcatttttgtgacggctgccgaaaaatctgcaagcgaggcgacgcttaaggcttcagccgtgaattgtgcggcgttgcctcaaatatgcaatgcggccccggccgcgttacagcttttccagtatgcgcagctttgcgctgcgcgcacggcggttttccgcctgttccccggcggctgcctcaacgggctttttggtaatgagctttgccctggccttcccgccgcatacgcacaccgggaactccggcgggcaggtgcaggccgtggcccactggcggaaccgctgcttgacgagcctgtcctccagggaatggaacgtgatgacgcacatgcgcccgcccggcttcagtgcggcaaacagcacgtccagcccttcactcagtgcgtccagctcaccgttcacggcgatgcgcagcgcctggaaggtgcggcgcgcggggtttttgtccttgcggcgcaccgcgggcggcagcgccgaggcgacggcctgcaccagctgcgccgtcgtttcaatgggtgcggcggcgcgggcgctttcgatcttcccggcgatctgccaggcatacggctcctcgccgtattccttgaggatacggcacaattccgcgcgggaggcggtgttcacaaggtcggcggccgtggggccgctctggctcatgcgcatgtccagcggcgcgtcgccctgatacgaaaagccgcgcgagacctcgtccagctggtgtgaggaaacccccaggtccagcagcacgccgtccagcccgtccacgccaagctgggccagcgccctgtccgcatagcggaaattgctctgcaccaccgtggcgggcagcccttctaggcgctgcgacgcggcggccacggcgtcggggtcctggtccagcgcgatgaggcggccggtcgtgaggcgcgcggcgatctcttttgaatgccctgccccgcccgcggtgccgtcgagataaatgccgtccggccggatggcaaggccgtcgatgcattccgcgaggaggacagggatgtgatgaaaactcatggcttaaaactccaattcttccatggcggcggcgatgggcccgctgcgcaggcgctcgttcatctgctgccaggcctgcgtgttccatatctcggcatggcggcccacgccgatgaccgtaacgtccttttccagcttcgcatgctggcgcaggttggcgggcagcaggatgcgcccctgcttgtccggcgacgcctccacggcggtggcgtacagaaagcgctgcacgtcacgggatttcaccatgcttttttcggacagaagtgcggaaatgcgctcccattcgtcttccggaaacgccaccagacagtcgtccagccagcgggtgacgatgaaagtgccgcccatggcctcgcggaatttgggcgggaaattgagcctccccttgtcgtcgatggcatagctgtactcgccgatcagcatttccagccaccaccttcccggcacatgggggagtttccccacttttacccactttgccccacttctgtttcaattataaggggcgtccctgtaaaaatcaaccctttttctgtgaaagttttcgacgccgaaccgtttttgaccgtgtcgaaacacgtctccgggcgtatcttctttgggaaccgcagcgtttctccgcacgggcgcgcgaaagacacgttggcgggcgttttgccggcgtgcaaacggacaaacgcaaaaaaggcgggcacctgaaaaggtgcccgccccagcctgtcgaaaaagataaaaaaacgtttgcccgcccggacgtgcgccgggcgggcaaatacctctaccgtgcaaaaggcaattttgtgtgcgaagtgcgcgaaattgcccttttgtgcgccggaaaggagaactgagggaaaccggaaaccggctgcgcagcacaaagcgtccggtgtccctcagaggttggcggcaaaaccgcctgggacgcttttataaaggccggctgcgctttcgcacaaagctcagtcctcgtactcttcgctttcctcgtaggattcggtgggcgtgtctgaataaaccagcccaaaaatctgtttgaggttgtccataaaagaagtgatcgaagtcgtcataaattccacacgccctttccgcatattttccgtcggctgcgcctttggcgccgccgtccacgcttcaatccgggacactgctttttgtgccctctgcttagtatacgacgcagagggccaaaatgttgcagttttcaggaaaaatatttgtaaatttaagggttttgcgggaaagaatggcaaactgtaatttttttgtaagaatccagcgaaaaagccgaataaatggaaacaaagtcaacctgttttttcgcgcttacttcaccaggcggcgggcgttttcggcaatgttctccgctgtcaggccgtagtctgcaaacagctccgcgggcgtgccggactggccgaaccggtcctcgatgcccacgcgcgcgaatttggcgccggacctgcccgccagcacctcggccaccgcggagcccagcccgccgatgacggaatgctcctcggccgtcacaacggcgccgcatttttcagccacggacaaaaccgcatcctcgtccagcggcttcaccgtgtgcatgttcaccacagtggcccggatgccctccgccgccagcaggtcggcggccttcagcgcctcggccaccatcaggcccatggcgatgatggccacgtcgccgccctcgcgcatgatgttcgcctttccgggcacaaagggcgtgctctcgtcggtgaagcattcgcacaccgggcgcgccacgcggatatacaccgggccttcgatggccgcggccgcgcgcacggccttgcgcacctcaacggcgtcgcagggcacgaagatcgtcatattgggcatcacgcgcatcagggcgatgtcctctatgctctggtggctgccgccgtcctcgcccacgcacagcccggaatgggaaaagccgaacttcacattggcgttcacatacgcgatggaattgcggatctgctcgtaagcgcggcccgcgccgaacagcgcgaacgtgctgatgaaggggatcagcccctcgtgggcaaagcccgcggccgcgcaggccatgttggcctcggcgatgccgaaatcaaaaaagcggtccggatacaccgcggaaaagcggttggtcatggtggcgttggaaaggtccgcgtccagcacgacgatcttgtcgttctccgcgcccagctcggccagcgcctcgccgtaggcaatacgcagggatttgctctcagccattgtcggatacccccagttctttcatcgcttgctcatactgctccttgttcggcgccttgccgtgccagcccacctggtcttccatgaaggacacgccgtggcccttgtgcgtttcgcagcagacaaacagcggcttgcccgggtgcggcgtgttcaccgcctccacaacggcgccgatgtcgtggccgtccacttttacgcacgcgaagccgaaagcctcgtatttggccatcatatcgcccacgcccatcacttcgtcattggtgccgtcgatctgcaggccgttgtggtccaacagaacggtaaggttgtccagcttatagtgggcggcggacatggcggcctcccacaccaggccctcctggctctcgccgtcgccggtgatgacgaacacgcggtggctctcgcctttatactttgcggcaagcgccatgccgccggcaatggaaacgccctggcccagcgagccggtgttggcgtccacacccggggtcttgcgcatatcgggatggccctgcagatggctgtggaacttgcgcagcgtccagaggtcctcccgcgggaaataccccttgtccgccagaacggcatacagcgcggggcaggcatggcccttactgagcacgaagcggtcccgttcttcccagcccgggttggaggggtccaccttcattatattataatagagcgccatcagcatctccacgcaagacagcgagccgcccggatggccggattttgcgagatacgtcatcttcacgatgtcggcccgcagttgctttgctttttcctgttgcaatgcaagttccattttctgatcctccgttctttattttcacacggttccgcctaacagtttatcgcgtcacggcccatgccgtcaagcggttgaagattttttcatgaaatatgctttttcttcaaaaatacccttgacaactccggtcgtcttattgtaaaatatccaagcagtgtcccgatcgtggcttacatttgcgcccatagctcaggtggatagagcaactgccttctaagcagtgggccaggggttcgagtccctttgggcgcaccaaatatggtgggtgtagttcagttggtagagcgccagattgtggttctggttgtcgtgggttcgagtcccatctcccaccccatttaaaatcaggaacggcaaattcgcatgcggatttgccgttctgcaataatgggccatcgccaagtggtaaggcacgggactttgactcccgcattccgctggttcgaatccagctggcccaaccagccaaaagaccgcaaagaatcaacattctttggcggtcttttggcattggcggctcatacgcccgctgcgccgccttcttgttttttcatccgccaaggcggcccggcttttccaaggcgcgccttggcgcgcggcgcctccttgtaagcacaaccggcaaaaaattttcgtgtcgaaggctttacattcctgcaaacaactgctatactgaaaccagttcttataccataccaagaactgttatggttgctatgataaggtcttagcaccgtaaagctctgacgcctcgctttcagcggggcgtcatcttttttgcccaaaaaacacggatatttttatccactgtgctgattgacggctgcaacgtaattcggtcatgatataaatggaagcgtaaaaagcaggaccttttcatgcaaatgctggtgaaagaggcggtaatatgaaaaacacattgtatggcatcgggctggacatcggcgtggcgtctgtcggctgggccgtcgtcggtttgaacggcacgggtgaacctgttggactgcaccgtctgggtgtacgcattttcgacaaggccgagcagcccaagacgggcgaaagccttgccgcgccgcggcgcatggcgcgcgggatgcgccgccgtctgcgccgcaaggcgctgcgccgtgcggacgtttacgccctgctggaacgcagcggcctttccacccgggaagcgctcgcgcaaatgtttgaagcgggcggcctggaagacatctatgcgctgcgcacgcgcgcgttggacgagcccgtcggcaaggccgaattttcgcgcattttgctgcaccttgcccagcgccgcgggtttaaaagcaaccgccgaaccgcctcggacggcgaggatgggcggcttctggccgctgtgaacgaaaaccgccggcgcatggcccagggcggctggcgcaccgtgggcgaaatgctgtaccggcacgaggctttcgcgcttcacaagcgcaataaggctgacgattacctttccaccgtcgggcgggatatggtggcagaggaggcctccatcctgttcgagcgccagcgtgcaatgggctgcagctgggccgcaccggagctgcaggcggaatatctttccattcttctgcgccagcgttcgtttgacgaggggccgggcggcaacagcccctacggaggcaaccaggtggaaaaaatggtgggccgctgcacattcgagccggatgagccgcgcgcggcaaaagccgcctattcgtttgaatatttttcgctgctgcaaaagctcaaccacatccgccttgcggaaaacggcgaaacgcgcccactgacgcagccgcagcggcaacagcttctctcgctggcgcacaaaaccccggacataagcctcgcccgcattcgcaaggagctggcgctcccggaaacggtgcaattcaacggcgtgcgctgccgggcaaacgaaacgcttgaagagagcgaaaaaaaggaaaagttcgcctgcctgcccgcataccacaaaatgcgcaaggcgctggacggcgttgtaaagggccgtatttcctccctgagcatttcccaacgcgacgcggccgccaccgcgctttccctttacaaaaacgaggatacgctgcgcgcaaagctgacggaggccggtttccaagcacccgagatcgacgcgctggcgggccttacgggcttttcaaaattcggccacctttcactgaaggcctgcagaaaattgatcccgcatctggagcaggggctgaactacgaccaggcctgcaccgccgccgggtacgatttcaagggccacggcgcaggtgagcgcgcctttacattgcctgccgccgccccggaaatggagcagatcacaagccctgtggtacgccgcgccgttgcgcagacgatcaaagtggtgaacggcatcatccgcgagatggacgcaagccccgcatgggtgcgcattgagcttgcgcgcgagctgagcaaaactttcggcgaacggcaggagatggaccgctccatgcgcgaaaacgccgcgcagaacgaacgcctgatgcaggagctgcgcgatacgttccacctgctctcccccaccgggcaggaccttgtgaaataccgcctctggaaagagcaggacggcgtgtgcgcctattcgctccggcggctggacgtggaacggctgtttgagccgggctatgtggacgtagaccacattgtaccgtacagcctcagctttgacgaccggcgcagcaacaaggtgctggtgctttcctccgaaaaccggcaaaagggcaaccgcctgccgctgcaatacctgcagggcaaacggcgcgaagactttatcgtctggacaaacagcagcgtgcgcgactaccgcaagcgccagaaccttttgcgcgaaaagctctccggggacgaagccgagggcttccggcagcgcaatctgcaggacacgcagcacatggcgcgctttttgtacaactacatttccgaccatcttgcatttgcgcagtccgaagcgcttggcaaaaagcgcgttttcgccgtcagcggtgcggtaacgtcgcatctgcgcaaacgctgggggctttcaaaggtgcgcgcggacggcgatttgcaccacgcgctggacgccgccgtcatcgcctgcacaacagacggcatgatccgccggatctccggctattacgggcacattgagggcgaatatcttcaggacgccgacggcgccggttcgcagcacgcccgcacaaaggagcgctttcccgcgccctggccgcgcttccgcgacgagctgatcgtacggctctccgagcagcccggcgaacatcttctggatatcaacccgggattttactgcgaatatggcacagagcatatccgcccggtgtttgtttcccgcatgccgcgccgcaaggtgaccggcccgggccacaaggaaaccatcaagggcgccgccgcggcagacgaaggcctcttgacggtgcgcaaggccctgacagagctgaaactggacaaagacggagaaatcaaagactactatatgccctccagcgatacgctgctgtacgaagcgatcaaggcgcagctgcgccgctttggcggcgacggcaaaaaggcctttgcggaaccgttttacaagccgaaagcggacggcacgcccggcccgctggtgcgcaaggtgaagacaaccgaaaaagccacgctcaccgtacctgtgcacggcggcgcggccagcaacgacacgatggtgcgcgtcgatgtgttccttgtacccggggacgggtattactgggtgccggtgtatgtagcggacacgctgaaaccggagttgcccaatcgggcggtagtgcaaggcaagccgtacagcgagtggaaagaaatgcgcgaggaggattttattttttcgctgtatccaaatgaccttgtgtatgtggagcataaaagcgggctgaagtttactttgcagaatgcggacagcacgctggagaaaacgcggacgcaaacgagcgcgtttgcatattttgtgagcggaagcatttctacagcttctatcaccatccgcacgcacgacaatgcctatggcatcccaagccttggcgtcaaaacactgaaaactttccacaaataccaggtagatgttctgggcaacgtcttccccgttcacaaggaaacgcggcagaaattccgctgattcatcaaaaaaggaggcggttatgtcctaccgatgcgtgatcgtcagcaaccccgcgcacatcagcacgcgcagcgaacagcttgttgtggaaacggacgagcgccacaccgtgcccatcgaggacatcagcgcgctgatgctggaaagccgccgcgccacgctttcggctgccgcgctttccgctttggcgcaaaacggaacggcggtgttcgtgtgcgacgaaaagcatttaccctgcggcgtgctgctgccatacgcgcagcacagccgccagcttgccgcggcacgcgcgcagctttcgctgacgctgcccgccaaaaaacgcttctggcagcagctcgtcaccgccaaaatcgacaaccaggcggaatgtctggcgctgtgcggcaaaacacaagaagcggcctttttgcattcccgcgcacgcgccgtgacaagcggcgataaggacaatctggaggcagccgccgccgcatattacttccccgccctgttcggcacaggctttacccgcagcgccgacgatggccgcaacgccgcgctcaattacggctatgccattctgcgcggctatgccgcccgctgcgccgcagtttacgggcttttgccgtgggaggggctgcaccattgcagccagctgaaccaatacaatctggcggacgaccttatggagccgttccgcccggttgtggatttgtatgtagccgccaatgtggacgaggcaagcacgctcgcccccgcgctcaagcacgcgctgttcgggctgatgaacgctgacactctttccggcggacagcaccacagcgtggcttacgccatggaacggctggtgcaaagcctgcgcaccggcatggaaaagggcggcgctttggcgctgccgaagctgctggcatggcagccccacggttatgagtagatttatgagaatgcttgtattttttgacctgcccgtccaaacaaaaaagcagcggcgggaagccactgcttttcgcaactttttgataaaggatgggtatcacatgcttcaatactcggtttacgcccgcgtatgcaacggcaacgatgccgtgacaaaacaccgggcgcggctgacagggcagctgccggccaatggcgctgtgcgcctgttggtggtaacggaaaagcagtatcagtcgattgagatattgctcggcccattttccccggcggacacaccctttgcatgtgaacagcttacgctgttttgatttttcggaaagaacaaaaagcgcttcaggccgcagcctgaagcgctttttgcaacagtctattataccataccaagaactgttagggaactacaacgacttcctgacaaagggaaagagcaggtgaattataccataccaagaactgttagggaactacaactgtgaatccatcttcactgttgtacagcttattataccataccaagaactgttagggaactacaacagtacagcccgtgcagcatcgtgtcccgccattataccataccaagaactgttagggaactacaacccattgcagcgccagcgcctcaccgcgacgattataccataccaagaactgttagggaactacaacaaatatgtaacggggtctattaactttcggattataccataccaagaactgttagggaactacaacctcccttgtccacaacctccggcggctcacattataccataccaagaactgttagggaactacaaccatggccacgggcgggggacgaatcaacccattataccataccaagaactgttagggaactacaacctttaccaaatttgcatgaacaagggctctattataccataccaagaactgttagggaactacaaccattggagcgaatgggtctagcaactgcccattataccataccaagaactgttagggaactacaactctgtcgcgcagcgcttaacggcaacatgaattataccataccaagaactgttagggaactacaacgcagcggctgcaaaccaaaacgagatatctattataccataccaagaactgttagggaactacaacattttgggggagagggaaggagtgacgttattataccataccaagaactgttagggaactacaacgatgaatggaggcgcagcaatggcgaccgaattataccataccaagaactgttagggaactacaacgtggaaattgaggacagtagcgaaagagaaattataccataccaagaactgttagggaactacaacctttttctttgatacaatccatgctgtcagattataccataccaagaactgttagggaactacaacaccggatgcatcagaagggcaaatcttcgtattataccataccaagaactgttagggaactacaacatgcagcggagggcaccctgagtggcatttattataccataccaagaactgttagggaactacaactagccagtatctgatgtgctttgagatgttattataccataccaagaactgttagggaactacaactttgtgggtaatatcgacctccaccattacattataccataccaggaactgccgggcgtctaccaaagaggcaaaactcctgcaacatacccctttttccaaaacaaaatgcgtgcccttttcagcgctttctctttattttttgcgtgcacatagccaaaacggccatactgctttgtatcgtttaaaatttcccaagcaataaacaccattgtttctcactccagccgcagcgctctgaatgttttctgtaatccaattctacccaaaacaagtgggaatttcaactacaaacaggctggaaaggaaaaaaatccggcaccgcccctcccggaactccggcagaacgctccgcagccccggttgttccgcgccgtcccgcaccggtgctgcccctgcgcagcgctccttttgaatttttcctctgcgcgccaggcccgatccattcataaaacggacagccccgccgtacacttcactggaagcctgcggcgggctgcaatattcttaaggcagcaccgcacaattcacggctgaagccttaagcgtcgcctcgcttgcagattttccggcaactgtcacaaaaatgctcgtgaatacacaaagtattcgctgcgctttttgtttaacctgccaaaaaaccggccggcgcgattcgactcttagaattgtgcggtattgccttaacattcattaccaattcgttacaatcgcggcaaaatgcaagaatccgtcttttgaaaacgtattgtgtttcaaacgggaaagagctgtttcccgcgcgccgcaggcgtgccggagcatttaacgatccaaggaaagaaggcagtggaatgaaagtgaagcttcccgaacgcagggccgtttccggccccggcaggcaggacggcggcgctccggccgcagcgcccctcaaaacgcgcggcggcaaaaccgcacggcgcgttctgcgccgcatcgggtatatcgcggcgtgctgctgctgcgtgggcgtgatgctggcgagcgtggccgccgtggtatttgcctcgtatctggcccgcctgtccggcacggacgccgacatgcccgacctctatgtgctgaagatggcggaaaactccatcgtatatgcagcggacccgaccggcggcgattggacggaatatgctgtttttaccggcgaaaacgaccgcgtctggacgccgctggagcagttccctcaaacgctgcgggacgctgtcgtcagtgtggaggaccgcaatttctggaaccagcgcttcggcatcaatccggggcgcatcctcggcgcggccgtcaacgagctgacgggccaccgcctgtacggcagccgccagggcgcgtccacactggaacagcagcttatcgaaaacctcaccggcgacagcgcccagagcatttccggcaaattcaaagagatctcacgcgccatcgtaatggccgggcgctactccaaggatatgatcctggaggcctacttaaacatcgcgccgctcacgggcacgctctccggcatgcaggccggcgcacagcagtatttcggcaaagacgcctcccagctcacgctggccgaatccgccacgctggcctccatcccccgcagcccggtggcgtacagcccttactccaacccggaaaagctgctggaacggcgcaactgggtgctggggctgatgctggaccagaagcgcatctcccaggccgactacgacgcggcggcggccgctccgctgggcgtgcgcagccgcgaggaggccgctgccgcctctcccaggggaaaggtgaactcttatttcaccgacgctgtgtttgaacggctggcggacgatatcatggaaaaagagaactgcgggcgtgccgccgccgtcacccgcatccgaaccgggggcctgcgcatcttttccaccgtggacctgcgcctgcagcgcatgctggaagctttcatggaaaacgacggcgaggacggctacttccccgctctgtggcggcaggaagaagccgacacaggcattcccttcgacagcgccgacgccgtttcctacggagacgacggcctgccgctgaacgcacagggcgagccggtgttcaggccggacgacacgcccgtctatgagcaggacggcacaacgccgctccgcggctccagcgcgcagcccaatgccgacggcgtccacacactggtattttacaggaacatccgcacgcaggccgccgtggccacgatggactatgaaggccacgtgctggcgcttgtgggcggcgtgggcgaaaaacggtacgacctttcgctgaaccgcgccgccgacgtgccccgtcagatcggctccacaatgaagcccctcgccgcgtatgcgctgggcattgaaaacggcgtcatcaactattcctccctcattgcggacgcgccgctctacacccagcaggaccaccgcatgctgaacacggaatactgccgcaagctgggcctttcgctggacccgggcgaccccgccaaccaggcgcgggacgacgtttggcgcgcctggcccaccaattacaacgggcccggcacagggcggcccgtagtggttgcggatgcgcttgcgcagtcgctgaataccgtcccggtgcagatcggcgacatgctgggcaagcgcaggctgttcgactttgcgtacggcagcctgggcctcacccatctggacccggagcgggacaacgatctcggccctttggtgctgggcagccagacccacggcgttacgcccgtgcagcttgccaacgcatattccgttttccgcgacggcgtgtaccgtcccgcgctctattacaccaaagtcacgctggcggacggctccacttatctggaccccgcgcaggacagctatgccgtgcaggccgtcagcccgcagacggcttatatcatgaaccggctgctgcggggcgtactcaccgcgccgggcggcaccgcccggggcatggcgcccgccggggagatggaagccgccgccaaaacgggcactacgacggattaccgcgacttcacctttgtgggcctgacgccttattacgtcacggcgggctggtggggctacgacgtcccggccgacctgtcccagcagggcgtgcgcacgggcaaaccgctgcagacgctctggcgggattatatgcagcaggcacaggaagggctgccctatctggaatttcccgtgccggagggcgtcgttgcacgccgctacgaccccgccaccggatgccttgtcccctcgggcggcgctgtgggatactacaccgaggacaacctgccgccggagcagcccgccctgccatagcgccgtgccccgcgccgtaagacagggcttgacttcgctctcttgttttagtataatgtcaactgctcactcggagggcagatcattcacttggaaatgatgggccggataaggtgacaggctgagacgcctgtttctttatccggcttttttgatgcccgcggggtgtgcaaaacaacgggagggatctcaatggatctgctgaaaggaaacgtcaggcaaatttatttcaggtatctgggcgcggcgttcggcagcgcgctcatcagctccatctacggcctggtggattcggccatggtggggcagtaccaggggccggagggcacggccgcgctggccatcgtcgcgccggtgtggaacatcatttacagcctggggctgctgacaggcatcggcggctcggttctgctaagcgcggcgcggggcgcgggcaggcagaaagaaggcaacgagtattttaccgccgcgctggcgggcaccgtgttctttgccgccgtgagctggctcgccatcgcatttttcgacgcgccgctgctgcgcctgttcggcgcgcgggacgcgctgctgccgctggcgcagcaatatctgctccccgtcaaattcgtggtgccgctgttcctgttcaaccagatgctggcggcgttcctgcgcaacgacggcgcgccggggcttgccacggcggcggtgctggcgggcggcgtcttcaatgtgttcggcgattacttttttgtgttcacctgtgacatgggcgtattcggcgcggggctggcaacagccatcggctcgggcatcaccttcacggtgatgctgtcccactttttctcccggcgctgcacgctgcggcccgtccgcttccgaaatgccggaaccaagctgcggcagattctgaccaccggcttttccacgttctttctcgacatcgccatgggcatcctgaccatgctgttcaaccgccagatcctgcagggactgggcacggacgcactggccgtgtacggtgtgatcgtgaacgtgagcaccatggtccagtgctgtgcatacagcgtgggccaggccgcccagcccatcctttcggccagcttcggcgcgggcaaatggggacgcatccgcgcggcgctgaagtacgcgctgatggccgccgcctttttcagcgcggtgtggacgctgctcgtctttctgtttcccaacgggttcatccgcattttcatgtcccccaccggggacatcctgcgcatcgcacccgccattctgcgcggctacggcgtttcgttcctgctgctgccgctcaatattttctccacctactatttccagtccctgatgaagccccgcgcctcgttttctgtttcggtcctgcgcgggctggtgctcagcggcgcgctgatttatgcgctgccggccctgctcgggcccggcgccgtctggttcgccatgcccgtcaccgaggccgtcaccgccgtgggcgtgtgcgtgctgatcgtccggtatacccgtccggcgccgcaaacgccggaataatgcacagcgcacaaggccccggcttctctgtcgggaagccggggctgtacagcttgtcgaaaaagcttcgcttttgcgccaagctgcctacgaacagggcctgcggccccgttcgccgcgcacggcggccttcggcggtcgcttcgctctgcacgcctcggcactagccctgcggggcgtcgcggggttattttaaatgaaaaaggggttctccacccctttttggcggcattcgccacgtggcttgcactttgctgcgcaaagatgcatggctttgccaccgccagctttttccccggacgcttcttttccttctttgcctttttcaatagtctgcacagccccggcttctcaatgaagaagccggggctgtattttctgttattcctattcctccgcgcgcccgccgggcttttccagcgccgccctgcgcgcggccagaatcacatcccgcgcccgggcggcaagcggggcttctgcggcgggcgtaccctccagcggataagggatgcccagcgcgtcgtacttggaacgccccatcgtgtgatagggcagcacgtccagcgcccggacgttgggcagcgacgcaagaagcgtccccagcgctttccagcctgcctcgctgtcggtaaggccgggcacaaccacatggcgtacccatacgggcacctctttttgcgccagatagcgggcaaacgcaaggatgttcccattttcacgtccggtcagccgcctgtgggcggccgggtcggtttgcttgatgtccagcagcaccaggtccgtaacggcgcacagcgcgtcgaactgcgccagcgccgccgcgtcctccgggcggaacgtggcgcccgaggtatccagacaggtgtggatgccccgccgctttgcctcccggaacagcgcggtcacaaattcgatctgcagcagcggctctccgcctgtgacggtgatgccgcctttccggtaaaacgcctcgttgcgggcgtattgcgccagcagctcctccaccgtggttggcacgccgccgcccgggtcccaggtgtccgggttgtggcagtacaggcagcgcatggggcatccctgcaaaaacaccacgaaccgcacgcccgggccgtccacggtgccgaagctctccaccgaatggacgcggcccgttacttgcgcggccatctcacatcgcctgatggaaggtgcgggaaatcacctcgtcctgctgggccttcgtcagcttgatgaagttcaccgcatagccggaaacgcgcacggtgagctgcggatacttttccggatgccgctgggcgtccagcagcgtttctttggtgaatacattcacgttcaggtggtgtccgccctcggccacatagccgtccagaaggctgacaaggttgtcgatctgtcgttcgtttgctttcataaacaggttcctttctctgctgtgccgctttttcagcggcttttatgcccggcccgtttggccggtgcgttgcaggcttcggccgcgccttcgccgcagcaggcggcgcagcgggtctcctgcgcttcgccctcgccgccggtgacgcgcatgcggcccccgccgtttttcataaaggcgtcgatgcgctccaccagcgcgtcgatctgccgttgcttttcctgttccgtcatggccgccgcctttctctcaatgctccgcctcaaactcgggcatttccacctccaggtcgcccgcgaagatccggtcgtccttgcccagcgcccccggtacgatggagaaggtattggaaatgccgtcctgcgcggcgctgaagggcagcttcgccacagaggccaggctggccaccgcgccgtgggtgtcgcggcggtgcatggggttcgcgcccggcgcgaagggctcgccctttttgcggccgtccggcgtggagcccgtgtttttgccgtacaccacgttggaggtgatggtcaggatcgaagtggtggggatgccgccgcggtaggtgtggttgcccttcacatagctcataaaggtatccaccagctccgatgcgatgccgtccacccggtcgtcgtcgttgccgtacttggggaagtcgccctccacctcgtaatccaccacgacgccgtccgcgtcgcggatgcatttcacccgggcgtacttgatggccgagagggaatccgccaccacggaaagccccgcgatgcccgtggcgaaccagcgggtcaccttcttgtcgtgcagcgccatctgcagcttttcgtagcagtatttatcgtgcatataatggatgatgttcagcgtgttcacatacacctgcgccagccacttcatcatgtcccggtacttttccatcacgtcgtcgtaatccagataatcccctgtgacgggacggtacctgggccccacctgctttttggtgatctcatccacaccgccgttgatggcatacagcaggcatttggccaggttggcgcgcgcaccgaagaactgcatctccttgcccacgcgcatggaggacacgcagcacgcgatggcgtaatcgtcgccatgggtcacgcgcatcaggtcgtcgttctcgtactgcacgctggacgattcgatggaggttttcgcacagaagcgcttaaagctttccggcagacgggtggaccacagcaccgtcaggttgggctccggcg

SEQ ID NO: 4061 - DNA, 21899 bp, synthetic construct
  source 1..21899: mol_type = other DNA
  misc_feature 1..21899: note = Synthetic
ccggttttgccggagtggcaaactttgcgcccgcgtgggcaatgaccttctctacgatgtctgtgtcgttggttctgctgaaggagacttcatagtctccgccggtgacggttacggtgccgcgaattgaatgaccgttcaggtcgatacccgtgtaccttgtgccgtcaacggtgtagtcgccggaaacctccgccagaagccggagggtgtaactgccgtctctatccgcgttaagggcgtcctgcagatcggcaaattgccgccacgggttgccctcaacactttgcaaggccgtttgggccactgcgggggcgccgcagtcggggcagctgccggcgtcgtacgcgaagccgcttgtgccgccgtggtcacaggtcaggccgcagctgcacgcccactcactctggccgctcaccggctggaagctgtgccgatgcgccgcgacggtgatgacggccttcgcctgcacgaaagcattattcacctcatggacataaaaagtgtactcaccggcaggtgtttccgcactgatcttaacagagatcgtgtaggtgccgccgccattgtccgtctgggtgacggtaaacttgtcgtctgagttgttctgaacatacgccttcaggtcgtccgtgccggtataggtcacggtaaaggtgaccggcgcaccgccagcggtgccatttgcggtctcccgatccagcgtcagcgtgggcggctcaggtgcgggctccccgcccacctgccggctgctgagctttttggcggctgcaccgttcaccgtataggtatcgcccgcaaacacggcctcggcggcggtatcgccgtccgcgtcagcggcaccgtaaaactttttgcccgccggtcctgcggcggcagtcagttcgacagccttatccgtaccggtgatggtcaggtccgtaccgtcgaaatacagagtactctttacgccgaccttcgcaccgctgatgctggcggagccgttatttaccgtcaggccgccgtcaatggccgcgtcagcgccggcaggcgcggtcatggtgaaggtgccgtcagctgcatccaccgtgacctggccgacaacggtgccgttggtcagggtcaggctgtcatcggcgtcgatatcaccggtgatgcagaagccggccatgtcgatggtcgtggccgcatagaccgtgaggtcctcagcgacatcgctgagcagcgtgatctcgaccggctccatctcatccagtatttcctgcagcgtggcgtacctcgtgccgtcgacttcggccacggggccgctgttccgcgcggcggcgcgtctgcgggcggcggtgtcctcgccgttggcgtagacatcggcggcattcccgccgctgtccgccgtgctctgcgccgcgggcagcatctcagcccacgcggcggcgggcacgatgctgaacgccatcacaaggcacatcaaaaagctgacgatgcgttttttcatgctctctttcctccgttcatctgccgttttctctcgtcctgcctgtgtatctctatcttttttattttactgctccggcggcgtttgttaatcgttccgaagtatgacccggcattttccgctccggaacggcggcttgctttttccgcccgtctgccgtatactgggtgggaaacaatgtgccggggacgcggcgtccccgcccgcggaaaggagctgacgagcttgcaattctggaaaatgaacggcgccggcaatgactttgtgatcgtggacaaccgccggagcatgctgcccgatgaggcgtggccggagatcgcccgcaccctgtgtgagcggcacctgtccatcggtgcggacggtctgatggtggtggacacgtccgacagggcggactaccggatgcgctactacaactccgacgggtcgctgggggagatgtgcggcaacggcgcgcgctgcatctgccgctacggctatgagaacgggctggcaggcgaggtgcagaccgtggagaccaccgccgggctggtcaccggctggcggctggatcagcggaactaccgcatccggctgaacgatccctccgtcatccggctggacgccgccgcccacatcggcggcacagtctatgccgcgccctatgtggagctgggggatcccggcctgccccacgtcgccgtggaggtgccggggctggcggactgtgaccggcagacgctgcgggagctggggcggcggctgcggtactatgagggctatcccaagggggccaacgtgaatttctacgaggtcgtcggcccggaccatgtgcgggagctgacctacgagcggggcgtggaggacttcacctacgcctgcggcaccggcaccggctccgtggtcacggtgctgacgctgctgggccgggtgtccggccagaacgtgcgggtggatatgcccggcggacaactgacggtggacgtggtgtgcgacggcccgcgggtgaccgatctgtacctcaccggccccaccaacatcgtgtgcaggggcgaggccaccgacgaggactgccgcttctgcgcggcggacggaactgaataaaaaaggagcggcagtccggctggactgctgctcctttttgtgtatgcccgtcacacatcccgggcacacaggtctgccggcgtctcccggcggacggccacatagctctcgccgtcacggagcatcaccaccggcggcatgggcagccggttgtagtgggaggccatggaaaagttgtaggctcctgtggtgcataccgccacgatgtcgccgcgtcccacagaggccggcagcatcacatgctcctggatgatgtcgccgctttcgcagcagcggcccaccacagaggcctccagctcccgcggctccgtcatcttgtcggcgggcaggcaggtgtagccggcgcggtacagggcgaatcgggggttatccgccatgccgccgtctacggatacatagttcttatagccggggatcttcttcaccgtgccgcaggtgtacagcgtcatgcctgccgccgccacgatgctgcggcccggctccatgtggatctccggcatccggatatccagccgggcacaggcggctctgacagccgccgccacgcggcccaccgtatcgtcgatgtccagctccgggtcgccggccagatagcggacgccgtagccgccgcccaggtccagctgccgcgccgtatagccgtgcttatcccgcatggacgcaatgaacgtcagcatgatctccgccgcgcgctcaaagacctccgcatcgaatatctgggagccgatgtggcagtggaagcccaccagcgccacatggggctgagccagcgtatagcaggtgatctcctccgcctgccccgtttcgatggcgctgccgaacttgctgtccacccggccggtggacaccgcctcgaaggtgtgggggtcgatgcccggtgacaggcgcagcagcaccttctgccgcaggccgcggcgggcggcctccgcctcgatggcgcgtatctcctcggcgttgtccgccacgaagtaccccacgcggctgtccatgccgtaggcaatgtcggcgtccgttttgttgttgccgtggaagtaggcgtcccgcaggtcgtaccccgcctgaagcgcggtgtatatctcgccggaggacaccacgtcgatgcccatgccctcctcgcgcatgatctcgtacagccgcttgaagcagcaggcttttcccgcgtacagcgggcggccgtcggggccgaagtgcctgcggaaggccgcctgatacagccggcaccggcggcagatgtccgcctcatccatcaggtacagcggcgtaccgtaccgggccgccagcgccgccgtgtcctgcccggcaaagtacaggtgcccgttgtccccgacggtgatgttattgtgcagcatttctgccataggcgtttcctcctttgtaagaggacagctctgccagcgtcatgccgtacttgctctccagcacgcggcagaacttctctttgtccataaagtcgcggtattggcggacgaaccgctggtacagcaccacgcggtcccggctgccccgcaggaacatgaccacgcccagcaccaggcagatgcccgccgcacaggcgcccaccgggagggtccgccacgccagataggccgtcagggccgaggagagcagcaggatgaccagcagcggtatccagcgcccggtcagcagacgccggtgatcctgccgggagtacacaccgccgtccgccatggcgccggaaaaggggatgtagaccgtgaacatctccagcgccttgacgatgctgtacgccacgccgaaataggcggtcaggcacagaagaatgatccgcgttgccgcaagcagtcccgtacccgtcatgtccgcgccctcagacccacggcctgcatgccctgctcccggtggcgctcccacatggtgcggcgggggtaggacaccacaccgttgttgtcccacgggtcgttgcagatgtagtgctcctcatcgtagcccaccagcagcaggcagtgctcgttggacacccacatgaacggctgaccggaggggatcagccggtaccaggggccattcacggtggggcgcatgttgatgctgcaccacagcagcaccggcatgccgttgtcgatgtaccggcggcacagctcgtcgatctccgtgctggtctcgtcgatcacgtcataccgctcgcctgctacgcggcacaacgccttgaccatcaccggtgcgtagcagcccagcgcctccgggtcccgtgggtcgcccacaaagcactggcgcgggtcggagccccacagctcatcgccgcgtttttcaaaaacgccgcgctccagcacatgatccagaaagtcgggaatggtcaccggatagcccagatagcgcagcagcatcaccgccgaaacgctctcgcagccggtgggcgcctgtcccgactggtccagatagggaacatcgatctttttcatacgcggctccttctgtcagatcttatccgccggctccgcggcgctggcggcgtattttttcaccgtcaggcggttgagcaccaggatctccgcgatcaccagcgccacgccgatggccagggggatccacggcgtcttcatgatcgccgccagaatgtagcagatcacgcagtcggcgctgaccgtcagaccgtagtacatctgggtcttgacgtgattgatgtggttgcactgggcgccggtggagctcatgatggtggtgtcggagatgggggagcagtggtcgcccatgatggcgccggcgcagatggaggcgatcacgatgaccagcatgctgttggaggtggtatccgcggcgaagatgggcacggccacggggatgaggatgcccatggtgccccagctggtgccggtggcgaacgccaggataccgcccatcaggaacatgaacatggggaacagcgtggtcagcgtctcacggcccgcaaagatgccctgcacgaaggaggagacatccagcatgcccacaaaggccttcaggccccaggcgaaggtcagcaccagcagcgcggggatcatcagcttgaagccctccacatagctgtccacatagcccttgaaatccacgatcttccgggggatgaacatgatggccatcagcagaagcgtcagcacgcagccgaagctcagtgccagcggcgcatcggtattggcgaatatattggtgagggtcaggggaaggtcgccctccaggcaactgcggcggcccaggatgaccatgccccacaccacggtgccgatgaggcagaacgtgggcagcagcagatcccagaccgtgcccttggtgctggtctcagccgccacctcggcctgcacggcggcgtagtcgtcgccggtggtgaacagatcgcccttggcggcgttggcctcgtgctcgtacatggggccgtaatccttggccatcagggccgtgccgaacaccatcaccagcgtcagcagcgcgtagaagttataggggatcgcctgcacgaacagcgtgaagccgttgaccgtggtggtgtactcatccgggatgtaggacgccacggcggcggcccaggagctgatgggcgcgatgatgcagatgggtgcggcggtggcgtcaatcatgtaggccagcttggcgcgggacaccttgaaccggtcggtaatgggcatcatgatggtgcccaccgtcaggcagttgaagtagtcatccaaaaagatcaggcagcccagcacggaggtcatcaccagcgcgcttttcttggacttgatccagcgggcggcccagtcgccgaaggcgcgggagccgccggagcgggcaaacaggatcacgatggtgcccagcagcacatcgaagaagaatatcttcaggtcgatgttgtccatcagcgtcaggaacagtgtttcaaacacgccccaggggtcgaaattcgtcaccagcatggcgcccacaaggcagcccgcaaacagggaggaatagacctccttcgtcaaaaacgccagcacgatggccaccagcggcggcagcagcgcccaggcggtgccggcgaaatgcggcgcgccgtcggcgccgtcaccggcggcaagcgcaaaggtgcccaacagaaagaccgctgccagcatcacaagcgcgagcaccagcgtccgtctgaaaggccgttttctgcctaaagacttcctcataatgcgtacctctctttcacatacacaagtcgttttgcaggcgcggactgcccacacccgatccatatgcggcagcaggtatcctgcatgccgcatacccggccgccgctcctgccctgcattgtaggtatctatgctcagtttgtcaaattattgtcattgtccggaaaaccggacgcgcattccggatatccggactgtttttcccttcgccgggacacggcaccatcccggcggatgccgtgctccttcagcttttcatagaacacggtgcgggacagaccaagaagctgcatggcctgctgccggtcgccgccgcattgggccagcgtctgctggaggatgcggcgctccgcctgcttgagctgctggcgcagggtcagcgtcaccggcgccgcgtccaggtggatgtgctccggatagatgatgtccgtatcgcagagcaccacagcgctctccagcaccttctccatctcccggatgttgccgggccagtcgtaattcatcagcttgctgaacgcctcgccggacaggaaccgctccggcaggccgtagcgctgccggatcttttcgataaggcttcccgcaaggagatagatatcctccttgtgctcccgcagtggcggcagctccagggaaaacgcggacaggcggtagtagagatcctgccggaaccgtccctgctccgccgccgtgcgcaggtcgccgtccgcagccgccagcagccgcacatccggcgcctcctccggcacggacaggcagcgcaggagccggtcctgcgcccccggcgacagtctgtccacgccgtccagaaacagtgttccgccgttggctgccgccagcaggccgccgctgccgaacagcgcctcctccagcgcggcggggagcatggcggagcagtccgccttcacaaacgggccgcgccggggctgcacgcgggcgatatcctgagccagagcggctctgcccgtgcccggctcaccggacagcaggatgctgcagtccatctggctcagccggtacgcgcggcggcgcagcgtccgcatgacagcggaatcccctgccgcggagcgcatctccccgctgacatccgatgcggcgatgcgctccgtctcccggtatttccgctccgccgccgcgatggcggtgttgcgctcaatgatggaggtcttcaggtcctccacattgcggaatttgacgatggcaccggaaatgcgcccatcgccgtcgcgcataggcaggatggacgcggacagcgccgagccgttgatctcatagggcatatccacaaagctgggcacctcccccgtcagcaccttctgtaggtgctcctcaaacagcgcgccctcaaaaaaatcccggaagtgataaccggcaacgtggatctcctgctccgggcttttggcgatataaccgccgccacgcagcaggctgccgatcccctcgcggcgggcggagtagcccttttcctcccagaacttcacctgccgggtgtagcggtccagtaccaccagctgtccgatgcacatgaaatagccgatggtgtagacattctcccgcaccgtcaccgacacctgtgcgctgtcgatctggacggagatggggaccccctgaaacgtcacgtccagccgcagctcatccgcgctgccgctgtgcaggtacttgcagaccggcttgacgccttcgccgccgaatacccccaccgcggcgatcatgtcgccggggcggatccggcggtcacggatgcagatggtctccagctccgccgctgtcagggctccgtcgtcctgtcccatggcggtggtggcgaggatcaccatatcgccccgcagcagccgccccgccggatgggcatggcggctgtggttgaacaggccgaagctctcctttgcctgccggttgatatgcgtcacgatgccctgccggtccatagtgaacatggcgtgagacgagcagtccatcacgctttgcaggatatccatgtttccaccgccctccgctatgtttttatatatcttagcggagatcgtccgcctttacaatgccggcgccgtcaagcatccgttacagattcgcggcacggcatggaagccgcccgcggagcgtgggaaacggcggggatatattctcgccgcgcgggtcataggatagggcaaaaccggaaaggggcggatacaacatgaaaaagatcagggtgttcctgctgcggcggtggtatacggtgggcggcgcggcgctggtgctggcggcggccattttctatgtggtgaactatcccgtctccgtcagcgcggcggccagcacgcggcagctgcctatttactcggtggagcgcacgcagaaggtgtgcgccatcagctttgacgccgcgtggggcaacgaggatacacagacgctcattgacattctggagaagttccatgtaaagaccacattttttgtggtaggcgactgggcggaaaaatacccggagtcggtgaaggcgctgcacgacgcggggcacgaggtcatgagccactccaaccaccacgaccactacaacagtctgtccgccgaccagatcgtggcggacgtcaccgccagcaacgaacggatcagcgccgtgaccggcgtgacgcccacgctgatccgctgcccctacggcgagtacgacgaccatgtcatcgccgccatccgttccatgggcatggagcctatccagtgggatgtggactccctggactggaaggattatgacgccgacaccatctgccagcgggtgaccagcagagtgcagcaggggagcatcgtcctgttccacaacgccgcgctgcacacgccggaggccctgcccgccatcctcacctgtctcatcaacgacggctacaccgtggtgcccatcagccagcttatcctcccccagccctacaccatcgaccacacagggcgtcagtttgcggcggagacgacggccgtagaataagcagaaaaatgtacaaatctcttgcaatttgtcaaaaatcgtgctatactaatcatagttctttataccataccaagaactatgcaggttactatgataaggtagtataccgcagagctctaacgccccgcgtaagcggggcgttatctctatccgtacttctgaggagggcatgctatgtatccatatgcgatcggctttgacatcggcatcacatccgtgggttgggcagtcgttgctttggacgtagaggacaagcctttcggcatcatcaacatgggctcccgcatttttgatgccgccgagcagcccaagacgggcgcctctcttgcggcaccgcggcgggaggcctgaagtatgcgccgccgtctgcgccgccaccggcaccggctggaacgcattcgtcacctccttgtggcggaaaacgtcatttcgcaagcggagctggacacgctctttgagggaaggctggaggatatttacgccctgcgtgtcagggcgttggacgccgcagtatcaatggcccgcgactttgcagagcgcagcaagatgaaaaaggacatggacgccaatcgtgcccgcaacgagaagatcatggagcgcatccgaacggaatacggcaaagagacccccacgggacaggatctggtgaagttcaagctgtgggaggagcagcacggcgagtgtgcttattcccaaaagcacctctccatcgagcacctctttgacccggactacgccgaggtggatcatatcgttccgtacagcatttcctttgatgacagctatatgaacaaggtgctggtacttgcggaagaaaaccgcaacaaaggcaaccgcctcccgctgcaatatctgcagggcagacgccgggaggatttcatcgtctgggtggagaacagcatccatgatcccagaaaaaagcggcgtctcctgaaggaaacgatcacctctgaggatgagaaaaagttcagggagcgcaacctgcaggacacgaaaaccatgtctcgctttcttctgaactacatcagcgatcatctggagttttccgcctttgccacggggcgcaaaaagcacgtcactgctgtcaacggtaccatcacatcctacatgcgcaagcgctggggcatcaccaagatacgggaaaacggcgatctgcaccacgcggtagatgcgcttgtcgtcgcctgtacaacagacgtgatgatccagcagttgagccgctattccgcactgcgggaatgtgcatatgtacaaacggagaccggcagcgttgcggtttccatgcacaccggcgaggtcctgaaacatttcccctatccctggccggagtttcgccgggagctggaagcccgattgggagacgatccccgccgcgccgtcatttcgcagcggttccctgtatatgtaaacggtgatattcccgtgcgaaagctttttgtatcccgcatgccccgccgcaaggtgacgggtgctgcacacaaggagaccgtcaagagtccgaaagcgctgaatgatggcatcgtcgttgtaaagcgtgccctgaccgacctgaagctcgaccccaagaccggggagatatccaactactacatgccgcagagcgaccgcctgctctatgaggcactgaaggaggaactgaaaaagcacggcggtgatgggtccaaggcttttgccgcgcctttccataagcccaaaagcgacggtacgcccgggcctgtcgtcaacaaggtcaaggtatgcgagcctacgacgctgaatgttcctgttctgggcggcgccggcgtggcggataacgacagcatggtgcgcatcgatgtgttccatgtagaaaacgacggctacttctttgtgcccatctacattgccgatacgctgaaagcggagctgcccaacaaggcatgcgtggcacacaagcccttcgaacagtggaaggagatgtccgacgagaactttgtcttttctctgtatccaaatgatctgttgcgcgcgacccataaaaccaggttgaagctggcaaaagcgcaggaagatagcacacttcccgatacctatgaaaccaaacaggaaatgctgtactacatcagcgcagatattgctgcagcatctatcacctgccgcaaccacgacaacagctaccggatcagaggcatgggcatcaagacgctggaaaatctggagaaattcaccgtggatgtgctgggcgaataccacaaggtcgaaaaggaaccgcgcatggcatttagcagaaagtgaggtttgggtatggcttttcggaacattatcgttgaaaatcccgctgcgctctccctgcgaaaggaacagctcatcatccgtaccgacaatgaccactctgtggccattgaggatatttccgcgcttctgttggaaagccgtcaatccacgatcacagcagccgcactgtcccgtctggggcagtgcggctgtgccgttttcgtctgtgatgaaaagcacctgccctgcgcagttctggcaccgtatcagcagcacagccgcggactgtctgtcctgcgcatgcagatgaacatgaccgagccgatgaaaaagcgcctgtggcagagtatcgtcaaggccaagatccaaaaccaggccatctgcctgcggctgacggggcacaccagtgaagcagatacgctgctcgccatggccgggcatgtgcgttccggcgacagcgggaatgtggaggctgccgccgcacagctttactttccggcactgttcgggcagggttttacccgcggagaggataacggcatcaacgcggggctgaactacggctatgcgatcctgcggggctgcatcgcgcggtatctggccgtatacggttttctgccgccgctgggcctgcaccaccgcagcacactgaacgctttcaatctggcggacgatctgatcgaaccgttccgccccgtggtggaccttttggtgtcgcgcagcatgagtgaggcggatgaactgaccgctccgcaaaagcgtctcctattcaactgcctgaatctggacattctttcgggcacacagcatcacagcgtatcctacgccgtagagcgggcggtgcaaagcctgggccgtgccgcagaacggtccgacacggaactgatactgccgacactgctggagcctgcacagcaccgctatgaataagtttatgcggatattggtattctttgacttgccggtcaaaacaaaggcccagcggcgagaggccacacggtttcggaactttctgctgacggatggatatcatatgctccagtactccgtttatgcccgcgtctgcaatgggatggacgctgtggagaagcatcgtcagcgtgttaagcagaatctgccggacaacggtgcgatccgcctgatggtcattacggaaaagcagtacgaggccattgacgtgcttttgggaaaattaacagctgccgatgagccatttcaatgtgaacagctctccattttttaaagaaaaaatccgctcaaggcgttgccttgagcggatttttcggtagtctattataccataccaagaactaccagggaactacaacgggacctttccacaaaaatctactgcgtggattataccataccaagaactaccagggaactacaacgcgtgtgatagacacgtcctgcccgttgacattataccataccaagaactaccagggaactacaacgtatccatatctgctataatacaggtcataattataccataccaagaactaccagggaactacaacactgtattttaatagtgcaacctatgactggattataccataccaagaactaccagggaactacaacctgcggatggtgtcatagacctccgccgctattataccatagccatgcgcactttggaacgataacatttctgagatgctcattgacaattcccttatccacgcctatactgtcggtcggatttatgagatctcgaaccgcaatacacaggagatgtacgataaatggactactatcttttgaccgatctggctgccaccatgggctaccatctggctatgtccggcgcggagacgttccgtgtggaggacaccatccaccgcattctgcgggcttacggcgtggaatgcgaggtgttcgccattcccaactgcgtatccgtcagtctggaggcggccaacggcaagccgctgatgctcatgcggcgcatcggcttccacggaaacgatctggaaaagctggaaaagctgaacgagctgagccgccgcatctgcgcggagaagccggaggtagacgaggcgatggcatggctgcaccagacactggcggcctgccggacataccgcacaggcatattctatctgggcaacatgctggtgggactgggcttctgcctggtgttcggcggcacgctgcgggactgtctgtgggcgggggtgatgggactgatcatcggtctggtgacgcgcttcatggaccggcaggaggccaacccgttcttcagcaccatactggcctcgtgcctgatggcactgccggcctatgccgccgcgggactgggatggctgaacaaccccgacgcggccatcatcggcgcgctgatgatcctggtgccggggctgctcatcaccaattccatgcgggacatcatctacggtgacaccaattccggcattttccgcatcgtgcaggtggtgctgagcgcgctggccatcgcgctgggcacggcggcggcatggcacctgactgccgggctgtacggtctgaccggctccgccgccgtgagctggccggcgtgggcgcaggccattgcggtgttcgtgggctgctgcggcttctgcgttctgttcaacgtgcacggacagggcatggtgctgtgcgtggccggcggtgtggccgcgtggatgctctatctgctgttcggcaggctggggtgcgatgtgtacgcggccaacctgtttgccgccgtgttcgcggcgctgtacgccgaggtgatggcgcgggtgcgcaagtgcccggccatgccctatcttgtcatcgccacactgcccatgctgcccggtgcgggggtatactacaccatgagcatggggctggagggcgagatgatggacgccgtaggcaagggactggagacggtgggcatcgccggttctctggcggtgggcatcctgctggtatccacgctgttccgtctggtgaaccggcggagagcgtgaccccggaatgcccgtatctgctctcacacaaaaagcaacagcagccgaccctccggtgttgcccggagggtcggctgctattgtaaggagaggaaaaaacatgggggatggggagggccttgaggggagcggccctccccttttatctgctgcatgcggcgcagaggggaacgcgcttacacatgcttcagtgcctggtccagatcggcgatgatatcgtcggggtcctccagccccacggacatgcggatcatgccgtcggtaatgccggcggcctcccgcacctcccgggggatcatggtatgggtcatggcggcggcctgctccaccagcgtctccgtgtcacccagtgataccgccagcgtacacagcttcagactgttgatgaaccgcttgccggcctccagcccgcccttcacgtcaaaggacagcataccgctgccgcccttcatctggcggcgggcgatgtcatactggggattgctctccagcatgggatagcggacgatctcgatgcggggatcggcctccaaccagcgggccaccttcagggcgctctcgttatactgccgcatccggacgcccagcgtcttgaggccccggcacaccagaaacgcggtgaacggtgcgatgaccgcgccgaagtgcatcagcgtgcccagccggcaacggcgcaggaactcggtatcgttggacaccaccgcgccgcccaggatatcgccgtggccgcccatgtacttggtgaggctgtggatgaccacatccgcgcccagctccagcggccgggtgttgtagggcgtggcgaaggtgttgtccacgaacaccttgaccccgtgacggtgggcgatctccgccacggcggcgatgtccaccagcaccatagtggggttggcgggagactccacatagatgaccttggtgttgggcttgatcagcggcttcagctggctgagatccgccgcgtcgaacacatcgtgctggatgccgaaccggggcaaccagtcgctggtgacatcctcggtgccggaatacttggcccgggtgaagatggcgtgatcgccgcactgcagctcggcaaacagtgctccggacacagcgcccatgccggaggcgtaggccacggcgccggccgcatgctccagtgccgccagcttctgctccagatagtcctggctggggttggtgatgcggctgtatgcaaagctttcggcgtagtcgtcgcaggctctggccgcctcgtccgtggagtcgaaatagaaggtggatgtctgatagatgggcgggatcaatgcgccgtaggggtcccggggctccccggcgtgtacctcggcggtgtcaaagcccacctttcgcggttcaaaatcaggatgcttcatgatgagctggctcatggcaactcctccttacgaaaaaatgctgaacgcatgatgtttcatgcgttcagcatagcacatatcccgttcaaagaggaaataccgggaaactatggcggcccatagcctcaggctttggccatctccagctggtgtgtcaggtggcggaggaacgtctcctcgatgggccgcagcgtcttgccacggatgccgatccagccgatgtccaccgtgtccgcggtgtcgatcgccacgcaggccacttccctggccagccggggcgaaatgacgccggtgccgatgtcgtaggcattgcagctgcgcatcagcgccgtgctgacgtacaggtcgctgatatacaccactctgggcgggtagaagttgggcagcagcatctcctcggagtagaacgccggggagtcggcgctctgctcgtacacgatgcagggatagtccatcagctcctccggcgtgacggaggagcgctgtgccagcggatggctgtggctcataaacgcatggggccgggagcgcagcagcgggtggaacgtcagatcgttgtcctccagcgttttttccatgtgccgccggttcacgtccgacaggaaaagcacccccaggtcgctgtactgccgccgcacatcgtcgatgaccacggatgtctggttctggttgagccccagggtataccggtcatcctccatctggatcacgaagtcctcaaaggccgccaccacaaaatcatagtgctggctgctgacgaacagggacggtctgcgcccctctcccccggcgtggaaatactcgtcgatgtagtccgcgtcccgcagcagcttgttccccagcttcagcagctcccgcccctcgttggtgatgaccacgccggagggcgtccgctgaaagatggtgatgtgcagctcctcctccagcccgtgcaccagattgctgacgctgggctgggagacatacagcttctgggccgccttgctgaacgacccgcaccgctccaccatggatacatatttcaactgctgcaatgtcatacgcgcatcctcgctttcccgctgctctgcttctattgtacaggcatcctgcgcctgccgcaagtccttacttttcgccgttttcggccacccagccccggacgtactccacgaaccggcgggtggaggcggacagcgccttctcgtccttgacggcgatgccgatgctgcggtaaaacgtcatgggcggacggcaggctgtcaccggatagggactgtgccgcgccatcagctccggcagcaggctgataccaaggcccttggacaccatggccaggatggtccggtcctcccgcgcggtgtacttgacgcgggggcggatgtccatctcgtcaaaggcggcgcgtatctcgtagtcctcgccctcctccagctggatgaatggctccgtcgccagcgcatccagcgggaaggggtcgctgccggcatagggatggtcgcagggcacgatgacctgcagctcgtcccggtggagggcataggcctgcaggcgcttcaccgacggcaggcgcagaaagccgcagtccaccgtgcctttcagtatccactcctccacctgctcatagaagtcgctggtgaccacctcgaactcgatattggggtagcgctggccgaagctcttgaggatggagggcagccactgagccgatacgctggagaaggtagccaccttcacaagaccggcgtccatgcccttcaggctggcggcggactgcatcagcgcgtggtgggcggcgcacagctcctcgatctggggcagcagtgcccggccgtccgccgtcagcaccacgccgccccggttgcggctgagcagcgtaacgcccagctcctcctccagcgactgcaccgcgtggctgacgccggactgggtgaagttcagcgcctccgccgccttggagaagttgccgcaggccgctgttttcaaaaacatctggtacttggttatactcacgggaccacctcgcttcctgccgtcattttatcatatatttactcatagttgcaagtacaataatgcgttttacaaatataacgcattgtggtatgatcctattgtcgacaaggaaatctgaaatacatggaggtaatgaactatggcactggtaacgaaaacgatccgctgtgctgtctgcggcagcagcgatgtggcttttgacggtaaggtctatcactgcgcttcctgcggtacggacagcgaggtgagcatgcccgccgccgatctggccgtggtgaaccgcatcgtggcgctgggcggcggcaacgaggagctgacccgtctgcgccggcagtacaagaatctggacatcgccagctgggacagcgagaaccggctgcagaccaagtaagccgcacataaaacgcttttccatgagggcctcctccctcacgccgcgtccggcatgtccgggcgcggcactttttgcggaaaaggcaaaaaccgtccggctcggtgagccggacggtttttttatgttgtcacacggccacggccagctggccgatgtccgaaccggcccgccagcgggcgcagtagtcctcggtgcagcgcttgaaccggtcgaacaggcggcgggcacgggcctcgtcgctgtacaccttccacagccccgcacacttgaaatcgcaggcgcggtggtcgatgaagccctgcacatcctcgggcggatagctgagaaacagccctacctcgtggggaaactcgccgctctcccggaacctgcggatgagctgggccacgcagcgcccgcagccgccgcaggaatagcccgcctccgacaggatgcgctgggccagccggtcctgcagatcgcggtgcagcacggcgggacggtagaggtacagcagcgcctgcccgtccttgaagcggatgggcagcaggcacagccccttgggcgccagcagccggttcagccggcggacatcatccagcagcgcctccctgtcgtcgcaggaacaggggaacagactgcccgttttgatgcccgccagcgtaggcgcgccctgcctgatcaagatctcctccgacatgccgtccctcctttttcattctcggatagtatgccgcgcagttgcgacgcacatgcatctattaaatatctctaaccatcgcagcttaaaacagccgccggcgcggcttgcagttaaattaccttaaccgtattgtagcatacagcgccctccctgtcaagtactgccgccatatccgcacgcagggcaaatatgcgggccttcgcggcttttttcattgacttgccaggcgtgcgggcgtataatgcagccaaggacgtgaatctgcattcacgtcacgcttgaaacgggagactgcctatgtacaaacgactggaccgggacgcactggccgccattatggaggcgggcatcgacgaatttgcccgctgcggctttcagccagccagcatcagcgccgtggcgcgggctgccggagtcagcgtcggtgtggtctacaagtattttggagacaaggacgcctttttcctctcctgcgtccgacactcgctggaactgctggacaccacgctgcaggccgccatcggcggcggcaccgatacagaggattgtatccgccgcctggtggaggcgctgcagcagcagtcacgagcccacgcggcctacaatgttatgtacaatgagatcacctccggcagctgccggaggttcgcacccatgctggcccgggagatcgagcagcggacggcggaggcctacacggcgctgttcgccagggcacaggcggagggtctgatgcggacggacatcgccccgtcctccttcgcgttctttttcgacaacctgctgatgatgctgcaattctcttacagctgcacatattaccagcagcgcatggcgctgttctgcgggtcggaggacacccgggatgaccggcgcattgcagaggaaatgacgcgcttcatactgagcgcgatgaaaggagcgggaccatgcagtacataatcgcctatgactgcggcaccaccggcgtcaagacctgccttttttctgtgggagacacagtggagctgacagccagcgcctacgagggctacgatctgtacattctggaaaacggcggcgccgagcaggacgccgaccagtggtggggcgccatgtgccggacgacgcaggcgctgttcggcaaaacggatgtgcggccggaacaggtgggaggtctctccttctgctcccagatgcagggcatggtgctggtggaccggcagggacacgccctgcgccggcccatgagctacatggaccagcgggccgcagaggagttccgccgctgccagacccacggccttaccatctccggcgtcaacgccgggatgctgctgaaaagtctggcggccacacacgccgcctccaccagtgtgaaggacccgctgtggaaatacaagtgggtgcagcgccacgaaccggagatcttcgccaaagcccacaagtggctggatgtgaaggaatatctcatctgccgctgcaccggggagttcgtgatgacccgggattcggcctatgccacgttcctgtacgactcccgcccggggcgggaaggctggaacagccagctgtgccggatgtacggtgtggaggagcggcacctgccccgcatcatcgactgcgcggaggtggcggggcgcctgacggcggaggccgcggcgcagctggggctggcggcgggcacgccggtgtacggcggcggcggtgacgccaccctcatcgggctgggcgccggctgtacggaggtgggcagcacccacatctactccggcacctccggctgggtgggcaccgtcatcgaccggcaggaggtggatatccagtccatgatcgccggtatcgtaggcgcggagtccggcaagtataactactttgcggagatggagacggcaggcaagtgctttgagtgggtaaaggaccatctggtgctggacgaggtcaacgtctacctgcaaaagaccgatgtggccgagagcaaggagacgctgtacgagagcctgtacgactacatggcagacacggtggacaaggtgcctgccggggcgggcggcgtcatctttacgccgtggctccacggcaaccgctgcccctttgaggaccctgccgccgccggtatgttcttcaatatccggctggagacaggcaaggcggagatgctccgtgccgtgctggaggggatctgctatcacctgcgctggatgctggcctgtcaggacaagaagatacgcacatcccagaccatccggttcgtgggcggcggggcgctggcgcctgtcacctgccagatgctggcggacatcaccggccgcaccatcgaaacggtggagaacaccaaggatgtgggcgccatcggcgcggccctgctggctgctgcgggcagcggggcgctgcccggcctgacggcggcgggacagctgatccgggtgaaggaccgctatgtgcctgatcctgtgaaaaaggcggtctatgaccggaattacaaggttttcatcaggctgtacgagagcaaccggaagaatttcgcgctgctcagcggcagagaggaggcgtgagcgttggacgagagaacaggacgcgcactggtacgggaaacggggcttatgctgctggagacgggact

SEQ ID NO: 4062 - DNA, 21812 bp, synthetic construct
  source 1..21812: mol_type = other DNA
  misc_feature 1..21812: note = Synthetic
ttatcagaacatactgcatagggcacctcacagagagtattttttgctgtattcttcgtaatactcgtcgaagccgtggttatgggcttcggcgagactgattatatattcgtgggtgtcgaaggaatcggactcaagctctatcatggcgacggcaatgtttgagcagtggtcgccgacacgctcgtagttcgtgagcaggtcggtgaacacgaagccgtgtgacagggtgcagacgccctgctgaaggcgctcgatgtggtgcgacttcatctcgtcgcagaggttgtcgataagctcctcaagcggctcgacacggtaggcaagctcaaggtcattttcgacaaacgccttgaccgcaatggtgatgatctccgtaacggcggcggtcagcaccgcaagctcccgtgacgcaggctcggagaagcggatgtgcttttcgtgtatctccttggcgcactcggcgatgttgagggagtggtcgcttatacgctcgtagtcgtttatggtgtggaggtacttgctcacgtcctcccgctgctcacggttaagctcttttccggtgaccgccatgaggtatgtgccgatcttgtcctcgtatcggtcgattatatcctccgtgtgcgagacgtgatcgaagccgtcgtcggagtagttttccagaagcgcaaatgaggcgaaaagattggattttgccttttccgccatggagtttacggtgagacggctctgctcgatggcaagggcggggtgcgcaaggaagcgctcctcaagtctgtccatatcacgcagcgcctcggcgtcgctctcgttatccttgatgaggaacttgccgagcctttcaagctgagggatgaagggagcaagcagaatgacgattataaagcggaacacggtgttcaaaagcgcaaggctcaccgagctcatggccatagacatgaaagaaaagtcaaagatcgcatttgcggtgtagaaaattatgctgaacagcacaacgccgaggaggtcgacgagcagatacgaaagagcggtgcgcttgccgttgctgctcgcaccgagggcggagagcaggacggggaccgatgcaccgatggcgatgcccatgatgatgggcagtgcggtgtcaaagcggatggcgcccgttatggagagcgcctgaaggataccgaccgctgcggaggcgctctgtatcacggtggtgaacactataccgagaaggattccgaggatgggatttgaaaatgcggtgagcatatcaataaagacctggcttgagcgaagccccgatacggcgccgctcatggcgtttatgccgaacatcagaaccgcaaagccgagcataatgtcgccgacgtgctttttggtgctgctgccggagaacatacgcagtatgatgccgatgacggcgatgatggcggtgagcgtatcggtcgagataagctccagccagccggtggcgtctccgccgccgacgtcggaaaggcagatgatccagcccgtgatgctggtaccgattatggcgcccatgacgacgccgatcgcctgtctgaccttcatcatgccggagtttacaaagccgaccaccatgaccgaggtcgcagacgaggactggataacggcggtgacgccggtaccgagaagtatgcctttcaagggagtgcttgaaaggcggtacaaaataagctcaagcttattgcccgcaacgagctttaacccgtctcccataagcgccataccgaacaggaacagcgcaacgccgctcagcagctcaaaaacgttagaaatccccaatgcttttccctctgttgttgtaaaagttgagcagaacccataaatgctcaatataaatgtatattaaaacacgcacaaaatcaagaagcagttttcgtttctcccatacagacagtttgccgagttcgaatttgtcggtttttgtttactgtgccgcaattttgtgttagaatgtaaacactattcacaggaggacggctgaatgtgtattaaggataaagagaagctcgacaagtggatcgcaagcgtcgttacggcgacggggaaggtgctgtctttcctcgaaaacgcctcgatgaagctcgaccctctcgtcaaggtgccgtttgtgggagacagcatcgcacaggcgcaggacatagtttatatgctgaacgattattacaggggaaattataagcgtgtgccgtttacggcgattatcggggcggtgcttatcgttgcctatcttgcaagcccctatgacctcatacccgacaacgtgcctatcctcggctttgtggacgatgcactcatcataaatatcgtcgtgagtctttgccttgaccgtgagcttgaggagtacaggcgttggaggagcgaaaacaatgaaatacggcagctcgcttaaagtcggtatcgccttcgggcttatgctcggactgctgacattgggaataaggctcagctccggagacacgcttgtgcagctcctgccgcaggcgctcgcaaccgccgtgttcggcggtcttgcgatggggctttacatgaggtcgcacaattcgaggatgagcgcagaggtcgccgccttcggaaagtcgcttcgtgaaaacgaaaaggtcatgcttgaggacgctgccggacactaccgctccggcgaatgcgttgcgggcagactgtggctcaccgagacggggctttacttctactcccacgccggcaccttaaacagccacaccatgtttgtgccgacgggcgaatttaaaagcgttgtgccgacgaagatcgccgggataacgaacggctttctgctcgaaacggaaaacgcaagcgagtgctttgcgatcagcagagccgcaaaatggatagaagagatcaaaaaagtcaccgactgatgttagaaatagtattagcggcggctttttgctaaaaatacgaagggcggagcagtctgctcaaaggaggaaaaacaatgaagatacgttttaccgaaaccgtgcttcgggacgcaaaccagtcgctcattgcgacgagaatgccttacgacagctttgagccgatcctgtcggcgatggattctgcgggcttttactccgtggaatgctggggcggcgccacctttgacgtgtgcctgcgctatctcggcgaggacccgtgggagcgcctgagaaagatccgggcgaagatgccgaataccaagctgcaaatgctgcttcggggtcagaatatactcggctaccgccattatcccgacgatatagtgcgcagattcgtccgtgcctccgtcagaaacggcatcgacattatccgcattttcgatgcattaaacgaccctgtgaacatccgtgctgcacttgaggagacgttaaagtgcggagccgaggcttccgccgccatatcgtacaccacaagccccgtgcatacgctcgacaagtacgttgagcttgtgcgtgagcttaagagcatgggcgcttcgacgatatgcataaaggacatggcgggcatactctcgccgaagaacgcctatgagcttgtgtcggcgataaaggatgcggtcgatcttcccgttgcggtgcatacgcactgcacgacgggtcttgcctttatgacctgcttaaaggccgccgaagcgggagccgacatcatcgacaccgcaatatcgccgttttccggtggcacctcgcagcctgcgaccgagacgcttgactacgccctgcgtgagcttggctgggaaagcggcctgaacaccgaggtcttaaacaaaatggcgaccttctttaagggcatacgcaacgatgccctgaaggacgggacgctcaatcccatctccatggcgacggatactcagtgcctgagctatcagatacccggcggaatgctgtcaaatcttttgagccagcttaaaatgatgaataagctctcgaagtttgacgaggcgctcgaagagacgccgagggtgcgccgtgagctgggatatcctccgctcgtcacgccgacgagtcagatggtcggcacgcaggcggtgcagaacgtgcttgcgggcgagcgctacaagaacgtcggaagcgaggtaaaagcctactgccggggcgaatacggcactcctcccgctccgatcgacgaggcggtgcggagaaaaatactcggcgacgaacagccgataagcggcagatacgccgacaccctgccgacggacaccttcgagaaggcgcagaagtatctcggcgacaccgcccgctgcgaggaggacgtgctgagctatatcgcattcccgcaggtggcggaggactttttcaaaaaacgcagcgagcttgaggagaaaaaggttcgctacacgataagcaagatctgaggaggtgcgccgtggtaagcttatttaaaatgccactcggcgatgcggtgctgaccgccgttttgggctatgccgtcgtgttcttggggctgctgtttctgatgctcgtcatatccgcaatgggaaagctcatgtcgaagaaaaagcccgtaccggcagctcagcctctgccggaggaaagacaggcgaccgctcccggctctgccggagagctgaagctttacgacaccgacccgaaggatgccgccatgataatggctatcgtggcggacagtctcggaaagcctttaaatgaactgcgcttcatttccatcaaggaggttcgtgacgaatgaaatacagagttaccttaaataacagagtgtacgaggtcgaggtggaggagggcagcgccgtcctgctcaacgagtacgaggcggcctctcccgctcccgctgcggtgtcggctcccgctcccaagcaggagagcgctcccgcacccgctccgtcgggagacggcaatgcggtcaaggctcccatgccgggcaatatactgaaaatttccgtcaccgtcgggcagaaggtctccgagggcgagacgctgctcgtgcttgaggcgatgaagatggaaaacgaggtgactgccgacagaagcggcaccgtcaccggcataatcgcagcgaaggggcagacggtggagacgggcgatcctcttgtcgtgatctcttaaaggagggcgcttatggacattttggaaacccttcgcaagcttgcgctcgaatcgggcttggcggcgttcttcacgacggacggcggttggaaaaacctcgttatgatactcattgcctttgtgctgctgtacctcggcatcgcaaagaaatttgagccgctgctgctgtgcggcatcgccttcggctgtctgcttacgaatctcagctacttcgtcgggcagggcgacaatgcgatgtatcacccggagctgtggacggcgtttatcgacgaggcaagcccctactatcacagctacgggcacattctcgcaaacggcggactgcttgactttttctatatcggcgttaaggcggggatatacccctcgctcattttcctcggcatcggcgcaatgaccgacttcggaccgctgcttgcaaatcccaaaagcctgcttttgggcgcttcggcgcagctcggcgtgtttgtggcgtttttgggtgcgatccttttgaacttttacggcggcgaggcggcgtcgatcggcataatcggcggcgctgacggtcccacggcgatattcatagcgtcgaagcttgcgccacagctcttgggacccattgcaattgcggcgtattcgtatatggcgctcatacccttcatccagcctccgcttatgaagcttatgaccaccgagaaaatgcgcagcgtcaagatggagcagaccagagaggtcagcaaaaaggagaagatccttttcccgatcctcgttgcaaccgtcgttattctgcttctgccctcgacggcgccgctgatcggctgtctcatgctcggcaacctgttccgtgagtgcggcgttaccgacagactgtccgacacggcgcagaatgcgctcatgaacatcgtcaccatcttccttgcaacctcggtcggtgcgaccatggttgcgcagagcttcctcaattgggagacgctgaagataatcgcactcggtcttgcggcgtttgcggtgtcgaccgtcggcggacttttgggcggcagagtcatgtacaggctctccggcggaaagataaatccgcttatcggctctgcgggcgtgtccgccgtgccgatggcggcaagagtcgctcaggacgtgggcaagaagtataacaagtcaaactacctgctcatgcacgcaatgggacccaacgtcgccggagtcatcggctcggcgatcgctgcgggcttcctgctctccgtgttcggctgaggataatagatagaatacaaaaaagacaagcgaacggtttccgttcgcttgtcttttttatatggcttttttgacgccgaacagaagcctgtccgagagtgcaaacagtcgcctgaacagatacgcaagcagtacggtcacggcaatgcaggcggcgtaccacaggacaaggctcacgtttgcaagaccgagctttgtaaacagtatcatcggcagcctttgcagaaggtagacctcaaaaatgtggtcgccgagccagtctataaccgggttgccgagctttaccttgagcgaaacgcagagcaggaggagcataaatgcgacggctgcaaggttgccggcgagcgcaggcaggagcctcggtgagaactccttgaggcaggcgacgcaggtaagataccctgccgccgcaagaagcagcagcgctgcgatcttcaaaagacctcgcttccatgcaccggcactttgagtgagcttttcggaaaaggtctccgacaggtcgtaaaacagcatgccgaaaacgtaggagatcacggtgtcgtaccaccaagtcggctttacaagtgacatcaaagcgatgtaaaccagcgtcagcagcagacaggatacgagcgcccggcgccgatccttgaacaccccgaacgaaatataggtgataatgtacaaaacgagtatcgaaaatatgtaccaattgctgttgccgagactttcccacagcacgagcgaggaaaggacaaagccaaggtcgtagtgccgacccaaggcaagctgcaggcacaaaaacagcaatatgataggcgtcgtgtgggtaagcagctttaaaacacgctgctttgggatggagcggacgtaggcttcgcccttgcgctcgaaggagtacctaacgccgtagcccgaaaagaacagaaagggaacgactatcatctgaccaagtgcggttttcacgagaaaaaaggtgttggtgaaaacgccgttcggtgcgaggtcctttatgtactgccacgagtgagacgcaaaaacgagcattacaaaaatgcccttgagtgccgcactttgcttttttccgaggtacgagccgctgccgtctgcaagctttgcaccgtaagccgcagcgataaatatcgctatgtatatcgctatcatacggaacctccgacgctttaatacaatacaatataatcggaaagccccgaaaaagcaagacggacgggcgcttttccttgtacgtccgcatacaaggcgcaggcgctttcgcccgtattacggaggggaaatttcattgacggaggcagctatgaaaatatatctttcaccctcgcagcagtattacaacaaatactcggcgggggacacgaccgaaaaggagcagtgcaaccgcattgcggagcattgcgagagggcgctcatccgctgcggctttgaggtgaagcgtgcggccgcaggtaccaagaccgacgacgcaatagcggagtcgaacgcatggggagcgcagcttcacgttcccattcacacgaatgcaggaggcgggaagggctgcgttgtgttcgtgtcgcagctttccgaggataggctcaggtacgctcaggcggtgtacgatgagctggcggagataaccgtcgccgacgagagctacggcgttcgcacggcaaggttcgacgagatacgcaagacttcgggcaagtgcatctacgttgaggcggagttccacgattccgttgagggggcggagtggataatcgaaaacgtcgaggagatcggagaggcgatctgccggggcatctgcaagggcgccgacgtcgcctacgtccccgaaaactacgagagcgaagcggaaaaggcgaagcgctgggcagtggagaccggacttatacggggctacaaggacggctcctacggctggggcgatgcgctgacccgtgagcagcttgcgatcatcgagtacagaaaagcgaaaggaaacagtgaaaacaatggataaacccgataggatcaccgaacttcgtgcgttcgtaaccgccgcttttgcagcggttacggcgcttataggctgggtgggctggctcgtcgtcatcatgctcgtgtgcatggcgctcgattatctgacggggacttgggcggcgatgtcgaaaaacgagtggagcagcaagaccgcaagagccgggctttggcacaagctgggcgagatatgcgccttgctcgttgcggcgctgtgcgacattgcgctggctcaggtgagcggcagcggcggtattagtctgccctttgagtatacggtgcttgcaacgcccgtcgtggcggtgtggtacatatttacggagcttggcagcatcaccgaaaatgcggcaaagctcggtgcgcccatacccggctggctcaaaaaaacgctgagcagtctgcgggatgcggcggacgaaaacggagagaacggaggcaggaaatgacgacggtaaagataagcggggcgatggcttccgcagcggagcgggaggtctacacctccggcacggtgggggcaaccctgcgctttgagtttgacggtgcttgggacgggcttgcaaagacggcggttttccgtttcggaagcgtcacttacgatgtgccggaaagcgagtggacggacggagaatgcgtcatcccgcacgagtgcctggcggcttccggggacgagcttatgtgcggtgtctacggcgtgtcgcaggacggcgagacggtcatccccacggtgtgggtgcgcctcggctatgtgcagagcggagccgatccctccagcgacgagtcgactgctcccacgcttccggtatgggcggcgcttaaaaatgctatcggcgacctcggcgacctcgacaccacggcaaagaatacgctcgttgcggcgataaacgaggcggcgcaaaacggaggcacaagcgtgacaccgctcatcggcacgactgccgagcttacaccctcgcaggtgaaggatgccgtgcttgcgggcagatccgttgtcgtgcaatacaccgacagcgaattcggcgtgttaaagtttactaatttcaatatcgcttcctcgagcaacctgctcgcctcggttgccgtagttgagtgggatgacgcatgggtcgtatatgcgctttacggcaatacatcgactcagcaatgggagacaaaggttacgcagatggctaccactcctcaagtgaataccatcagcacaagggtgagcacgttggagaacgcaggctatctcactcttgagacactcccgaagtacggaggtgaaagcgaatgagcgtgacggtgaagtacaagggcagcgccattgcggagcttaccgagaacggcacaaagaccctcaaaacctccggcaaatactgcgaagcggacattgtggtcgagaacacaaaggacggcggagcagcgataactgacggcattgtggtcaaggcgagagacgctgaaggctatgcaactgaggtggaactgtataattccgaaggcaaagtacctaatcaccaattttcatgtggcgactattatggtgaaggcgcacccatgaaaaatgtaaaaaccgtggtttttaaaagcccgattacggagataggcaagcctgcgccgcagcagtactcaatttcaaagcgcatgatacgggagagaaaacacgttttctccacctcacggaggacgactatgagaacataacgagtcctgttgtgcgcagagcgatatcgcagacggtgaaggtcataaacgcaattattcgcaaagaaggcggaagccccacatttataaacattgagcttgcccgtgagatggctaaggactttacggagcgaaacaagctcaaaaaggaaaatgacgaaaacagggcgaagaacgaaaaactgcttgaacggataaggacggagtacggaaaaagcgacccctcagggctggaccttgtaaagctgcgtctgtatgaggagcagggaggcgtctgtatgtattcactcagacaaatgtcccttgaaaagcttttttcgcccaactatgcggaggtcgatcatatagttccgtacagcaaaagctttgacgacagccgaaagaacaaggtgcttgtgcttacggaggaaaaccgaaacaagggaaacaggctgccgctgcagtatttgaccggacagcgcagggacgattttatcgtctgggtaaacaacaatgtcagggattaccgaaaacgcaggctgctgcttaaggaaacactgacggatgaggatgaactcggattcaaggagcggaatcttcaggacacgaaaaccatgtcgaggttcctgctgaactacatttccgataatcttgagtttgccgagtcaacttgcggacgaaagaaaaaagtcaccgccgtaaacggtgcggtcacggcgtatatgcgcaagcgctggggcataacgaagatccgtgaggacggcgacctgcaccatgcggtcgatgcggtcgtgatagcctgcacgacggacggcatgatacagcgggtgtcgaaatatgcccgactcagagaatgtcgctatatgccgaccgaggagggaagccttgtcattgacgacggcacgggcgaggttctgcaccaattcccgtatccgtggagggatttcagaaaggagcttgaggctcgcatcggcacggacccggcaagaacgatcaacgacctgcgcttaccgttctatatgtcgagcgggatgccgcttccggaaccgatcttcgtctcaagaatgccgaagcgcaaggtcacgggcgctgcgcataaggacaccgtaaagagtccgaaggagcttgataagggctgcgttgtggtaaaacgcccgctgacggatctgaagctcaaggacggggaaatagagaattactataatcctcaaagcgaccgtctcctgtatgacgcattgaaaaaagcgcttatagagcatggcggggatgcaaataaggcgtttgcgggagaatttcataagcccaagagcgacggcactccgggtccgatcgtgagcaaagtgaagcttttggagccgacgacactcaatgtacccgttcacggcggcgccggcgttgctgacaacgattcgatggtcagggtagacgtctttctgacaaagggcaagtacaaccttgtcccgatatacgttgccgatacgcttaaaccggagctgccgaataaagcgattgcggccaataagccgtattcggaatggcccgaaatgtcggatgacgattttgtcttctcgctctatcccaatgaccttgtttgtgtgacacacaagaaggggataaagcttacggtcacgaacaaaaacagtacgctgccgccgaccgtcgagggtaaatcgttcatgctgtactacataagcactaatatttccgtcggctcgatcaaggggatcacccatgacaacacttatgagataggcggactcggcgccaaaacgctggaaaagcttgaaaaatacaccgtagacgtactcggagaatatcacaaagtcggaaaggaagtcagacagccgtttaacatcaaaaggaggtaagctgaccgaggcggacgacgactttcagtgtgagcagctttcgattttttagagaaaaacagcgctttatccgttgataaagcgctgtttttccgatagcctattataccataccaagaactatcagggaactataacacgagatgcgcacgacctacggcgcgtgctaattataccataccaagaactatcagggaactataacagcaaatgccgtgtggggcgcatatctacgattataccataccaagaactatcagggaactataacgcacactggggacgagtgggaagatttaccattataccataccaagaactatcggacaagcgtcatggttcagaaagcaaaaacaaacctccgccgagtggcggaggtttgtttttggcacgccgtaagggattcgaacccctgaccttctggtccgtagccagacgctctatccagctgagctaacggcgcttattgctttgcgcctaagtatattagcacagcggataacaaattgcaagtctttttttgcgaaagcgtctgcattttttgaatttacttactcatactgcttgatacggcgtctactacgtcgcccatcgttttaagggtcttgctgacgacgttctttgcgcccttcttgccgggcatcattatggcgcccgcacagccgccgactgcgataccgagtcccatgccgataaggaaatttgtcttgttcattgtttacacctccgtaatatattatgtccatttttgttttgctacggcggtgaaatatatgttataatatccgttataaaccgatttgaaaaccgaaaggaaattttaaaatgagtgtaaggatccttgccgtgggcgacgtctgcgggcagccgggacttgactgtttaaataccaagctgaaaaaattcaaagccgaaagaaacattgatttctgcgtcgtcaacggcgaaaacgcaaacgtcgtcggcataaccccacgacaggcggatgcaatattcaaggcgggggcggacgttataaccctcggcaaccacacatggacacgcacggagctgcgtccctacctcgacgagcgccgccgcatactgcgccccgcaaactttgcgccacagtgtccggggcggggcatcgacgtctacaagaccgccttcggcgacgtgtgcgtactcagtcttatgggtcgctttacgctcgacaccaacaccgacaacccctttgtcatcgccgacggcttcatggaggagatcagggaaaagatcatacttgtcgatttccacgccgaaggaacgagcgagaagcgtgcaatgggctttctgcttgacggcagagcgagcgccgtctggggaacgcacacccatgtgcagacctccgacgccgaggtactgcccaagggcacgggctacatcacggatctcggcatgacgggcgctgttaactccgtcatcggcatcgaccctgagcagtccgtcgggaagtttatgggcgatccgccgaggcgctacgactcgccctccggtcccgcaaagcttgagggctgcatatttgagatcgacccggaaaccgggcgctgtttgagtgcggaggcgatacgactgaaatgaaaaggataaagctgcttcatgccgcagacctgcatctcgactcgccctttgagggactcaccgggagcaaggcggcgcaaaggcgcagggaacagagagagctgctccgctcacttatggagcttgccaagagcgaggaagtgcagctcgtgctgctgtccggcgaccttctcgattccgcatcgccgtaccttgagacctccgaggagcttttgcgggcgctggggagcgttagtgttcccgtattcatagcgccgggaaaccacgacccctacacgccgggttcgccatatgcgaagctgagcttcccggaaaacgtacatattttcaaaagcaatcgcatcgaatgcgtcgagctgccggagcttaacgcccgtgtgttcggcgctgcgttcacggagcgccacagcgcttccatgctcgcaggctttgagccgcccgcagacgacggtatgcttaacctcatgtgcatacacggtgagctgtcacaggactctgactacgatccgataagtgagacgcagcttatgcgcagcggcatggactatgttgcgctcggacacatccacaagggcagcggtctcagaaaggccggaaaaacggcttacgcatggccgggctgtaccgagggcagaggcttcgacgagacgggcgaaaagaacgtctacatcgtcggtataaacggagacgagtgcaggataaagcccgtgtgcatcgcaaagcgcaggtacgagatactgaacgttgccgcctcggacgatgcgctttcggcgataaacgccgtgcttcccaaggacacggaaaacgacgtttaccgcatcgtgctgtccggcgagagcgccgaaagcccagaccttcgggcgctttatgacgcactgagcgggaggttctttgcgcttcagctcaaggaccgcacgagacccaaggtcggcgtttgggacagcgccggggaggacagccttcggggtcagttccttctgcgcctaaagagcgcctacgacgctgccgccgacgacggcgaaagggagcgcataatgcaggccgcccgctgggggcttgcggcgctttgcaaccgggaggaggtcgtctgccatgataataaataaggtaagtgcgaccttcgggaagctgtccggcgagagccttgaattcaaggacggactgaacgtcgtctgcgcaccgaacgagtcgggtaaaagcacatggtgcgccttcatccgtgccatgctgtacggcatcgacagctcggagcgccaaaaggcgggctacctgccggataaaacccgctatgccccgtggtcgggagccgccatgcagggaagcatggaggtgaacgtcggcggcagggacatttgcataagcagaacgacgaaacagaaaaactaccccatgcgggagtttagcgcagaatatgcagggacgaacgtcgccgtcgaggggctaaactcggctaactgcggcgaagcgctcaccggcgtgagccgtgatgttttccgccgcagcgcctttgtggagcaggacggcatcggcgtcagcgcaagtccggagcttgaaaagcgcattgcgaccatagtctccacgggtgaggagggctgctcctattccgaggcggacgagcgtctgcgcatttggcttcgcaagcggcgctaccgccgcagcggaatgctgcctgagctggaggacggaatggacgccgaaaagcggcgtttggaggagctttaccgctttgcggacgagcgggaggcgctgtcggaaaagctttccgagagcctccgccgctgcgacagtcttgagcgggagatgcttgagagccgcaaaacggcgagaaaggacgcactttccgctctgcacgacgcacggagcgagcgcaaggcggcggaggaggactgcaccgctgcgcagcgccgctgtgcggacgcaagagaaaagctctgcgacgatccgctgtacgtcctcgaccccaagccgacgcaggagagctttgacgccgacagtgcggagcttacgaagctttccgccgaggcaaagcgcaaggtgagcgtcctgcctgcagtctgcgtgcttgtgcttgcgctcatctgtgccgccgtcgccgtgatgacggagccgctgctgctcattgcagccggggtgcttgcgctgctttgcgtgctgatctttgtgcggatcggcaaaagaaagcagacggtgcgggagtcgcagagaaagaaaaacgcaattttggaacgctactcggcacagacaccggaggagatggagcgcagctttttgcgctacacagagaagctttccgactgccgcaatgcggaaaagagcagagaaagcgccgagcaacgcttgcgtgagctgacgagccgccttgaaaagacagaaagcgagacgctgagcatcctcgactttgccgagggcgacagcaccgcagcgtatatcggcagacagcttgcggcggagcgccagctttgcgacagcatatccgcccgcttgaacgagcttaaaggcgccgccgcagcggtcggcgatccgctcgtcatcggctcaagactcatggagatgcaggacgagtatcgggagatcaatgccgagtatgaggcgataagccttgcagtcgatacgcttaaagacgccgatgcggagatacagagcaggttctctcccgcactcggcaagcttgcggcagagtatttctcacgcatgaccggcgggaagtacgacggcctgcttatcaaccgggatttcagcgtcaaggtcagggaaaacggtgcttccgttgcggtcgataccgcatacctcagcgccggcacggaggacctcatgtaccttgcggtgcggcttgcggtgtgcaggcttgcgctgccggagacggcggtgtgtccgctcatcctcgacgatacgctcgcaaacctcgacccggagcgcaccgccgctgcgatgtcgcttctgcgggagatcgcaaaggagcggcaggtcatcctgtttacctgccgagaccccgaataaaggaaaaactcctgcaatactctgagtattgcaggagtttttatcactttatgctcactatctcacgcacggtttcgggagagatctttacgaccttacggtcgtagcttataagaccgttgacctcgtcctcaacgtcggaaagttgcgtgtacacggcggcggcaagaccctgctcgtgagcgggacgtatctgcccgccgtagagcctgcgcagcgcctcggttagcgcctctatcgacttaaatctgcggtagccgaagtcggtctcaccgaagctgtgttcgtcgcagtagtagttgtagccgccgaactcgctcagcagcacggcacgccccattttgtcctgacggtgaacgtatttcttgaagtaaacgtgtaggctcttggtctgaccgatcttctggtcgtgccagccggaggcgtggtctatcgttcgtgtgtcgtcaaagtcccggacaagctttgcgatacgggcggcgtcaaactgaccccagccctcgttgaacggtacccacatcgagatgcaggggcagttgtagagctgatgcagcatctcaaagagctcgacctcgtactgctttctgcccgcctcgtcctctcgggcgaacagcttgtagcgatcgtccttgaggtggatgcccgttacgagcggggacgagatgatgacggggttgtactcgccgccgccgtttatcatgtcctgccacacgagcataccgaggcggtcgcagtgatagtaccagcgcatgggttcgatctttatgtgcttgcgcagcatattaaagcccatgtcctttgcggtctgaatgtcgaagatcagagcctcgtcactcggcgcggtgtacataccgtcggaccagtagccctgatccaaaagtccgttgtggaaaaagggcttgttgttcagaaacaggcggcttatgccgtccttgtcacgggcgacggagaatttgcgcatcgcaaagtagctgtccaccttgtcctcgccgcagatgacggagaagtcgtagagcttcggtgtgtcgggcgtccaaggctcaaagtccggaaccgggatgcagcagggcagggggtagctctttccgtcaaatacggcatatgcgtccgatcttccaacagtttcggcaatgatctcaacatgtccggcgtcgaaatcgggcgtaatacgcagatttttgacgtaacagttcggcacgcactcaagccacacggtctgccatatgccgctttgtgggctgtaccatatgccgccccgctttgtgcgctgcttgcctctggagtgccagctttcgtcgctcacgtcctttacacagacgcaaagctcgtttttgacggaaagcagctcagttatatcgcattcaaacgccgtgtagccgccgacgtgatgcgcagcctccatgccgtttacatacaccgttgcggtctgatccaccgcaccgaagtgcagaatgacccgacccttgtgctgcggcacctcaagctctctgcggtaccagaggtattcgtggggcttaagaattctgcccacgccggacagctcgcactccggggagaaagggacgagtatctttccgtcccacgagtcgggcatggagtccgactccgtgattgcgtaatcccaaacgccgttgagattcacatagccgtccctgacgaactgtggacgggggtattcctgaagcacactgtttttgtcgagtttttcaccccaaacggtaagcatgggcgcacctccgaatttcaataataatttgtccttattttaatatgtatatattacaatactttttgcctttttcaaagacccaatttcaagccgatcggaggagtggataaattagcccaaaatggcaaaatgacacgcaattgttaactatttatcattcaattgtggcaaaataaacgaaaaattggcgaaaaataggcgcaatccttgtagacacggtagcgggtttatgctatatttaagtttgtcataaaatagagaggtgatgcaaatgccctttaaattccgtggcggcgtacatcccgactacatgaaggcccccaacgagcctgtcatcgtcgtaaccccgccgccccaggtcattgttccgatggcacagcacatcggcgcaccttgccagccgctggtagcggtaggcgactatgtaaccatgggtcagaagatcggcgaaaatcctgcccctgtctctgctccggtacattctcccgtctccggcaaggtagtagcaatcgagcccagaccccatcctctgggcgacatgatcccggcagtcgttatcgaaaacgactatcaggataccccgtgtaaggacatggctcccctcaccgaggaagagcttaaggatcccgaagcgataatcgcacgtctgcgtgaagcaggcatcgtcggcatgggcggcgcaatgttccccaccgcattcaagatcaagaccggtctcggcaaggtcgataccctcatcatcaacggtgcagaatgtgagccttaccttaacggcgaccactggaccatgaagcttcatcccgaagagctgcttcggggtatcgagcttgcccgcattgccagcggtctcgacaaggcgtactacggcatcgagaagaataagatggacgccatcgaaattctcaactcaaaggaccccgcaaagtacggcgtcgagatagttcccgaagaggtcaagtacccccagggcgcagagaaaatgcagatcaaggccatcacgaaccgtgaggtcaagcccggcggactgcccgcaggcgtcggatgcaacgttatcagcacccagaccgcatatgcgatctacaaggcctgctacgaaggcgttccctgctttgagcgtatactcaccgtgggcggctccgcaatagcaaagcccttcaacctgcagtgccgtatcggtactcccttcagatacatagtcgagcagtgcggcggctttgtaaagacccccaagaagatcgtcctcggcggaccgatgatgggtcttatagccaccaatctcgacgccgtgaacatcaagggtacggcaggtatccttttcttcaccgaggaagaggacagaacggtcaaaaatcccacctgcatacgctgcggcaagtgcattaccgtatgccccatgggacttgagcccgtttatatgtatgcatacttcaagaagggcgacttcgagaacatgaagaagtaccacattcttgactgcttcgagtgcggcagctgctcctataactgccccggcagaatgccgctgacccactcattcaagaccgcaaagcttctctttgctgccaaggctgcggaggagaaggcaagagcggaagccgctgcaaaggaggccgagaaaaagtgatacagaaagaatatacctttgatgcctcctaccagcctcaggtaaggaccaagaccggcaccaccaacatcatgctcgatgttatcattgcgcttatccccgcaatggctgtcggcgtgtggcagttcggtctcaaagccttgctgctcatcgcagtttccgttgcgtcctgcgttttctttgagtggggctaccgcaagctcttaaagaaggacaactccatcggcgatctttccgcctgcgtcaccggcgttctgatcgcaatggtcatccccgtgggcgcaccctggtggatgcccatcgtcggagctgccttctccatggtcatcgtaaagcagcttttcggcggtctgggaaagaacttcttaaaccccgcacttgccgcaagagccttcctcatggcatcctggcccgtcatcatgaccacttgggcggttcctgccgcactcagcaaggtcgttgacggtaccaccatggcaactccgctcagcatcatgaaggccggcgagcctctgcctgattacttcagctacggcaatatgctcctcggcaccatgcccggctgtatcggtgaagtgagtgctatcgctctcctcatcggcggagcatacctcctcatccgcaaggtgataagctggcgtatccccgtttccttcatcggaacggtcgcagtcatcaccctgctcttcccccgccacggcggattctttgacgtcaactggatgcttcagaacctcctcaccggcggtctgctcctcggcgccatattcatggcaacggattactcctccagccccgtgaccctcaacggtcagcttctgtacggcttcggctgcggcgctctcaccgttctgatccgttacttcggcggctaccccgaaggcgtttcctacgccatcctcattatgaacctctgcgcatgggctatcgacaagggaacccgcagccgtcagttcggcgtcagcaaggaagaccttaaggcagccaaaaaggcagcaaaggaggcaaaggcagcatgaaaaagataattaagcttgcactcgtccttttcctcatatccgccatagttgcaggtgttctcggtgtcgttaacgagcttaccaaagacaggatcgagcagatcaaagagaagaagacccgtgaggcatatgccgaagtcctcaaagccgaaacctatgacgacgcaaagtacaaaggcaaagacactcaggtacagatggtctccgtcgcaaaggataaggacggaaatgcgatcggctatgttgtcgagactgtcgtcaccggcagccagggcagcatcaccgttatcgtcggtgtcgacaacgatctcaagtgcaccggcatttccatcaccgactccagcgagacctccggtctcggcgcagttgcgtccagccccagcgacaagggcgttgcgttccgtgcgaacttcgtcggacagggcaaggatcttgatcttacaaagaacggcggcgagatagaccagctcaccggtgctacgatcacctccactgcggtcgtcaccgcagtgcgctccgccattaccgcctgtgagagcttgggttaaggaggtagacttaaatgaacattaaaaagcagtttaaggaaggtcttatcaccaataaccccgttcttgtacagctcatcggtatgtgcgccaccatggcgatcaccaccaccctgttcaacggcgtaggtatgggcctctccgttctcatcatcctgacctgctgcaacgtcgtcgttgctgcaatcagaaaaatcatccccaacgaaatcagacttgcgatcttcgtcgtagttatcgcaggcttcgttaccatcgtcgacctgctcctgcaggcgttcgtccccgcactgagcgaagctctgggcgtgttcatccccctgatcgtcgttaactgcatcatcatcggccgtgccgaagcgttctgccagaagaacaccgtcgcagcatccttcttcgacggcatcttccagggactcggctacaccgtcgtgcttatcatcatgtgcctcatccgtgagcttctcggcttcggcaccatcgg

SEQ ID NO: 4063 - DNA, 21779 bp, synthetic construct
  source 1..21779: mol_type = other DNA
  misc_feature 1..21779: note = Synthetic
gccacagcactgtggccgagtatcagctgaaggaaaacggcgggattgtcagccgcggtacaacgctgtttgtcaagccgaagcatttccattttgcaaagccgagctacaaggcaacggtcaccgagaagggcgatacctacgcactgcatatcacggcggatacctacgccagctatgtggagctgaacttccgggatgtggactgtgtgctcagcgataactactttgacatcactggcccggaaggcgtgacggtcactgtggacaaagcccagcttgccgactgcactgctgcagatttgcaggagcaactgcatatcctgagtgtcgcagatacctattaaagggagagcagaaaggagtatcgtatggataaggaacttctgcaccagttagaaaccccctgcgttgtgctggatacccgcatggcagaggaaaacatcaaaaaaatgcaggcagcctgtgatgcctgcggcgtcaagctacgcccgcatatcaagacccataaaatgccgctgtttgctaaaatgcagctggcggccggggcggatggcgtgacctgcgccaaggttggcgaggccgaggtcatggcggacggcggtgtggaggatatcttcatcgcatatccgatggtcggtgcgttccgcgtgcgccgggtcattgcattggccaagcgcctgcgccgcctgattctgggcgttgacagcatggagattgcacagccgctgagcgccgccgcgcaggaagccggtatcacgctggaggtacgccttgaggtggataccggcgccaagcgcaccggcgtggagcgcgacaaggctgcggcgctggctgtggccatcaatgcgctgcccaacctgaagctgaccggaatttataccttcaagagtctggtctaccatgacgccccgacgctggataaggttgaagccgctgccgaggagggcgagctgatgcagcagattgccgaaagcatccgtgcagcgggcgtgcccattaccgatatcagcgctggctctaccccgaccggcattgaggttgccaagaccggcaaggtcacggaggttcgccccggcacctacattttcaatgactttatgctgaccaaggagggcgcggccacgctggatgaaattgctgtccgcgtttatgccacggtggtaagcacccccagcccggaatatgccgtgctggacggcggcacaaagaccttctacatggatattgtgcccgagacgccgccctactattacccgggttatgccgtggtggcgggcaatgatgatttgcagctgctgcgtatgaacgaagaacacggtattcttaccagcaagaagggcaacaccggtctgcacgtgggcgatattgtggagctgattcccattcatgtctgcacaaccatcaaccagcagaacgaagtttacctctatgacggaaagaccctgcacaaagaaaaggttgcggcaagggggatgctggtatgagaacactcatccggaatggcgtggtctatgatggtaccggcgcgcctggctttgctgccgatgtgctggtacaggacgatacaatcgaggccgttgccccggaactggacgccgaggccgatgaggttcttgacgcggctggaatggctgtgacgccgggctttatagacacacaccgccactgtgacacagcggcactgactgacccggattttggccgcattgagacggcgcaggggctgacaaccatcattggcggcaactgcggactggccccgctgcctgtccgccccgagacagcccggcagatatccgattatatcgagccatgccttggccccacgccggaaaccatgcagatggcgcattttcccgagtatctggatgcgctggacaagaccgacaagccgctgaatatcggcagctatgtgggcatcggcacactgcgggcctgcgttaaaggatatggccgtgcaccgttcaccccggcggagctggactgggccagaggatatatcagcgaggccatgcaggccggtgctgtaggcttgaccaccggcattatgtaccagccggagtgctactcctcccgcaaggaatttgtttcactcgtcagcgcggcggccccctatggccgtgtgctggccacccacatccgcggcgagggggacaaccttgtgccaagtgtggccgaggttattgaaatcgccaaggaagcgggcgtgccgctgaacatcagccacttcaaggtgactggcgtcaaaaactggggcaaaaacatattggaagccatcgacctgattgagaaggcccgcgccgcgggacaggatgtgacagcggacttctacccctatgacggtggctcgaccacactggtaagcctgctgccgcccaccctgatgaaggacacaatggcggaaacgctggctgcattgtccacagcacaggggcgcgccgatgcacgccgtgagatttatgccgaccatccgggctgggacaatatggttaccgctatcggctgggagcgtattgttatcagcagcgtgacaaagccggaaaaccgccgtttctccaatatgaattttgccgttgcggccaagctggccgggtatgaggagccgacagactttatgtgtgagcttctctgtgatgaggacggcaaagtcggcattatcctgctgagcatggaccccgaggatgtggataccattgctcgtctgccgtggtcgatgattatttctgactcactctatggcatcagcgactgccctcacccgcgtttgtacggcagctttcccaaggtgctgagggactttgtgcgggaacgcggcgtgctgacgctgccgcaggccatccacaagatgaccgccatgcctgccgaccggttggggctgacagaccgcggtattctggcaccgggccgcaaggcagatattgcggtgtttgacccggcggtcatcaccgaccatgcgacctatgatgacccgaagcaactttgtaccgggctgcacgctaccctcatcaatggaaaagcagccatcgaaaaagattctctgtgccgcagggactgcggcgttaccatccgtaaataatcactgtgtgaaaaggagatagttactatgaatgacgtctatgcaaagctgaaggaactcggcctggaactgcctgctgttcctcccaagggtggcgtatattcctctgccaagcggtttggcggcaacctgatttacatttccggctgtggccctgtcattgatgcgcccgtcaccggccgcgtcggccagaccatgaccaaggaggaagcgcagattcagtcccgcaactcgatgctgaatgttctggctgtgctggaaaaggaaatcggtgacctgaacaaggtcaagcaggttgtaaagattctggtctttgtcaacagtgccgatgatttctatgagcagccttttgtggccaacggcggctcccagctgctggtagacctctttggtgaggaggccggtgccccgacccgttcggctgtcggtatgaatgttctgcccggcaacattccggtcgagacggaagctatttttgaagttgagtaatccgcaataaaacagaaggcgcacgttccctgaggatgtgcgccttttttgcaataagaagggaaaaggataatgacacctgtgtatcttgatactgcccgcccggatgaggaacgggtgcaggaccttgttgcacgcatgacgctggaagaaaagctctcgcaaatctgttttgcggcaccggccatcccgcggctggggattccggcctacaactggtggaatgaagccctgcacggtgtggcacgggcaggggcggcaacggttttcccccagtccattgcgctggcggccacctttgacatggagcttgtgcagaaaatcggagacatcacctccacggagggccgcgccaaatacaatgcggcccgggcagaaggagacagcggtctgtacaaggggctgaccttctgggcacccaatatcaatatttttcgtgacccgcgatggggccgtggccacgaaacctacggcgaagacccctatctgaccggcagcataggaacggcctatatcaaaggaattcaaggtaacggcccgcggctgaaagcggcggcctgtgtcaagcattttgcggcgcactccggcccggagcagggacggcactccttcaatgcagtggtcagtgagcaggacctggccgagacctactttccggccttccgccgctgtgtgcaggaggggcatgtggagggcattatgggtgggtacaactgtataaacggtgagcctgcctgcggcagccgtgcccttattaacgatttgctgcgggaggaatggggctttgacggctactatgtttcagactgtggtgccattaaagacttccataagggccacaagattaccgccagtgtggaggaaagcgcggcactggcgctgaccagcggctgtgacctgaactgcgggcaggtctatccccatatgcgccaggctttggcaatgggccttgtcaccgaggaggatgtggatgccgcggtcgcgcacctgatgatgacccggatgcggctgggaatgtttgacaaggattgcccatttgatgccataccctatgaggaaaatgatacgcccgcccaccatgcggtggccctgactgcagcagaggaaagtatggtgctgctgaaaaatgatgggatcctgccgctgaacgccaaatcctgtaaaaccattgcggtcattggccccaatgcggatacggtcgagatactgaagggtaactacaatgggactgccaccgagcactacaccctgctggatggcatacgcgccgtggcaaaggcggaaaacccggagttgcggcttatggtatcggaagggtgccacctctggcgagaaaatgtggaggcgctggccgaagcggatgaccgtcgcagtgaggcggtggcaatggcccgccgcgccgatgtggttatcctttgtgtcggcttgaacggtacattggagggtgaggaaggcgatgccaacaacagctatgccggtgcggataaagcggacttgctgctgcccctgccgcagcgccgcttgattcgggaggttgccgccgtcggtacgccgattgtgctggtcaatgccaccggcagtgcaatggcgctgggtgaggaagcagaactctgcaatgcagttttgcaggtgtggtacccgggtcagatgggtggtctggctgccgccgaagtgcttttcgacaaaatcaaccccagtggaaagctgccagtcaccttttaccgtacaacagaggaactgccgcccttcacggagtacgccatgcaggggcgcacctaccgtttcatgcagaatgagccgctttacccttttgggtatggattgtcctatacacggtttgcatataccggcctgaccgccgtgcctgcgccggatggcagctgcacggtgcgggcaacagtgaccaatgtgggtacacgcaaaggcagcgatgttgcacaggtatatctgagacttatcggtgcagcgggccgtgtaccgcgctgtagtctggcagcattccggcgtgtgacgctcgaaccgggtcagagcacagaactgcactttactctgccgaaaacagcatttgctgaatatgatacacagggacgtgaggtatacacagccgcagaagcggaaatctcactgggcggaggccagccggatgcacgcacagcggcattgaccggcatggttgtgcctacaacaacggtgaaatggggaggctggcaatgacaacaggttggtttgaagcactgaagcaggaggcggagtgtttggcgctttctatgccggaagaactgcgggagagctttaaaaagtgctatctgaacaccgccgagaccacggtgcagaccctgccggacggcagtacctttatcattaccggggatattccggctatgtggctgcgggattccgccgcacaggtgcaccactatctgccgctggccgcccgcaatgatgctgtatatggctttatcagcgcagtgctggccaagcagttcttctatattacaatggatccatatggaaatgccttcaatgccgggccgaccggtgcccactatgcccccgatcacagtggccagacaggctggcagtgggagcgtaaatatgaggtggattccctctgcttcccggtggatttggcgtggcagctctggaaagtaactggtcgcaccgaacacctgactggcgaggtacaccggggcatggccggtattgtgaaactctggcgtcttgagcagcaccatgaagagcagtcaggctatcggtttgaacgcgataccacccgtcagacagagacgctggcccgtggtggtctgggaacaccggtagcttacaccggtatgacatggagtggcttccgctgcagcgatgacgcctgtacctatggctataatattccagccaatatgtattctgccgtggtgctggattatatggtcgagattgcggataaagtctggcaggatgaagtgctccatgccggggctgccgccttgggcagggacatccgtgccggtatcgagaaatacggcacggtggaagatgcagagtttggcaaaatgtacgtttatgaagctgatggtcttgggcatcagctgctgatggatgatgcgggtgtaccggggctgctgagtgcgccgtactacggctattgtgataagaatgaccccatttaccgcagtacccggcgttttgcactctcgccccgcaacccatttttctttgcaggcaaggcgttgtccgggcttggcagccctcacacaaaaccggactttgtctggccgatgagcattattatgcagggcttcaccgttcagcaggaggaaaatctgtacgcccttattgaaatgatagcccacgccgatgatggcaccggctatgtccatgaaagcgttcataaggatgattcctcccgctatacccgcccctggtttgtctgggtgaactcgctgtacagtgaactgctgataaaaacctttgcaaagtaatttcgaacaaaatgattctataaggcaaaacgattttgcgtatttcaactatgaggaagaacggtaaggaggcactctatgtactatctgggcgttgatttgggcggtaccaacatcaaggctgcccttgtgacggaaagcggcgagattgttaaggaggcaagtatccctacgaacctgccgcgcacgggggaagaaatttgtgatgacattgccgctctgtgcggtcagcttgcgcaaggggagcgggtggtcggcattggtatcggctgccccggcacggtagaccacggtgtggtgctgtactccaataatctggattggcatgattttgccatggccgattatctgaaagcaaaaaccggtatgcaggtgtatatcggaaacgatgccaatgtggccgcgttgggcgaagcgctggcaggctgcgctaagggcgcggagagtgctgtgattgtcacgctcggcacgggtgttggcggtggcgtggtgttgggcggcagattgctgaccggctacaccggcgcagcggcagaacccggccacacggtgattctggacacaccagatgcccctctgtgcacctgcgggcggcgcggctgctttgagagctttgccagtgccacggccttgattcgcatgacaaaagaggcccgcgcagcccacccggaaagtttgctgaacacgctggctctcacaaagaatgctgtgacaggccgcaccgcgtttgacgctgcgaccaagggtgacgccgccgcgaaggaggtcgtagaccggtatacacggtatctcgcagtcggtgtggcaaatctgatcaacatctttttcccggaggtcatcgggctttcgggcggtgtagccaatcaaggcgaaaacctgctggctccgctgcgcgctgctgtagagccgatggtgttcggcaacgcttttgccaaaaaacacacccgtatcactacctgcacgcttggttaccgtgccggggtaattggcgcggcgctgctggcaaaacaagaggaataagtcatagcagaaatcaagctgaaggtaatcagcgcatcgggcgatacgctggctgtcagccgctccagcgagagcgtaccccttgtgcataccgccccttatgcggacgatgactggattgcgctggaatgtgatgagtcgggcctgttctgtgtggtgcagttggtggacacaatgcccccgcggctgatctacatcaaggagcgcggcatggatttcctgattccgcccgccgataaccacattaactacaatccgcgcagttttaccggcagcagccatctgctgcgcgtgcgtcttgccacgccggaggagattgtcgcgcggcgtaatctggcgttcaatccctatgactgccatgacagccgcattttttacccgcacgcttctgctaacattgaaacccgcgaagaggccgtgtttgccgcccgcaacgcggtggacggtatttacgagaatgacgcccacggcagctggccctatcagagctggggcatcaaccgcgacccagatgccgccctgacaattgattttggccgcgctgtgacagtggatgaaatccgcttgacactgcgggccgacttcccgcatgacagctggtggacgcaggccaccgtcgaatttgtcgacggcagccgggaggtgctgcattttaccaaaactgccgccccgcaggcttttgccgtcactccgcgcacggtgcagagcctgaagctgtttgagctgaaaaaagatgacaatgcctcgccgttctcggctttgacgcagattgaggtctgaggaacggaagctgcgcttggtacagcaccctgatgtagagtagtacaggtaacataaccttgtttgcgcgaatggattcatcatgttgatgaagcaaatttattataccgtcttggcaaacacggttgcaatagtagagtgtactccccagtatcattttgtactcatgtcctatgaaatccgcagcagattaaagggcaaaattcctttttgcggataggataaaattatttagtctttatttagttctattagttatttagttgtgctgggtttaccggtacaggaaaatccagcacaggtaaaccctgtcatggtataaaaaatccccacaaaacgggggacttcaggcgtcacagtgatggggcgggcatggtgccgatgaggctggaaagcgcccaaacagaggcgtttctcgcggcaatgcgggcagtaatggcgatggtgcaggcgggtaatgacaccgctgcaaaagctggctgaaatggacacggcatacaacttgataccggaaagtagaatttgttacttatatcgcaaggtcttgcccttgcgtgaacctcaagaaatttgtgctcacaataaaaccaaagttgcgcagataaatgagcaccagagagaatacttttcttgaacgccagcctgattttgcccccaaaactgcccccaaaagcatttgggacaggaggatacggtgaggaattattagtacatatgggacaaaatccatgcggaggtgcgggacaggatatcaccataccacacaaaaaagtacagtaacgcactgactttgaatttctcataacccggaggtcgcaggttcaagtcctgtctccgtaaccaacaaaagtgcgttgaaacgatgagtttcaatgagcttttttctacattatggcaaaagtggtaactagctggtaactttgaccccaaaatgaccccaaaacggcaaacgactgcgcccgggcggttgaacttttcaaccgcccgggcgctttttgtggataaattttgcggagttggcaggtaaaaataggagcggtcagcgtagtcagctcgctttgacgagtaccaacacgctgttctgcggtacgacaatttggtcttgtttggtgggaatgggtgggttcttatattggcgcagggctttttggatttgctgcttgacctccagcagggcggcgtccagcgtgggggcttgtgcggtaacttttgggaagtcgggaacatgggcagtgcagccgtctgccgagaatgtacaaagcacaggataaggctggttttctacggagatgctgtactgcatcccgaacatatcgtccattttgtccatttcgcgccgcttgtgttcatccatgctatggacgtaggtatccatagtaaaggctacagaatagtgccccagaattgccgacagcgttttgtagtccatgccgcgctccagcgcacgggtggcgaaggtgtggcgcagggcgtggaaggtaaagtgcccgatgtcggcatccttcaacaggcggtcgtagtaatccttgaaggttttctgctcaaagtagtgtccaaactcgttggtcactacaaagccgttgtcaaggtacttgtcccctgcccgctgcttacccagtatatcgccagctttatgctgaactatatccgcggtcatcttgcttttgctgcgcatcctatggcaggcaaaaagcgggttatcgccgtaaatggtgctgtcacttcgtttctgcgcaagcgctggggtattgccaaggtgcgcgcagacggcgatttacaccacgcggtggatgcagcggtcatcgcctgcacgacggacggtatgatccaacgggtgtcgcggttttatcagcgggaggaactctcccacgcacggggagagcgtttccccgaaccgtggccgcgttttcgggatgaattgatgcagcgcctgtcgtcctgcccgcaggaaaacctgctgacgatcaatccggtttattataccaccgcggatatagcgggtatcaagccggtgtttgtttcccgtatgccgcgtcacaaggcaaccggacccgcccacaaggaaaccatcaaggggcgcttggacgacacctatgtgacccagcgccgcagcatcaccgacttaaagctgaacaaggacggcgaaattgacggctactttaatcccagcagtgacaccctgctctacaatgccttgaaggatcggctggtcgcctttggcggaaacgggaaaaaggcatttgccgagccattcttcaagccccgcgcagacggcacgccgggtgcgcaggtacgcaaggtcaagctttacagcaaggtcaccagcacggtgccggttcacggcggaaacggcgtggctgacaacgataccatggtgcgggtcgatgtgtattatatccccggggatggctactattgggtgccgatttatgtggcagataccgtaaagccgattttgccgaactgtgcatttgtcaggtgcaaaaacagcatcattaagaaggaaatgtccgaggaaaatttcctgttttctctgtgcaaaaacgatctggtttgtatagagagcaagcgtcccataaagctgaaggcagccaacgaggacagcacgctggaaaaagagctgaccgtccagcgggtgcttgcctattttgagggcggtgacatctctaccggcgccgtttccgtaaccacgcacgataacgcttatattgtcagaggtctgggcttcaagactctgcaaaaggttgaaaaatatcaggtcgatgttctgggcaattatacccgcgtaaaaaaaagcgccagctttttcccgcccaacggaggtgacgcatgtcttaccgctgccttgcgggtatatggtgcgctgcttggcagtatacggctttttgccatggctggggctgcatcacgacaacgaactgaaccagtttaatctggcggacgatctgatggagccttttcgcccggaagcggatttgtatgtagctgccaatgtggcagaggatgccgccatgacccccgggctgaaaggcagccttgtcaatctactgaatgttgatattctttccggcgggcagcaccacagtgttgcctatgcgatggaacggcttgtgcaaagcctgcgcagccaaccgctgcagctgccgaagctgttggaatacaagcagcacagctatgagtaagtttatgcgaatgatcgtattttttgatctgccagtgcaaacgaaagctgatcggcggcacgcaaccgtctttcggaactttttgctgaaggacggttaccatatgctgcaattttctgtttatgcgtgggtgtgcaacggaaacgacgccgtgaaaaagcacgagggacgtctgcgggcttccctgccgccgaacggctctatacgcctgcttgtcgttacggaaaagcaataccagtccattcaaattcttttgggaaattatcagccggaggacgctccctttgcctgtgagcagctgagttttttctaaacaaaaagcgcatcggaccgcaatccgatgcgctttttgcatagcctattataccataccaagagctattagggaactatgacaacaatcttgatgtggatgaacggattctgattataaatgttttgtaataactccgcgaacattgttaccggggaaatgccggattcttcgattgtgggtaaactcgccgttttcatccagcagctcgccgaagcgcagcttgatcctctgcccggcatgggcggttacggtaaattccactgcagccggggctgtgtgtgcggcttttttacggcttggcgggggttatggggcctcggtgccccatgcctcaagcagggtcagcgcggggaacggggacgggtcctccgctttttttagctcaaacagcttcaggctctgtatcgtgcgcggggtgatcgcaaaggtctgcggggcatcgtgtcctcgagctgcaccacacagtacagacccggctcgtcgcattccagcgcaatccaatcgccgtccgcgtagggtgcggtgtgcacaagcgagatgcgctcccccgcgcggctgacggccagcgtgtcacccgctgcaccgatgactttcagcttgatttctgccatgcttcacacctcctgctttgccagcagcgccgcgccgatgacccctgcccggtagcccagcgtgcaggtcgtgatgcgggtatgctttttggcaaaggcgctgccgaacaccatcggcgctgcggcggcgcgcagcggctttaaaaggttttcgccctgattggccacgccgcccgacagcccgatgacctccgggaaaaagatattgattaggtttgccacgccgactgccagatggtggatgtagtcgtccgcaacggctttggcagcggcatccccctgcgcggcggcatcaaaaacggtgcgcccgttgacatccgcttcggtgggtgccagtgtgttcagcaggctttccgggtgggtgcggcgcgccgcgcgcgtcatgcggatcagtgccgtggcgctggcaagggattccagacagccgcgccgcccgcaggtacacagtggggcatcgggcgtgtcggcaattaccatgtgtccggcttcggatgctgcgccggtatagccggtcagcagctttccgcccagcacaacgcccgcaccgacgccggtgccgagcgtcagaatcaccgcgctctgcgcccccttggcgcagcccgccagtgcctcgccgagggcagccacattagcatcgttgccgaggcagaccggcagcccggttttggcttgcaggtagtccgccatagcaaaatcgtgccagtcgagattgttggaatagagtaccacgccgtcacacaccgtgccggggcagcccacaccgatgccggcgaccggctcccccgcgccgagctgcagacacagcgcggcaatatcgtcacagacctcctgcgccgtgcggggcaggttggtgggggtggcggcttcccttacaatttcgccgttttcgcttacaagggcggctttgatgttggtgccgcccaggtcaacgcccagataatacataaaaaaatcctcctcagatgcccatccattcgtcctgccagttcaccgtaggcaagccgttttcaaaggtgacgggcaaaatcgtgtagccggaactgcgcagatcgtccgggtgccagtggtcaagcagaaggtaaggctgaccgtttgcggcaaacacggcggcgctctgcgcaccgaaggtctgtcgtgcgccggggccgcggcaggggtcgtcaatcagccgccagctgccgaaaatcgcgctgctctcggcgtacagcatcgtgttggggctccacccggtgcagcccgatgaaaacatgagatacttctcgccgctgtgccacagcgccggggcctcgcgcgcctgatcgatcaaaatttccttgccgctgccggtccattttgtgtaggctttgtccagctcccagacgcgcatggtggcgttccagtcggacgagcagaacaggtacgccctgccgtccctgtcctgaaacgccgtgaagtcacggctgtcatggctgccggggcgctgactgcccatgtaggcgaacggtccggtcggggtatcgcttacggcaagcccgacctcggcgcgggtgtagcggcggttatccagatgaaaccacagcacaaatttttgcgtttctgcgttatatagcacgctggggcgctcgcagacgctgtccgggtgcaggtcgtgtcccgcctcattgacagcagagagcacaagaccgcagttttcccagtgcagcaggtcgcggcttttgtagcaggaaaacccgacaaaatccacgctgcggttgtgcgtgtcggtatccttgttctcaccgtaccaataaaaaatgccgttgtgctgcaaaatgctgccgccgtgcgcctgaatgccgcgcccgtcggtgtcaagccaaagtgttccgtttttcatcgctgttcctcgtagtcaaaaaaggcaaaatccgcgtggctttggtgagcgtccatatcctgcgcacagatgccgaccatcgcgccggtgaaggcgcaccgcccgcggcgggtctcgacataatcatcgctgaggtggtcggcgggctgaacaccgcccaagggctgccaatcgccgtctgccctgtaataaaactgcgcctctgcgccgtttacacacgccttcagcgaaatttcgccgtccggcagggggatcgccttgctgccgtaggtgaaatccttgtagtcacaccgcagaatttgcagcgtgcgggcgttgatgcgctcgtccatgtgatataggcgtagatccagttgcaagtgtcgtagaacagcaccagccctgccacctgctggaagttttgcggtgcaaagtcgattttcgtctttgctgtaaatgcaaaatgctgccagcgacgggcaaacagcgtctgcttgtggtggctggaaagcgtctgcccgccgtagagccgcagccagccggggcgggcggtcaggctgtaatcggtttcgggggtcagcggggtgcgcaatgtcttaaaggtgtggggcaggtccttgtccggcgcaaaggtcacgcgctcgctgtggtcgagaagctgccggacattccctgccgctttcggcgcgggaatgaccaactccgggtggtgcgtgccgttggccaggcgcggccagccgtccgcccattcaattttttgcagggcggtttcgcgccccagcgtgcagtttccgcgctccgtcagggggcgggcgcagatgtgggtgatgtaccactcgccgccgatctcgacaaaacaggcgtgaccgcttttttgcagcgggttggcagcatcgtcccgcgcggtcagcagtgggaaatagggcgaatcctgccacgggccgtccagcgttttggcgcgcgcgactgtggcggcgtgcaggtagcccgtgccgcccgccgcgcagagcaggtaataccagccgtcctttttgaggatctgcggcccctcgcagacacctagagatgtgccgcggtaaaaatgcctgcgctcacccaccagctgccgtgtgacggggtcaaactcctgaatgacagtcccggcaaagccggggttttccagccgccagtcaaacagcatattcaagaaatagtggcgtccgtcgtcatcgtgaaaaagcgccgggtcaaagccgctggcggtgacaagggtcggttcactccatgggccggtgatttttggtgcagtgacgacatagttcagggtgtccttgaaggcggtcgagcttttgacatcggtataaaccagccagaacagcccgtccgcgtaggaaagatgcggcgcccacaggctgccggaattgtagttgccaagcagctcactggggaccatatcgcgccgggcaatgggcgcagcggcccactcccagttgaccaaatcttgggaatggtaaatctcaatgccgggccaccattcaaaagtagacgtagcaatgtagtaatcattgcccacgtgcagggcgctggcatcgggcgcaaagccgggaaggatcggattttgcagggtgttcatgttacacctcgttttctaagataaaggcggcggcgtcaaaatcggtaagcccgtgtacggtcagctggccgtcaaggtgcgtcaccgtcagaccctcgcgcataaactgtgcggcgattttgccgcccgccggcagggggacggcctcgggcgctgcgccgaaggtgtgtacaacaacaagcgtctgcgctttgccgcgccgcacaacggcctgccagcccttgggggcgcggtagctgacgatgcgggaaccaaaccgctggctgacgccgtggtctatgatggaggccgccttgccgtaaaatgccgtgccttcgtccataacagtccactgcgctgccgagagggcgtccggctcgccggaaaagcagagccgccccaaaagcccgctgcagatttggtagtacagcttttgcagcggctgccccgccttgaccaccgcccagatctggctctggcgcggtaggatcatgcggtgcatattggccgcaataatcgggatctcgtcgcactcgtgcgcatcggaaaagctggccatacaggcaagctccaagaagctgtggcagagccgatgcccgcccgatgcacaaagctccagcacaaggttcggcagctcgcgccggatgcgggcaaagaacacctgtgtggcaagaatctgctcatacagcccttcgcccagactttccgcaccgtcacagccaaggccgatggtttcgttgtaatcgaccttcatgtagtcaatgccgttggaacgcagaaaatcaatgaccctgtgcgccagatactcctgcacctcgggcttgcgcatatcccaaaagcggcggtcacctgccgtgatgggccgcccgtcgcgggtcagcagccagtccgttttggtaaagcagtccggttcgtcccgcccggccatctcaaactcgaaccagatgccggccttcatcccggcgttgtgaatcgcgtccacgacatatttcagaccgtgcgggaacgccctgcggctcagctcccacctgcccaatttggctgccgcctcaaaggcgtcatcatcgtaccagcctgcgtcaatgacatagtagcccaaatttttgcccttcagcgcgcggacatggcgcaggacggtttcctcggtgggcttgccccatgtggagcagaattcgttgaacagcacaggcagggtcttttcagatgcgggcaaaagcggctcgatggcgcggcggggggtttgcgccgccgtatccacaccgccacgcacggcggtcagcaccgccttgggtgcggtgaagcacgcgccgggggcaagggtcttgcaccatgcgccgaactcccggtctgccaccccgcccgacagggacagcccgaaattctgccgatacagctccatctgccaactgctgccctgcgtggtggcggcggcccatgtcacgccgtgggcggtgtcctccactgcgcagaacggcacaaagccgcgcacgggaaagctgcccacactgccgaaccgcacactgttggcggagtagcacttccagctcggctccagctgcagatcctcggcagcttcggtcaccaagcgcccctcggcgctccatgttgaacgcagacggtgaatcttcagggtttcgggcgcaagcccttccgaaaacggcgacagactgcccagcgtaaagctggacagcatctccagcgtgtgggcttcgctgccggtattttccacactcgtcacgacctccgcggcggggttgtctgcgtacagcgtcagggtgtgggtgtaggcaagtccgcgggcatcggtcagtgtggtcagaatgactgttttatcgtcagatttttgtacagtctgcccattgaacacaatggcgcggacggtggggctgttgcgcatcgtgcgcccgccgctgaaaaaggcgggtgcatcgtccgtttccagctttgcctgcaccagcggctcggcggcgcaggcggtgcggacaatatccccctcacagccggtgggaaccagcaccagctcgaccacgccggtttcgctctcgcggcggtaaacggcggtcagcccgcccacagaaatgctgctgataatctcacgcataacaggattcacctcgtataaattcattgggtgtcaggttgtgccgtggacaaaaaccaccgcccacggtgccaagggaagtgtcgtgtgcaggcatccgttttcatctgcctgcagcgtggttacggcgcacgcttcggcgcaggtgcgcagctgctttgtctgttcaacagtcaggttgcccgggcagcccatggtgtgccacagggtcatggcatcgccgtggtcggcgtccagcgtttcgactgtcagccttgcatgaggctgcaggccggaaagctgtaattccagcagaccggctgtgccgtgctgcaagacagcgcgtgccgccgcgtgatccgggtaggcgcacatttccacggcttttttgtactccggcggataattccatgccatcagccgcaggctgtccccttgcaccgtcgccagaaaatccgtgccctgcgccagcaggcggtttcccaaacggtgcagcatacggtagacatggtaggtcggtttgggaatgccgttgaagttcaccagtccgaagccgccgtgatatgcgtcatggccgccgcccaactcctcgaaaatatcactgaatgtccagtaggacaaaccgttgacctgcccattgaccgaagtcgcagcgtcagccacatagcaggcggcgggcagttcgtcgtggctgcaatcgcggctggacggcgaactgctccattccgtcagccagagttcggcatcgggataggcgctttccgcaatcacgcggcgcagccacgcaacatcttcccgcaggctttcgcgcttgcgggttctcttgcaggtgttgccgtaaccgtccaaggcccagtcggtgggataagggtgtgccgaaacaaaatccaccggcaggtgattctgcgcacagtaatccagaatttcccgcacccagacgccgtgccacggcagggcgtcaatgtcatcaacaaaggcggttttctgcgcggttatatcctcggtttccccgtcaaaacggctgtccggcacaaaattgctggtggccggtccgccaacccgcaaagctgtgtcaacacccttgatggcctgcacactggccttgtacagggcaaaatattggctgcgggtgccgttccaaaaagcatgcaggtcagcttcattccagatctcaaagtaccacttgcggacttcctccgggccgtagcgctccagccagtggcggcacagtgcggccagtaaatccgcccattgccgcaggtcggcaggcgggtccacgcggccctgccaccagaattgtgtctgtgtgccgcttgccagttccgctgggcagaagccaaactccacaaacgggcggattccgatggaaagcaggaagtcaaacaggctgtcgatgtactgccagctgtagcatagttcaccggcatcgttgcgccagacaacatgcatatcgtcggtcaaaagaccgtgaaagcggatatagcggaatccacagtcctgcaccgcgcggcggagctgctgctgccagtctgcgcgcaatccctcacaggcgcggcccgctcccacgcaggacgaaaaattatgggtaaaaggctgccccggctgtgccgcattcacggtggttttgattgtgtacatagttacattcccccattaccacagataaatctcgtccccggtcagcttgagaagcgcctcatagaaatagtaatcgccgtaggtgaagttgatgttatgctccttgccgtggtagtcggcactgcaatattgcaggtagccgtcgcggctttcgtcccagtcggcggtatcgtccagcgcgtgcagcattttcagcgcgggggtcaggtattcgtcctgcctgtccggcacaaggcttgccagctcgatcagaccgcaggcggccacggcggcggcaatgtcgtcataatatttcggttcggcgggctggcagaagtccaccgggatgcgcccgtctgcagggatatgcgcgataaaatactcagccaccttctgcgccatggccagataccgcaccgcaccggtgtgcttgtagctcatcacaaagccgtagagcgcccatgtctgcccgcgcgtccagctggagccctgcgcgtagccctgcccgccgtaatcgcggacaaacgcgccggtttctgggtcaaactgcacgatatggcgcacactgccgtcctcgcgcacaaagttggcggccacggtatcggcgtgggtcatggcgattttcttaaagcgaggatctttggtttcctcgctcgcccaatacaaaagcggaatgttgaacaggcagtcgatgattgcccagccgcgggtatcggtgtccgggtcggggaaatcgttccacgcgcggatataccctgccgggttgaaccgcccggccagcagctgggcggcgtgcagaccgcggcggcgggcatcggcatcgccggtcaggcggtagtctgccacggcgctgggcagccacataaagccgacatcatggtgcaggcccaagtaaatgttgaacgcttcatccaggcggcgctcagtatagcgggcaatctctgcatagcggtcatcatgggtcgcgtggtaggcctgccacagcatccccgcccaaaagccgtttgtccaccagcagatgccgtcggcgtcatcgcggttcccctcaaatattttgttgttgtgtacaccgtccaccgcgcggttggggattttctcggcgctgcgctcgcgcacggcgcgcagcttgtgctcaaagcgtgccgccgtggtgctggcccagttcttttcggatgtgttcagattcagcatggtgattctccttctataatcagtaatgcgtcccgataacagggagcctgttccaaatgtaagacccctgacttgtacaggcagtgcgccggcagtgtttttcgggtttccaaatctataaagtatattttttgcacagaaagggtatctgccagtggtagcggtgccgctgtgggcagatacagcacggtgcgcacaccgctgcgggcggcgggaatctcctctcggtaggcaagcagcacctccgggcagggggtaaaatcccatctgccccaatcctcacatagtcgtcgggcaaatgcgaaatcctctgcgccgggcagccccaaagcgtccgtgcaaaggggcgcttgcaaaaatccctcgccgctgacgggattctccggcatatcgggcttataccagttccagacgccgtgggcgccgtaggtgatgcccgcacaagcacccgaaagcagacttgtccaaaggatacggcggcagtcctcccgccgatggcgtccgtaggcc

SEQ ID NO: 4064 - DNA, 21635 bp, synthetic construct
  source 1..21635: mol_type = other DNA
  misc_feature 1..21635: note = Synthetic
cggccatatctacggtctgtgcaaagagacccccatctttgcagatttgatcggctaccgtgtcgaccacttcaaggcggcaggcattgaccctgactccatcgtcaccatcgatgactttaccaaggcactggaaactttgaaagcctactacggaaaagacaaccccaactactacccgttgaccggtcgtgacaccgccatccgctttgcttcgtggttcggcgcagccagcaatatctcttctaccgagtccaacggcatctatatcaacggccactacaaggatggctctatcgacattatgaacgatggcgcctacaagatggtcgagaccatgaagaagtggtacgacgagggcctgatccaacctgaatgggtcgcaggtactttcggtgaagccgactgggaggctgccatgctcaacggcaacggcagtgttttctatgattactacaaccgcgccgaatggtttatggagaacggcggccccgacaacgaccccaactaccagatgggtgttctgaacttcatcaaggacgataacggcaacccgcagaagatgaccgtcagcatgaagtacaacgatgagtgcgtcaccgccattaacgccaactgcagcgaagacaaaatcaagacgattctgacctttatcgattatttctactctgaggaaggcgagatcctcgccaactacggtgttgagggcgaaagctttaaggataccaacggtgataaggaatttatcgtagattatcagactgaagaggctactcctgccggtgagaagcgctggagtttcctgagtgaccgctttaccgtctgcaagcccgttgacaacgaagccttcttcaagtggaatgcgcctctgatcgctgaggcgaccggacgcctgtttacagatgaaaacttgggtacctcttatgttctgaagttcaccgatgaccagagcaaggaagttacaaacctgctcgcttctgtgtacgatgcacagatgtccggtattgcgcagttcattgatggtgcgcgcgaactgactcccgacaactgggcagctttccagcaggaaatgaatgatctgggcctgtcccgcattgaagaaatccagctggcagcttaccaagtaatgtacggcgcctgatgccttgacaaaggtaatatcctgaacaatcagccctgcccgacaaggcaaactgccatgcgggcggggttgccggggtaaagtgaaaggagaatccccatgccgaagcgcaaaacacaaacggcggtgccagccgtgccgaaagcatccctcggtacgcggataaaaaaagatattatcaaaaattatcagctgtatctgctgatgataccgggtttcctgctgctgatcctgttcaaaatcggaccggtcggtgcaatggtgattgcgtttgaggatttctcagcagccaaaggcgttttcggcagcacatgggtagggcttgaaaacttcaagcgcattttgcaggatccatatatctggaaaatcaccaaaaatacaatcgttctggcgttcctgtctgtggtggttgtattccccatcccgattatattttcgcttttcctaaacgaagttcgtaccaagtgggtgcgcaatacggtacagtctttgagtttcctgccatatttcatctcggcagccgtcatggtcagtatcatgtacacgttgctctcccccacttcgggcctcgttaatatcgttatcaccaagttgggtggcacaagcacaaactttatggcaaaaccggaatggttcaggccactctatgtgatattggaaatctggcagacgttcggttactcggccattatctatattgctgccatgatgaacattgaccccactttgtatgaagcggcagagattgacggcgcatcccgctggaccaaaatgtggcgcatcacactgccctgtatttctacttctgttatcacgatgcttatcatcagtgtcggcaatatcttctccgtcaacttggatcgtatcctgctgatgtataacacaggcacttatgccacggctgatgtgatccagacgtatgtttatcgcattgcattccagtctacgggtttcccggattacagctacggcactgcggtcaatgtattgaagtccattattgcctttgtgctggttttcatcgttaacaagattgccgataaagtcagtgacgcacgtctgttctgagaaaggagcgtataggctattatgagtaagcagcccaagtcccatctcaaacggctggcgatgtttgattatatcaacagtgcaatcctgctgctggtggcagtgtgctgtgtgtatccgttcctgtatgtgttctttgtggctaccacggatggcacctatctggcgcgcggcgaaatgactttcttaccgatgggcttcaacttgaaagctttcggctatattctgacaaacccgcgcttcaatgtgttcgccggtatgcgaaactcttttttatatactgcgctggggacactgctggcggtagcctgcacctacgttacggcgtatgtgctcagccggccgcgttttaaacatcgttactggctgatgtccctgttcatcattacatgggtatttgatgccggtatcattccgcagtatatcatttacaaccagttcggctttgtcaatagtccgtgggtcatgatcgtgcccggcgcgatcaacacgcagttcctcatcatcaccaagacattcttggagggtatccccaacgaactggaagaggctgccgttgtggacggtgcaagcgacatcaagatcctgacccgagtgttcctgccgctttcccccactgtgctggcgaccacaggtttgttctacgcagtatctatctggaaccaataccttatcccgcagatttatttgaaagacgacgccatcaagacgatccagcaggtgttgaagagtgttgtcattacagatggcagttccggaacaactttcaaaaatgtggtgctggacggcgttacgctgaatcagcaaaatctgaaagcagccgcgattttcatcgccatgttgcccatcatctgtgtgtatccgttcgttcagaagtattttaagaaaggtattctcatcggctccgtcaagggctgagaaaggattgaaaaatggctcgtaacattactgatctgccaacgctgggcgatgacggtagactttaccgtgataccgctctcgatttggtggaatcccttatccccaacccatggaaaagctgccatgcacctgatttgctggaattggaaaacggcgatctgctctgctgctggtttgccggttcccgtgagggaaacgccgacatcagcattgcggtggcccgcttgcctgccgacgccgaacagtgggagcagccggtcattgtctcggatgacccgacccgcagtgagcagaacccctcactgttccaaaaccccaacggtgacatttggctgatgtacacggcacaggcggctaaaaagcctgatgacaacagtgacgacagcctgcagggcacggcagagatccgccgcaaaatttcccgcgatgggggccgcacatggggccccacggaggctatgtttacccgtcccggctctttctgccgccagaagattcaggtgctttccaacgggcgttggatcttcaacaactttatctgtgcgctggacggtacccgtttgggcagcgacgtgacggttatccagatttccaatgatcagggcaagacatggcgcggggtggaaatccccgaaagccgtggccgtgttcacggcaatgttattgaactggaacccggcaaactggtctgcctgctgcgcagccgtgcagccgaccatatctaccgctcggaatccaatgacaacggcgaaacatggagcgtgccggtacccaccccgctgcgcaacaacaacgccagtatctcggccatcaaactgcagagcggcgcacttgccatcatttataatgatgtctctttcaatcaggatggtagccgtaccgtctggcccgaccagcgatgtcctgtggcgatggcactttccgaggatggaggtaagacttggccgtggcgccgtattgtggagcacggtgaaggcttcattggcccttggaatgatgtgaacaaccgccgttatgagtacccggttatgatgcagagcaaggatggcaagattcacgcggcttatgcgtggggtcgtcgcgtccgcatcaagtatgtctgcgtcgacgaggcgtggatccgtggtgaaaaggtctgcaagggtgcggaggataaccccgaaatgccctgcaaccgttgataacccgcatcaatgccctgtggtttttgccgcagggcatttttggtaaggaggctcttatgctcagcccagaaaaacgcgcctgctggcaggcgttgcagcgtcaggctatcaccctgacgccgcaggagaaagtgcagggcggcgatatgcccggcgacacggtgcgcattacggctccggtctgccgccgggtagaaaaactgctgccccacctggccgctaaattagaagaaaaatacggggaatacatccctgcgaaactcgttatcgcaatcagcggcgggtccggctccggcaagaccagtggggccgtcgctctgcgggaggccctggcccaggtcggcctgactgggtatgtgctctctggggacaactatccccgccgcatccccgagcacaacgacgaggagaggctagcaatcttccgcagtgtgggcttgaaagcgctgctggccgccggggcatacacccccgaacggttcgtcgccctacagtcgctgcaaaaagccggaaccgacagcgacccgcagcagtgcgaagcatacccctggctgcacatctatcaacagggcggccgcgccgcattggcagggtatctcggccaggtggccgagcaggattacgacgcactaaacgaagtgctggcacagttccgtgccggtgcgccggtgctgtggcttaagcgtatgggccgtaaagaatgggagcgctggtacgagccgaaggatgtcgctgatgtggatgtgctgctgctggaatggacccatgcaggcagtggaaatttggaaaatgcagatgtgaagatttttttcaacagcacgccggaggagacccgcgcctgccgtgtgactcgtaaccgggataccggggccgacagcccctttgtgacgatggtgctggaaatcgaacaggccctgctgaacggtcgtgcctgcgatgctgacctgatacaaaaccgcgacagcacgatgatcgacacggcggcctacgccgctgcacaagggaggtgaacatggtggcaaatgcgaaaaaagatgagctgtctctgacgccgatgctgaacgcttacccggacagtttgggcgggacgttaagtgacattgcagatttgctggaaagcagctgtaaagatgctttcggtgcgttttatattctccccagtgttttcaacacagatctcgaccgcggcttttcggttgtagactacagtttgaacgagttgctggcgacgccgcaggatttggagcgcatccgtgctttgggaatacggctgaaactcgattttatcctgaaccacgcctcggtcctgtcaccgcagtttcaagatcttttgaaaaatggggaaatgtcgaaatataaggacttcttcatcgactggaacgcgttctgggcgggctgcggcgagatgatgccggagggatatatacagccgacaccggagtgcttgcataagatgtttttccgcaaaccagggctacccattctgatggtgcgtatgcccgatggcaccgaaaaaccctactggaacacattctaccagcaggtagactacccttgccctgatgcgcgggagttggtgtccgaactggggatgcagtaccgatccgcctgtgtcctgacagaaagtctgcggatccagttggcggcgggtaagcgcccggcagaacttgatctgggacgctgggaaacgttgcgtgttcccctgaccgacctgttggaatcccgacgccgctatttggggcagatggatttgaatgtggcttcgccattggtgtggaaattttatgccgacacgctgcacacattggcagggtatggagcctctatcgtgcggctggacgctttcgcttatgcgcataaggccgtgggggaacgtaactttttgaatgaaccaggtacatggagtcttttggcacggctgcagacaatagcggatgctgatggtgtgaccctgctcccggaaattcacgcatcctatggggaaaaagtctacgaaaagctggcctccaaaggctatgccgtctatgatttctttctgccagggctgatgattgatgccttggagcggggcagtgcagacacgctggccgcatgggcacaggaaatcctcgacaagcacatcctgaccgtgaatatgctggggtgccatgacggtatcccgatgctggatctgaaagggttgctgccggaagaacgcatccaaaacctcattgatctgattgtgacgcgaggcggtatggtgaagaacctgcacggccagaaaaatgtctattatcaggtcaatgccacctattacagtgccttgggcgagagtgatgcaaagctgctgctggcacgggcaattcaactgtttatgcccggaaaaccgcaggtgtggtaccttgatttattcgcgggcaaaaatgactgtgaggcagtggctcgcgcaggcgagggcggccacaaagaaatcaaccgtacaaatctgacgaaagtgcagattgccgaggcactggaaaagccagtcgtgaaaaagcagctggaattgctacgcctgcgccgcaactgtccggcctttgcgcaaggagcaaaggttcaaattgaaagctgcggcccggaattgacgattgagtggagctgcagcggccatgtcgcccgtctgcaggctaatctgcaaaagttgacttacagggtcgaaatagagtaggaagaaaagctaactgatggaaactacaaacagcagggcgtgcggaggcgttgcattatagaatgcagatgtcaaggcggtctgtgcaaatgattaaagacaactggacgtaccgaagtatactctaagaggaaaaaagttcttggaaaccaaagcgttacagttgaaatgatatgtacgtactcttatcgacgtgcaattttctgcgagggtaaaattgaagaaattgccgctctgtgcggtcagcttgcgcaaggggagcaggtggtcggcattggtatcggctgccccggcacggtggaccatggcgtggtgctgtactccaataatctggattggcatgattttgccatggccgattatctgaaagcaaaaaccggtatgcaggtgtatatcggaaacgatgccaatgtggccgcgttgggcgaagcgctggcaggctgcgctaagggcgcggagagtgctgtgattgtcacgctcggcacgggtgttggcggtggcgtggtgttgggcggcagattgctgaccggctacaccggcgcagcggcagaacccggccacacggtgattctggacacaccagatgcccctctgtgcacctgcgggcggcgcggctgctttgagagctttgccagtgccacggccttgattcgcatgacaaaagaggcccgcgcagcccacccggaaagtttgctgaacacgctggctctcacagagaatgctgtgacaggccgcaccgcgtttgacgctgcgaccaagggtgacgccgccgcgaaggaggtcgtagaccggtatacacggtatctcgcagtcggtgtggcaaatctgatcaacatctttttcccggaggtcatcgggctttcgggcggtgtagccaatcaaggcgaaaacctgttggctccgctgcgcgctgctgtagagccgatggtgttcggcaacgcttttgccaaaaagcacacccgtatcactacctgcacccttggttaccgtgccggggtaattggcgcggcgctgctggcaaaacaagaggaataagtcatagcagaaatcaagctgaaggtaatcagcgcaacgggcgatacgctggctgtcagccgcgtcggggagagcgtaccccttgtgcataccgccccgtatgcggacggtgactggattgcgctggaatgtgatgagtcgggcctgttctgtgtggtgcagttggtggacacgatgcccccgcggctgatctacatcaaggagcgcggcatggatttcctgattccgcccgccgataaccacattaactacaatccgcgcagttttaccggcagcagccatctgctgcgcgtgcgtcttgccacgcaggaggagattgtcgcgcggcgtaatctggcgttcaatccctatgactgccatgacagccgcattttttacccgcacgcttctgctaacatggaaacccgcggagaggccgtgtttgccgcccgcaatgcagtggatggcatttacgagaatggcgcccacggcagctggccctatcagagctggggcatcaaccgcgacccagatgccgccctgacaattgattttggccgcgctgtgacagtggatgaaatccgcttgacactgcgggccgacttcccgcatgacagctggtagacccagggtaccatagaatttgacgacgccagctgcgaggtgctacatttcaccaaaactgccgtgcggcaggcctttgccgccactccgcgcacggtgcagagcctgaagctgtttgagctgaaaaaagatgacaatgcctcgccgttctcggctttgacgcagattgaggtctgaggaacggaagctgcgcttggtacagcaccctgatgtagagtagtacaggtaacataaccttgtttgcgcgaatggattcatcatgttgatgaagcaaatttattataccgtcttggcaaacacggttgcaatagtagagtgtactccccagtatcattttgtactcatgtcctatgaaatccgcagcagattaaagggcaaaattcctttttgcggataggataagattatttagtctttatttagttctattagttatttagttgtgctgggtttacctgtacaggaaaatccagcacaggtaaaccctgtcatggtataaaaaatccccacaaagcgggggacttcaggcgtcacagtgatggggcgggcatgatgccgatgaggctggaaatcgcccaaacaggggcgtttctcgcggcaatgcgggcagtaatggcgatggtgcaggcgggtaatgacaccgctgcaaaagctggctgaaatagacacggcatacaacttgatactggaaagtagaatttgttacttatatcgcaaggtcttgcccttgcgtgaacctcaagaaatttgtgctcacaataaaaccaaagttgcgcagataaatgagcaccagagagaatacttttcttgaacgccagcctgattttgaccccaaaatgcccccaaaagcatttgggacaggaggatacggtgaggaattattagtacatatgggacaaaatccatgcggaggtgcgggacaggatatcaccataccacacaaaaaagtacagtaacgcactgactttgaatttctcataacccggagggcgcaggttcaagtcctgtctccgcaaccaacaaaagtgtgttgaaacgatgagcttcaatgcactttttctttgtctggggaaaaagtggtcacttttcggtcgctttgaccccaaagcgctaaaatgactgcgccccggcttctgaatttttcaacagctagggcgctttttgtggataaattttgcgcagctggcaggtaaatataggtgcggtgtggctaccctaccccgctttcaccagtaccaacacactgttgtccggtacgacaatctgctcccgtctggtaggaatcggtgggtatttgtactggtgctggaccttttgaatctgctgcttgacttcaagtaaggcagcgtccaatgtggcggcatggattgcgatttttggaaaatccggggtgtgggcagtgcagccgtctgctgcgattgtacacagcacagggtaaggctggttctctaccgagatattatactgtacaccgaacatatcgttcatcttgtccatttcgttgcgcttgtgttcatccatgctgtggacataggtatccatagtaaaggctacagaatagttccccagaattgccgacagtgttttgtagtccataccgcgctccagtgcgcgggtggcgaaggtgtggcgcaaagcgtggaaggtaaagtggccaatgtcggcgtctttcagcatacggtcatagtagtctttgaacgtcttttgctcaatgtaatggctgaactcgttggtcactacaaagccgttgtcaaggtacttgtcccctgcccgctgcttacccagtatatcgccagctttatgctgaactatatccgcggtcatcttgcttttgctgcgcctcctatggcaggcaaaaagcgggttgtcgccgtaaatggtgctgtcacttcgttcctgcgcaagcgctggggtattgccaaggtgcgcgcagacggcgatttacaccacgcggtggatgcagcggtcatcgcctgcacaacggacggtatgatccaacgggtgtcgcggttttatcagcgggaggaactctcccacgcacggggagagcgtttccccgaaccgtggccgcgttttcgggatgaattgatgcagcgcctgtcgtcctgcccgcaggaaaacctgctgacgatcaatccggtttattataccaccgcggacatagcgggtatcaagccggtgtttgtttctcgtatgccgcgtcacaaggcaaccggacccgcccacaaggaaaccatcaaggggcgcttggacgacacctatgtgacccagcgccgcagcatcaccgacttaaagctgaacaaggacggcgaaattgacggctactttaatcccagcagtgacaccctgctctacaatgccttgaaggatcggctggtcgcctttggcggaaacgggaaaaaggcatttgccgagccattcttcaagccccgcgcagacggcacgccgggtgcgcaggtacgcaaggtcaagctttacagcaaggtcaccagcacggtgccggttcacggcggaaacggcgtggctgacaacgataccatggtgcgggtcgatgtgtattatatccccggagatggctactattgggtgccgatttatgtggcagataccgtaaagccgattttgccgaactgtgcatttgtcaggtgcaaaaacagcatcattaagaaggaaatgtccgaggaaaatttcctgttttctctgtgcaaaaacgatctggtttgtatagagagcaagcgtcccataaagctgaaggcagccaacgaggacagcacgctggaaaaagagctgaccgtccagcgggtgcttgcctattttgagggcggtgacatctctaccggcgccgtttccgtaaccacgcacgataacgcttatattgtcagaggtctgggcttcaagactctgcaaaaggttgaaaaatatcaggtcgatgttctgggcaattatacccgcgtaaaaaaagaaaagcgccagctttttcccgcccaacggaggtgacgcatgtcctaccgctgccttgcgggtatatggcgcgctgcttggcagtatacggctttttgccatggctggggctgcatcacgacaacgaactgaaccagtttaatctggcggacgatctgatggagccttttcgtccggaagcggatttgtatgtagctgccaatgtggcagaggatgccgccatgacccccgggctgaaaggcagccttgtcaatctactgaatgttgatattctttccggcgggcagcaccacagtgttgcctatgcgatggaacggcttgtgcaaagcctgcgcagccaaccgctgcagctgccgaagctgttggaatacaagcagcacagctatgagtaagtttatgcgaatgatcgtattttttgatctgccagtgcaaacgaaagctgatcggcggcacgcaaccgtctttcggaactttttgctgaaggacggttaccatatgctgcaattttctgtttatgcgcgggtgtgcaacggaaacgacgccgtgaaaaagcacgagggacgcctgcgggcttccctgccgccgaacggctctatacgtctgcttgtcgttacggaaaagcaataccagtccattcaaattcttttgggaaattatcagccggaggacgccccctttgcctgtgagcagctgagttttttctaaacaaaaagcgcatcggaccgcaatccgatgcgctttttgcatagcctattataccataccaagagctattagggaactatgactgctttttgtgacattcgcaagttttttccattataccataccaagagctattagggaactatgacgcgcaagctccgggcttttttccagcgccgattataccataccaagagctattagggaactatgacagcaatcttgatgagggtgaacggattctgattataaatgttttgtaataactccgcgaacattgttaccggggaaatgccggattcttcgattgtgggtaaactcgccgttttcatccagcagctcgccgaagcgcagcttgatcctctgcccggcatgggcggttacggtaaattccactgcagccggggctgtgtgtgcggcttttttacggcttggcgggggttatggggcctcggtgccccatgcctcaagctgggtcagcgcggggaacggggacgggtcctccgctttttttagctcaaacagcttcaggctctgtatcgtgcgcggggtgatcgcaaaggtctgcggggcatcgtgtcctcgagctgcaccacacagtacaggcccggcttgtcgcattccagcgcgatccaatcgccgtccgcgtagggggctgtatgcaccagcgagatgcgctcccccgcgcggctgacggacagcgtatcccccgctgcaccgatgaccttcagcttgatttctgccatgcttcacacctcctgctttgccagcagcgctgcgccgatgacacctgcccggtagcccagcgtgcaggtcgtgatgcgggtatgctttttggcaaaggcgctgccgaacaccatcggcgctgcggcggcgcgcagcggctttaagaggttttcgccctgattggccacgccgcccgacagcccaatgacctccgggaaaaagatattgataaggtttgccacgccgactgccagatggtgaatgtagttgtccgcaacagccttggcggcggcgtccccctgcgcggcggcatcaaaaacggtgcgcccgttgacatccgattcggtgggtgccagtgtgttcagcaggctttccgggtgggtgcggcgtgcttcgcgcgtcatgcggatcagtgccgtagcgctggcgagggattccagacagccgcgccgcccgcaggtacacagtggggcatcgggcgtgtcggcaattaccatgtgtccggcctcggctgctgcgccggtgtagccggtcagcagctttccgcccagcacaacgcccgcgccgatgccggtgccgagcgtcagaatcaccgcgctctgcgcccccttggcgcagcctgccagtgcctcgccgagggcagccacattagcatcgttgccgaggcagaccggcagcccggttttggcttgcaggtagtcagccatagcaaaatcgtgccagtcgagattgttggagtagagcaccacgccgtcacacaccgtgccggggcagcccacgccgatgctggcgaccggctcccccgcgccgagctgcagacacagcgcagcaatatcgtcacagacctcctgcgccgtgcggggcaggttggtgggggtggcagcttcccttacaatttcgccgttttcgcttacaagggcggctttgatgttggtgccgcccaaatctacacccaagtacagcatagttttcctcctcgtttatcgctgttccgcatagtcaaaaaaggcaaaatccgcatggctttggtgggcatccatatcctgcgcacagatgccgaccatcgcgccggtgaaggcgcaccgccagcggcgggtctcgacataatcatcgctgaggtggtcggcgggctgaacaccgcccaagggctgccaatcgccgtctgccctgtaataaaactgcgcctctgcgccgtttacacacaccttcagcgaaatttcgccgtccggcagggggatcgccttgctgccgtaggtgaaatccttgtagtcacaccgcagaatttgcagcgtgcgggcgttgatgcgctcgtcccatgtgatataggcgtagatccagttgcaggtgtcgtagaacagcaccagccctgccacctgctggaagttttgcggtgcaaagtcgattttcgtctttgctgtaaatgcaaaatgctgccagcggcgggcaaacagcgtctgcctgtggtggctggaaagcgtctgcccgccgtagaggcgcagccagccggggcgcgcggtcaggctgtaatcgctttcgggcgcaagcggggtgcgcagcgtcttaaaggtagggggcaaggccggtcgcaaacggggaaatactgcccagcgcacggcaagacccccgccgcctaccgcaagagcattaaggagcaaaacaatggataacgagcgcgcacagtgggccgcccggatgctggccctgctggaaccgttgaaaagccgcctgacgccgggcggcacggtgcggctggcaggcggtacagcagtgtatcaacggccccagaggctgcctacctgctgcccggcctcggtgccaacggcgttgtaggcgggctgcaggtagtggaaccaatccttcatcagccccttggcggcaaaggtcttgaaccggcggctgaccatgacaatatcctcgcaggcggcggccaactcctcctgcgcctgctggatcggcacatacagctccggctcatcgcgctggttgccgatttgaattaaaaagcagatctccagcccagcatcaagcataaacttgtggatgacacggtcggtgttcagcttatagacggccttgagggtgtgcaggtcgccgtcggtgcagccctggcaccagaccatcgcgctgtggcggatcgtgtagccgttctcggctaaaaactggcgggccctgcgtgcgcggcggacggcatccgaaaaatacggtgtgccgggcagccactcggcaatggcagagccgcccttggcgcaggacacacccacaacggcaatgccggtctgcgcagtgcaggcattgacgaaagcggagaccatgctgcctgttttcatgcccggctcattgacaccggcggggtcattctcattcacgccgaacggctcggccagcgggtggagatgcgccaggtcggtgacggcgcggtactcaaaccccatgccgggggtcacggcgggggcaagggcggcatccccgcgcccggccatgttgctttgccccataaagaagattagatcgaccagctgtgtacattccattgtgagattgctccctcgtgatattctatagaaggagtatagcaatccttctttcaaatgccaatagacgcatccgactttttgcggggtaggggaaaaaagtcggatgcgtccactttgtttttgccgttaggcgggaattgtgcggtgttgccttatgtatccagtccgtagggcaccgggtggctgccgtagcggttggccgggctgccggtcagggtcagcgtcagggtattttcgccgggggtcaaaagccccgccagcgggaatttgtgcggcggccagaaggagacgcccgccgactggccgttgacagtcagctcggccatctcctgcccgggcagggtcagtagcggcgtggcggtctgcagctccgttgctgtgatctgcagcgtggcgcggtaggtcttggtgagatgggccgcgtcctcgtccgtaagggcaaaggccggtgcggccagcgacagataggtgggcggcaggggaagggcctcgctttcctgcgcagtgcaggtgaacagcagcaggctgccgcgcgcgggcagctccagcggcaggcaggcccccttggcggtgcgctcggccgggcaggcgcagggctggccgttccacagatcgtaccggcaaagcggagcatccaccggcagggtcagccgggtcttgatgggggtgttgccctcgttgacaagcagccagcaggcgcgcccttccttattaaaataggcgcagcgcagcatgggctgtggcgggtcgcagcggcagtccggctcgagcgccgaaacctccggatgtgcggcgtccgggaacagtgccttgtcccccaatacggcggtgtagcggtgcccgtgtaagcaaagcgcgccgtcctcgaccgtgcaggcgggaaagcagctttcgggaatgtactgaaagccgatctgccgctcaaacagcgggcgcacggtgtcagggcagaggtcgcggttgcggcaaagtacggcagtctgtgcatgcaggtcgatgtcggtcatcagccaggacagccgccgccagtagctgctccacgcatcgtaatgtgcccaccagatgctgtgggggccgacatcgggcgggcgctcgtccttgcgcttgccgcggatgctgtaataaaaggcgtgcgggataaacaggttgaccccgcgcactgccagccagtcggtgtaccatttgatgtccccgcccgaaagctgccacgggttgtcatccttgttgcaggcgccgaagcactcgttcgagttgcggcggcggtgcatcagccgggcggcgtcggcgctgcacttggccattgtggagtcgatgcccgccaagccgtccttttcgggggcgagccagcgcagcaccagatcctgccccggcacggcaaagtatttttctacttctatatcatcgctctggtgggggtgccccatcaggccgatgccgtgcgcctcacaccagcgggagagtgtgccgtagtagacttcgccctcgcgctgcaaaagcagcttgtgatatagccttgtgtcgtcgttttccctgccgtcaaacagggcggcgaggttggcggcattgccgcccgcacggcggaaaatctcggcaaagccgtgcgtccacgggaacataccgctgacgttgcgtcccaaaatgctcggctcatcggtgaaaaatccgatgatcgtaattccgaaatacgctttcagttcccgatagtaggcttcgtgggtcagttccataaagcggctgacggccgcagggttcagaatatccgcggttttgggggcgtttttctcgccgtcatcctcgccccagtgcagtccgcgcatcgtgccgccgcttttgcgcacgaccagcgcgccgctttccgtctgcgccagcagctcgtctgccgacaaaacggtctgggtcagcgcgatgccctcgctggcaagctcagggtgatcctttacgaccagcccgctcgccgagccagaggggtacatcccctcgtcgtacaaaacgattttcatatccagcgcggcggcagtctgcaccgccgtgcggatatgggcaaagtagcgttcacccagataggtgatgtctgggctaagccccatgcgcgggtgcagcaccacgccgtaaatgccgtgggcggcaaagtccgccagctggcggcgcagctcctcagcggtcagatcgccgttcaaaaaccaaaacgggatggcggtaaattctctcggcgggttttgcagttgatcaagaaatttcattttgcgctctcctgtgcctcggcgtgggcgcagatgtccgcccatgcgtgggatttatagtagaacagcatcgccagcagcccgacaacaaagctgaacgaaacacccgccatggcgtagccgccgtagcccagccacgccagcaggtaggacgccgggatgcgcacaccccacagcagaatgatgttgacgatggtagaatagcggatctcgcccatgccgttggcaaagctcataatagcgttgaaggctgcatagcaccactggaacggcagcacaatacggatataccgcactgcaaaggcaagtacggcctcatcctgcgtaaaaagcagcagcagcgggcggcagcacgctgccataagcagcccgcccgccagcgagagcagccccgatgccgccggaatcatccacccgcccttgcgcaggcggcggtagtcctgagcgccgagattttgccccgcaaacaccgaggttgcctgcgacagcgaggtgaccgtgatattggccagcccgccgaccttgcccgccaccgagcagcccgccacaaaaaccgacccctgcaggttgtacagcgcctgtaaaaaaacatgaccgatggagtagagcgccgagttcagccccagcggcagaccgatgcgcacgatctggcgcagggtgtcggcatcaaagccgcagggcaaaacaggcagcgcaagctctgtgtagcggcggcgaatgtaaaaaatgctgcatatccacgacaaaaacagtgcaatcgccgtggctgccgccacgccgcctatgccaaggccgagcgcgccggtaagcacaagatccagtacgatgttggcggcgcagctgataaacagcagcagcagggaggacgagctgttgcctatgccgcgcaaaagaccggcgttgaagttatagcccatgttgcccagaatgcccagcatcgtgatgcgcagatacagcaccgcccccggcatggcgtccgccgggacctgcatcagctgcagcatccacggccccagcagaaacccgatgacggtcaacggcagcgatgctgcaaacagcagccagaccgaggtgcgcacaagcttttgcagctggtcgcggtcgccgcggccgaccgcctgcgatacgaggatggagatgcccgagccgatacccacaaagacacagagcagaatttcgagcggctgggagctggtcgccaccgatgccagcgccgtagtgtcgcagaaattgccgatgaccagcgtgtccaccgtgctgtacaaaagctgcagaatattgccggcgcagatgggcagcgcaaacagcgccgcgcgccccagcacggagccgtgggtcatatcaacttgtgcggattttcggtaagccgacatagccctacctcccagtatgacagattttcttatctatattgtacgaggaaaccgcgccggctgcaacaatcattatcctttgatttttggatagatataaacgatgaggcgatcaatttttgcggtgcggtgtaaaaaacaatcacgccctttgcggcggcaggagggcgtgatttcccgctgctttgtgcaggttccacaaacaaagatggacaaaatcggtaacattgacagcaagatttgccgcaaaaggacttgccacggcggtgcaaaatgtgctatcgttaaaatcaaattcagtaaaaaggaagtaaaatttgtatgcggcagcctctgacaagacagaacagcacgcgcgtcaagcgcagatactctgcttatcagaaccgtatttttgtctatctcgtgacccttgtcaccgccccgctgctgctgctgggcgtgctgtccagcgtggtgtactaccggcagaccgtcacgcgcagcgatgccctgctggcctcggcacggaagaatgtcgaggcgcagatggaaattgcgctgagcaacctgcgtgcctactacagcgcggtcgtcagcgtggacaattaccagaccctgtgcgaaaaaactgtgccgccgtacagtgagtacacccttgtgcgcgatatgcaaaccgccatgcgcggcggcaatctcgtggacaaatatgtcgaggggtatacctacatcaacctgcgcagcgggtggattttaagcaacaacggcatgtaccggctggctgatgccgccaaccgggatgaggtcgcccacctgcagggcgagtgggcggagcagcacgccgccatgttgtgggtcaaccgtaccgaccagcccacccccgcgcgggcggacacaccgctgaacacggtggatctgaccggcgagctgctcgtgctgcgcagcagctcctaccgcacgggcagctatgcggtgctgatcgtcaagctggatctttcgccgctgtatgagatgaccgagagctggcagaccggcggctacagcattgccgcgcgggatttcaccggcaagaccgtgctgagcacctctgacgcgctgaccgccctgctggacgccgacacccctgccgagggcgcctgtgtgcaggacggctggcggctgaacagcggcaagatgggcgtgaacgggctgacctactatgcggcgctgccgcaacgcacgctggcggctaccgccggcatggtgattctgatcgcttttgtgctggccgggggactggtggtggcggtgctgatctgccgccgatcgaccagtgtgctgtacgcccctgtggatgatctgatgcacgcggccagcggtgtgttcggccagcccggcagcgatgaggaggagtttgcctatctggccgccggtgtcaagcaggtggcccgggacaagcaggcgatgcaaagcctgatgcagcagcaaaaccgccgcctgcagcagagctttgtggaaaatctgatccgcagtgaggtcaccgatgaggccgtcggccacacgatgcaggagctggggctggcagtctgccccgcgtatcggctgatcgcgctggcgctggatactccggcgggcacctccggcccggtgcgggagacgatgctgctgaccgccatacagacgatgcccaccgagctgctgcgccgctgcgcgttccagcccgtaatgctgaactttaccctgctgctggtcgtgggcggcgaggaggctgctctgaacgaggcctgccgcgtggtatatacggcggcggcgcgcagcatccgcaccgcgctgggggtcagctgccgtgcgggtgtcagccgccccttccacaagctgcaccacatgcagctggccgcgcaggaggcatgggaggccctgcgcctgccggaggccgatgcccccgaggcaagcgggcagatgctgtactaccagccgcccgatgagcagtgcgcccgcaacggctatgatacgctgctggagcatgagatcacggcagctgtaaccgcctgcaagaccaaggaggtgcgccacctgctggagcgctttaccaccaaaatgctggaaaaggacattcgcggctatgagcggcagttttacatccagcggctggtggcggccatgctggccgtggcggaaaacgccgggctttcggtcaatcaggtgctggccgaccggcaggccaacctgtttgagacgatcagcaggatatacaccgccgaccagatgcagaatttcctgatggacgaggtggccgtgccggtcatggatctgctgaccgagttccgccagagcagctcaagcgagctggtcaagaatgtgctggcgctgatcaagcagacgcgcggcgatattacgctgaatgagtgcgccgaccggctgaactataacccgagttatatctggaaggtgctgcgcaccgagaaggataccagcttcagcgatctggccaacaatgaca

SEQ ID NO: 4065 - DNA, 18061 bp, synthetic construct
  source 1..18061: mol_type = other DNA
  misc_feature 1..18061: note = Synthetic
ggctggatgaacgacaccctcgactactttaaaaagacgagcgacgagcggcgcgagaatctgggcaagctgaccttctcgatgatgtacgcctggaacgagcactacatcctgccgttcagccacgacgagaacgtccacggcaaggcgaccatcgtgcaaaaaatgtacggcgagtacgagggcaagttcccgcaggcgcgggcgctctacctgtacatggccatccatccgggaaagatgcttgattttatgggcaatgaatttgcgcagctgcgcgaatttgacgagagccgcgagcaggactggatggtgctcaagtacccgaaccacgacgacttccaccgctatcgcagggcgctgaatgaggcgtatcttgccaacgaggcgttctggagccgcgagtacgaccccgaggcgttccggtggctggactgcgcccaccccgagctggacgcctgtgccatctggcgcgacggccatgacggcgcggtgctggcggcattcaactttggcgacacggagctggctgactacacgctgaccctgccccgcgcgggcaagctgacgaagctgctggacaccgactggcagtgcttcggcggccgggccgagaagccgaagcggctggtcggcaaggcctgtgggggtgaattgaagctgaccctggccccgttcagcgggcagctgtttaagctggtataactgcatacaaacaggccgcgcctttcccgatacaggatgggcgcggccttttgctgtactgcaggggccgggcaggcccggcccgcagctttgccgctgcaacccctttcgcggtagatttgtagggaggggtcttgccccctccgcggcggccagagggctggccgccctacaagctcccgcaaacggggagtgcaggggagggattcatccctcccgcggggcgtcggggacgccgccccctacaggcggaacccgcaggcgcttctgatgccgaaagtgcgcattgacgttaaaccctccgggtagaatggcttcccccgcgggggaagctgtcagcggccccgcccgctgactgatgaggggcgagcctgccattattgcgtgtttacggcttgcggcggcaagctctcccctcgtccggccctgcggggccaccttctcccccaaggggagaaggcaaagagaaattcaccgcccccaatactcctccacgatctcccgttccacaaacggttccttgattccgccgcgctctatcgttgtctcgtggcccttgcctaagatcgcgataatatccccgggctgggcgtggtcgagggcgtaatagatcgcctgtctgcggtccggtatctcggcaaacggcgtggccgggttgccaaggcgcagcccggcgcggatgtccgctaaaatgtgctccacgggctcgccgcggctgttatcctcggtgatgatgcagaaatccgccagccgtgcgcagaccgcccccatgccgaaccggcgcaggcggctgcgcgcgccgccgcagccgaacaccgcgacaagccgcgtcgggcggtaggcccgcagcgtgcgcagcaggcactcggcggcggcctcgttgtgggcgtagtcgatgaccaccgtgaacggcgcgtccagcggcaccggctcgacccgcccgcacacgacggccccggccagcccggcatggatcgcgtcctcacccgcgcccagcacccgcgccgccgtcagcgcggccagcgcgttgtacacgctgaatgcaccgggcatgcccacggcgtaccgtacgccgtccacggtaaacgccgcgcccagccgcccgcccgcgcgggtcagcgcaaaatcggtgtcggcgcgtacatccgccgggcagccgatgccgtaggtcacggcgcggcaggggaggccctgcataattttccccacatgcgggtcatcattgttgaaaactcccacgcggcagcggcggaacagcgcccgcttccagaacagatactccgcaaaatccgcgtgttcgtcggggccgatgtggtcgggcgacaggttcgtgaacacccccaccgcaaattcgatctccgccgcgcggtcaaatttcagcccgaggctcgaaacctccatgacgcaggtgtcgcagccgtcgtcggccatgcggcgcaaaagcagctgcagatcgcagctttccggcgttgtatggttcaaatcatgccgatgcccgggccagcagacgccgttggtgcccaccagcccgacccgccgcccgtcggcctgcaaaacggctgccagcaggtgggccgtcgtcgtcttgcccttcgtgccggtcacgccgatcatcgtcatggcgcgggccggttcgccgtagagccgcgcggccagcgccgccatggcccgccgcgggtcgcccgccagcagcacggcacacccggcgggcaggccgggcacatcatgggtgcagagcactgccgcggccccggcagcgacggcctgcgccgcaaagtcgtggccgtcggcgtgccgcccgggcagacagacgaacagcgcccccggcccggcacagcgggagtcacagcagacggacgtgatttcggtcagggcatcgccgcgcagaagacgacagccggtgttttgggtaagccgccgcaggtccattcagcatcacgctccaaaaaattgctcataccagatcaaaaagctgtatacgcaccagatctgccgccagcagtcgccgccgtgcaggtgttggttcaacatactatgcaacgcgcgcgggtcaaagaactccgccgctgccgggcggctgaacacggcccgcacacggctggtgtagggctcctgccgcagccagtcccgcaccggcacaggaaagccgagctttttgcgcgcggcgctggcggcgggcagcgtgcgtgccgcggcctggcgcagggcaattttcgtcgtgcgcgcgtcggccttggcggcagcgggcagcgcggcggccagcgcccagacctcccggtccagaaatggcacccgcagctccaaactgtgcgccatgctcatcttgtcggccttgagcaggatgtccccggtcagccacaaatttaaatccacctgctgcatccgggtcacggggtccagtccctcggtggcgtcccagatagcctcggtcaaaaacatcgggtcgccgtccccggcgtaatccgccagcaggcggcgcttttcgcgctcattgaacagggccgtggggccgaaataccgctcctccaggctcatgccgcgccgcacgagaaagttcaccccgcgcgcgggcggcagcagcgccgccgccgcccccagcccggcccgcagccaggacggcaggcggtcataccaccgcgccgtgaaggggtcgcggtagatgttgtacccgccgaacagctcgtccgcgccctcgcccgagagcacgaccttgacgtccttcgcggcctcgcggttcaaaaagtagagcgccacggcggcagcgtcagccagcggctcgtccatgtggtactgtacggcgggcacggcgtcccagaactcgccggggctgatgcgccgcacgcggtttcgcacgccaaggctgcgtgccagcgcccgggcggggaaggactcgtcgtacttcggctcggcgtagctgatcgtgtaggtgcgcgcggggcgggccagcgcggtcaggtaggccgagtccacgccgcccgacaggaaccccgcgacctcgacgtcggcgaccttgtgcgccgccgcactgccgcgcaggacttcttcgatctcggcaggggagaccggcgcgtcaccgggcaggaaggcgggctgcacccaccgcgtcgtgcggacgatgccgtcggagaactcgagaaaatgcccgggcagcagcttctgcacgcccgcaaaaaacgtatcccgccccggggaatactggcaggacaggtagagcggcagctgcgcggtgttgagccgcttggcaaacgacgggtggtctaaaaacgccttgatctcgctggcgaaaagcagcgtgccgtcggcgcagcggcagtagtacagcggcttgatgccgaacatatcccgcgcacagaacagcaccccggcgcggcggtcccacagcgcaaacgcgaacatcccgcgcagccggggcagcagctcgcggccccactgctcccacccgtgcagcaggacctcggtatcggtgcgggtggcaaaggtgtggcccagcgccgtcagctcggcggtcagcgcacggtagttgtagatttcgccgttgaaaacgacgaccaagtttttatcctcactgtacagcggctgtgcgccgccctctaagtctatgatggccagacggcagtggccgagcgccgcgggcccctccacaaaggtgccctgcccgtcggggccgcggtgggcaatgcgcgccagcatgggggccagcgccgctgcgttcgctgcgccgtgccccgcgataaagcctgcgattccgcacatgattttgcgtcctttcccggcagtgcaacctgccgttaccgctttgtcagcttaacttgctggtattttaccacgttctgtggtagaatcatgtcagaaaaaagaggaaagagggcgagcgtatgacactggggcagaatatccagaatgcgcgcagggcgcaggggctgagccaggaggcactggctgaaaaaatcggcgtcagccgccaggcgctgggcaagtgggagaaggataccgccctgcccgggctggacaatctgcaggcgctggctgcggcgctgggcatcggcgtggacgcactgctgggcgcggagaacgccgaccccgccgtgcccgccgtgacgctggacgcgctgcgggacctgctggctgcccgcgatgccgaggaaaagcgccgccgccgcttgtggggctgtgccgggggcgcggcgttcatcgtattggccgggctgctggcgggcgtggcgctgcaatatgagcggcagatcagcgcgctgaaccagaactatgcggccatccagtccagctacgccgcccagcaggcggagctgtcggcgcagatttcggaattgcaggacgccgtccggatgggcgaggccacggttctggactggcgctggctgcccgtggacaagctgcaccgggacgccgataaaagctggatgcccgtgcaggtgcaggtcacgccccgcacgacccgcgacggtgtgacggcccggctggctgtgcgctgcggcgatgatacgcagctgtacgaaatgaccgccgcgcccgacggcagctttgcggcggacggtatcgtttttacagtgggcagcacctatgaattgagcgtgcagtggacggctgacggcgtgaccacaaacgagacgctggggaccgtggatttcaacgacgagatgaccgagccgcagattatctggggcgcggtgggcagcagcctggactttgggtattccgtgcagcgggtcggcaataagcagtaccgcctgaccctgacctgctaccctgtggaggtgcaggtggacgccccgctgtggatgcagcctgcgcaggtggagatcgacctgcgcctgaacggcgacgccggggagccgacagccaccgccgtactggattgcgagggcgagtccagctatggcaattcctcccgcaccgagagcatctggaacggcacgttctacagcgatgacgtggtaaacggctgggagtacgacggcgagacgctgccgaagtacgttgtgcgtgtgacagacacgaatggagatgtctggacggaggaaatgccgctgagcaaacggtgacctgtaggggccgggcatgcccggcccggaggtttgccattgcaacccctttaatggtttgctttgtagggaggggtcttgaccctccgcggggcgtcgaggacgccgccccctacagtggcaacccggaagctttattgttgtcgctaacgtccgcggcggccagagggctggccgccctacgacatgcccattcacacaatcactacataaaatcccccctgccgcatacacttacggcaggggggatttgtatgccgcggatgctgccggtgctgctgggcggggatgccaatgtctacggcatggcccgcagcttttatgaatgttatggcgtgcgcagcctggccgtctgccgccgcgccctgcccgcgctggcccacagccgtctggtgcgggtcgccgtgcaggacccggcgttcgggcaggaccacgtctttacggccacgctgctggggctggcggcgcagtaccccggcgtgcccaaaattctcatctcctgcgccgacgactacacgaccctgctggcccgccatgccgacgcgctgcgcggggcgtaccgctttgcctgcccgccgcccgcggcgctgcatctggccgataagcggcagtttgctgcggcctgccgcgccgcggggctgcgcacaccgcagaccgtgacgctgtgctcggcggacgccctgccgccgctgccgtttggctggccggtcatcgccaagcccgcggaccaagcggcctacgcccgctgcgatttcccggggcggcgcaaggtgtatctcgttcaggacgccgcccggctgcgggagctccttgccgccgcggcgcggggcggttattttgacagctggctcgtgcaggagtacatccccggcccggacacgcggctcggggtcgtcaacgcctactgcgcggcggacggcagtgtgccgtggcttgtgcagggccagccccttttgcaggagcgcacgcccgagggcaccggcaactacgccgccgtgctggtggagccgtcccggcaggacgcggcgctgctggatgccctgcgcggccttttgcaggcggcgggctggcacggctttgccaattttgatttgaagtatgaccaccgcggtgagccggttttatttgagctgaacccccggcagagccgcgcgtcctatttttgcgacgccgcggacgcaccgctggccgtgccgccggtgcaggacctgctgtacggcgggccggtcacgccgccgacgctgcgccccgccgtctggtacaccgcgccgtggtgcgccgtgcgccgcgcctgcccgaacaggcttgccctgcgccgtgccgacaccctgcggcggcgtggccgtggccgcgcccatctgctggcagcaggggagggggcatcccggcggatatggtttatggctcggcaattaagttattaccgcaagatgtagggggcggcgtcctcgacgccccgcagctgccgcaaacatcccgggagggatgaatccctcccctacaaataacgcgagcgggaggttgtagggcggccagccctctggccgccgcgggtgggcgtaaaaacgtctccgtaaatccacttaaaaaggggtgacaaacacatgtgcggcatcgtcggctttaccgcgcccgggcaggacccggcgtcggccaaacaaatcgtgcagggcatggcggacctcatccgtcaccgcggccccgacggcgagggctgctacgccgacggcaccgcggcgctcgggcatcggcggctgtcggtcattgatctggcgggcggcggccagccgatgctcaatgaggacggcacgctggtggtcgtgttcaacggcgaaatttacaactacaagaccctgcgcgcccgattgcagcagcgcggccacacgtttgccacggattccgacaccgaggtcctgctccacgggtatgaggaatggggccgcggcctgccccgccgcctgcgcgggatgttcgcgtttgcggtgtgggaccgcacccgcggcacgctgttctgtgcgcgggacctgtttggcatcaagccgctctgctattataaaaaaggcgagacgcttctctttgccagcgagatcaaggcgtttctggcccacccggcctttgaaaagcgcctgaacgaggcccgtctgcccgactggctgagcatggagtacctgcccgatgccgagacgctgttcaccggcgtttatgagctgccgcccgcccatacgctgacctggcaggcgggccgggtcacgctggcccgctatgccgcgccgcggttccgggcaaagcgggggcgcagtctgcgggcttgggcgcgtgagatcggggacgctgtcgccgagagcgccgatgcccaccgcattgccgatgtcgaggtcggctgctttttgtcgggcggggtggactcgtcgctcatcacctgcgagatggcccgccgccagcccgccgtgcagtgcttctcggttggctacgccgaggaagcatattccgagctgcctgccgcccgtgccgcggcgcaggcgctgggcgtgccgctgaccgaaaccaccgtgaccgcggatgatttttttgcggcgaaccgcgccattcagtggtatctggacgagccgatgcccaacccggcggaggtgccgctgtatttcctgtgcaaggcagcgcggcagcgggtcaaggtcgtgctctcgggcgagggcgcggatgagctgttcggcggctatccgctgtaccggcaggccgtctgggccgaacgctggcagaaaatgccccgggccgtgcggcgggcgctggcggccctgctgcccggctgcggcctgctgcaccggggcgcactgccgcgctggcagcggtccgcccgggccaactatgtctttgaaacaacgcaggagcgcgataaatatttgaagcgcgactactgcgccccgacccccgcgcagcgctgcaagccctattttgacgcggtgcgcgggctggatgagccgacggcggtgcagtgggtcgattggcagacctggctgccgcgggacatcctgcgcaaggcggaccgcatgagcatggcccacagcctggagctgcgggtgccgtttctggaccggcaggtgctggccgcggcgcagaccctgccccggcggtaccgctgtaccaggcggcgcggaaaaatcgcactgcgcgccgccgcggcccgccgcctgccgccccaactggccgacgcgccgaagcgcggcttccccgtgccgctggcggactggctgcggcaggagaaatattacgcgctggtcaaggccaagctcaccggcccggtagccgagcgattttttgacacgggtgcgctctgcgccctgctggacgcccaccgtgcgggaaaaaccaacgctatgacgaagctctgggcgttttactgctttattgagtggtatgaggtgtatttcacgggaaaaatcccgccggatttgtaaaaaagtttttgcaaaatgcttgacaacccggctctccgttgctataatatcttacgcagtatgtccctcgcggacatgaacccgcaataagcgcccgtagctcagctggatagagcaactgccttctaagcagtgggccgggggttcgagtcccttcgggcgcattatgtggtgcctatggcgcagttggttagcgcgccagattgtggctctggaggccgagagttcgaatctctctaggcaccccaccaaagaccgtacaggcgcgttcctgcacggccttttcttttataatgggtcgtcgccaagtggtaaggcacgggactttgactcccgcattccgctggttcgaatccagctggcccaaccagccaaaagaccgcaaagaacgttgattctttgcggtcttttggcattggcggctcatacgcccgctgcgccgccttcttgttttttcatccgccaaggcggcccggcttttccaaggcgcgccttggcgcgcggcgcctccttgtaagcacaaccggcaaaaaattttcgtgtcgaaggctttacattcctgcaaacaactgctatactgaaaccagttcttataccataccaagaactgttatggttgctatgataaggtcttagcaccgtaaagctctgacgcctcgctttcagcggggcgtcatcttttttgcccaaaaaacacggatatttttatccactgtgctgattgacggctgcaacgtaattcggtcatgatataaatggaagcgtaaaaagcaggaccttttcatgcaaatgctggtgaaagaggcggtaagtaatatgaaaaacacattgtatggcatcgggctggacatcggcgtggcgtctgtcggctgggccgtcgtcggtttgaacggcacgggcgagcccgttggactgcaccgtttgggtgtacgcactttcgacaaggccgagcagcccaagacgggcgaaagccttgccgcgccgcggcgcatggcgcgtgggatgcgccgccgtctgcgccgcaaggcgctgcgccgggcggacgtttacgccctgctggaacgcagcggcctttccacccgggaagcgctcgcgcacatgtttgaagcgggcggcctggaagacatctatgcgctgcgcacgcgcgcgttggacgaaccggtcggcaaggccgaattttcgcgcattttgctgcaccttgcccagcgccgcgggtttaaaagcaaccgccgaaccgcctcggacggcgaggatgggcggcttctggccgccgtgaacgaaaaccgccggcgcatggcccagggcggctggcgcaccgtgggcgaaatgctgtaccggcacgaggctttcgcgcttcacaagcgcaataaggctgacgattacctttccaccgtcgggcgggatatggtggcagaggaggcctccatcctgttcgagcgccagcgtgcaatgggctgcagctgggccgcaccggagctgcaggcggaatatctttccattcttctgcgccagcgttcgtttgacgaggggccgggcggcaacagcccctacggaggcaaccaggtggaaaaaatggtgggccgctgcacattcgagccggatgagccgcgcgcggcaaaagccgcctattcgtttgaatatttttcgctgctgcaaaagctcaaccacatccgccttgcggaaaacggcgaaacgcgcccactgacgcagccgcagcggcaacagcttctctcgctggcgcacaaaaccccggacataagccttgcccgcattcgcaaggagctggcgctcccggaaacggtgcaattcaacggcgtgcgctgccgggcaaacgaaacgcttgaagagagcgaaaaaaaggaaaagttcgcctgcctgcccgcataccacaaaatgcgcaaggcgctggacggcgttgtaaagggccgtatttcctccctgagcatttcccaacgcgacgcggccgccaccgcgctttccctttacaaaaacgaggacacgctgcgtgcaaagctgacggaggccggtttccaagcacccgagatcgacgcgctggcgggccttacgggcttttcaaaattcggccacctttcactgaaggcctgcagaaaattgatcccgcatctggagcaggggctgacctacgaccaggcctgcagtgccgccgggtacgatttcaagggccacggcgcaggtgagcgggcctttacattgcctgccgccgccccggaaatggagcagatcacaagccctgtggtacgccgcgccgttgcgcagacgatcaaagtggtgaacggcatcatccgcgagatggacgcaagccccgcatgggtgcgcattgagcttgcgcgcgagctgagcaaaactttcggcgaacggcaggagatggaccgctccatgcgcgaaaacgccgcgcagaacgaacgcctgatgcaggagctgcgcgatacgttccacctgctctcccccaccgggcaggaccttgtgaaataccgcctctggaaagagcaggacggcgtgtgcgcctattcgctccggcggctggacgtggaacggctgtttgagccgggctatgtggacgtggaccacattgtgccgtacagcctcagctttgacgaccggcgcagcaacaaggtgctggtgctttcctccgaaaaccggcaaaagggcaaccgtctgccgctgcaatacctgcagggcaaacggcgcgaagactttatcgtctggacaaacagcagcgtgcgcgactaccgcaagcgccagaaccttttgcgcgaaaagctctccggggacgaagccgagggcttccggcagcgcaatctgcaggacacacagcacatggcgcgctttttgtacaactacatttccgaccatcttgcatttgcgcagtccgaagtgcttggcaaaaagcgcgttttcgccgtcagcggcgcggtaacgtcgcatctgcgcaaacgctgggggctttccaaggtgcgcgcggacggcgatttgcaccacgcgctggacgccgccgttatcgcctgcacaacagacggcatgatccgtcggatctccggctattatgggcacattgagggcgaatatcttcaggacgccgacggcgccggttcgccgcacgcccgcacaaaggagcgctttcccgcgccctggccgcgcttccgcgacgagctgatcgtacggctctccgagcagcccggcgaacatcttctggatatcaacccggaattttactgcgaatatggcacagagcatatccgcccggtgtttgtttcccgcatgccgcgccgcaaggtgaccggcccgggccacaaggaaaccatcaagggcgccgccgcggcagatgaaggtctattgacggtgcgcaaggccctgacagagctgaaactggacaaagacggagaaatcaaagactactatatgcccttgttgcttttcaaaaagaatgagaaattttttcagaaagaatgagaaaagtgtgttgcagttttgcaacaaaaaaccaaaaagaaaagggcgtttacagcgggttgaaaagtccctgtaaacgcccttttaacgtattcaaaatcgcctgattacgggtgcgaatggagcggcttgcagcgtttgcaccgcacccttttgtcatgcgttgggaggtacaccgctagtgcgtgtctcggctttgtttgcagtatccgcagcaccaagaatatcctcaagaacagtctctccgatatccgggttttgaaaccttttgatgaggtcacttgcatagttggaaccacgggaaatgacgatccccgtgagcagcgtgcccagccagtgaactgagaaagaaatacccataagagcaaagatatcagccccagcggcgaagcaaataaagactgcaatgaagatagcagccagctgcgtgccgaaggttttgtactgtttgttctcaagcattttaatgacggtcttcgcatattgcaccagagcctcgacgatgaccgcaagcgatagaatgagaagaaaagcctgcataaaaacatcctccttaatgaaaaagcatacatagaaatgacaggatatagctgacgctagacgcccgcaacatacaccttaatatcagacagttttttgtccgcagcatccgcgcgctgtgtggccgcgtcacgctcttttgtaagctgcgcaatctgcgcttcaaacccggatgtatcgccaccgccagcctgcgccatacatgccgtgatagcatccccagcggaaaggctcacgatttcgctgcggtcggggagcaccacagcataacgcttttctgtgccagcctggattcgcacccaggtataagtgccatcgctgcccacctcggcctgcaccgggtgatattcgcccacctttaggcggccaccgttgtattccatatcgacagcggtcacatccgcggccgagaacacctcacacttttccgaaagtaccttcaaaaatttcatattctcatcctccgtcccgttgattgctgcaccatatgtgcccacagcattggggtgcccggtgtatgccgtaggatcaagccctgccccggtggtcgtggcacgcacctcaaaatggcagtgtgcaaagggcgggcttgccagcgccgcgttgcccgtgttgcccatcaccgccagcgcatcaccgcttttcacccgctggcccacggataccaggttccgcgcattgtggcagaaatacaggtagttcaccacgtctggcgtctggcccgcatccagctccacgcacacataccagccccattcccatgttttattgcctgtggacttgtccactttgcgggctgtaatgacccgtccggaaatagttttgcccttgtaatcaggcatcaggatagtagagctgtccagcccttcctcgtcgctgccaccgtgccagcccttgccgttgttccgggtatagccccaccggctgtacccataccgcacccgtactcggcctttaaaaatcgccatggtatacctccagagtaaaaaaagcaccccgttgggggtgctgtggttacgtatcgctggccagccgttcgcccagtgtgacagaaagctgacggccataaacagccggtgttttgctggtttctttctgcacctcaacctctttatcctcccaatcgcccacaagggcgtatgcggaaaaatccttatgcgcaactccggccagctgctcatccggctcatcagccgtctcgttgtccggatagtagatgcggaaagattcaaggttttcgggtatgatatctgcccggatagcgtcaaactgctctgcacctgcgcggaatgtgatttgtacggtactacgcttacgattacgcaacatgccttcgccctcgttgggctgctcgatttcgtatttatggccgtttgccagtctgatcaaactcatggtctatatcctcctgaatcaggtcacgacgattacaccaccgtacagccttacgcagctctgcaatctcattgtggacgtagatgcgcgccgtgacggagatgtccttgtgtcctaatattttacttattgaatagatgtcagcgtcatgccggcgcaggtaggttccataggtgtggcgtagttcatgtgcggtaagctccggcatgccggggtgcgcttgtgcaagtcttgccatttccgccttgagccttcggctccatgtatcgggtcttagggcggtatcaccggaaatgagatactttcccgcgtagcgtcgctggagagcatctatggcttgcaatgcccggtcggaaagagggcagacgcgatagcttccgcacttgggagagcgctccaccggcttgcccgatacccatgcgatactgcgctgcactcggtaaagcctgcgtcgtcggtcaatgtcctcgggatgcagccccaccagctctccacggcgcatgccggtttccaatagtaatacgacctccggcatacggctcaaaaaccagcgggaggcgatctcgatttgtctgtcattgtagacctcctttatctgaggcagagccatgctttccagcttacatccgtcggcggggttgctggtacatagcccattactgcatgcgctgcgaaaaatcccattgacacacatgcggatcttcccgcacatgctgggagagagactggatgcctgttgatagaaccgcaggatatccgctggcgtcacatccaccagaagcatgtgtccaagtgctggaaggatatgccgccgaattggcagttcatatgtggtgctatatgccggatctgtgatgtagggccgcttgtacagaagcagccactgcgcggcccagcccgacaccgtgtacaggtcggaacatttttcagcctgcccatgttcagcgatatatgcaaaatattttgccttggcttcggcctttgaccgcccgtaaaacacccgtttaacaggtgttttatccgctttataagcaataaccccttggtatgtttgcaattttttacgcataatgataccctcctttttttaggagggtatcatttaatacatgttttgtattatttttggaacacaagcttccgatgctaatttaggcacgatcgcgggtgttcaaacagtcagcctgacagccgcgcaaaacgggcctcacaaccacacgactttaattgattataaaaacttaatgggtactccagaaggcagcaatagcttccaagcgcgccaagagcctgccggggccgttaccacaggtccttcggggaacggtgcagctcacgaaaatcgtcagccaagcctataccttaactatatagtgaaggtgtagcgatggctgcatcagtgacatagcctgccctccgcctatatttaatgaaaaatggccgacagaactagccccggcatcgcttaccagatcgccaccgccacgatatttcccattatttgtgattgctggcttgaatattccatttaccgtctggatattcgtccccgtgtttgaactgtgcataacaatgctcccgctcaatacaggcaattccgcattcgtgagagcgtggttttttgcaccagacttcacacctaaattagcatcggaatctacccccacagcgacccggccgcgcatgtctggcagattgaaggtagaggaaccgtcgccggaaccaaaagtagtcccaatgactgcgaaaagtgccgcatatgtcgtgcgggacacagcacgtccatcacaaagaaggaagccgacgggagcggagttcccggcataagagagaatcgcccccgtaggagtgagggcacgggaaatgaagttacgccatttgctcagcatgaccataacagcagagagctttgagccggagacaggcgcagaaaaatccgcatcagaagatggggaaaaggtgacagtgacatccttgccgtccccggttttcagaagataattagacatgtcgattttttcggctgcatcttccgcccgctgcgcggcggcttcagcagcagcttcagactgtgcggcagacgaagcgctgccctcagcggcggttttgctggcggcggcattggtctcggaggttttcgccgctgaagcgctgttcgccgcagcggtcttgctggcggcagcgttggtctcggaggtctttgccgcagaggcgctggccgcagcagcggactcgctggaggccgcgttcgtttccgacgtggcggcagcggaagcgctgttcgcggccgcagttttgctggcggcagcatttgtttcggaagtctttgcggccgccgcacttgcagctgccgcttcggcatcgccctcgatctgctccaccagtacagcagcctgttccacatctccagccaccgcctgctgtgcctgctgcgcctgctgtgcgctctgtgcagcggcctcctgtgcatcttcggcccgccctgcatccagcttactttgtgcagccgcattggcagcttcatccgccagctgcccgatctgttccactgccgcctcaaacatgttcctgggtgggatcaccgtaccctcgacgctggcagcaaactgcaagccgttggactgcagtttgacaatctcttcacccgtggaggacttggccacaaactgcacatccagctgtccggcatacgcggtaaaatccgcatccacaggccaggtaatgacgacctgttcctcattgcttgggtccacagaagccctcaactgcttgttaatgatcgtcatatagtccggatgggaagcgcgcacatgccaggtcatcgcggacagatcatgcccgtcgtgatagcgtgggccggtaacgtcgtagacctccgcgcgtgcctcgccctgggtatgcaggccagcctctggcccaaagtacacatatttgtctttgaattcaatcgaaatagccataagaacctccaagaaattgattagacaacggagccggtgagtttggtccattggctgtcccttgtagtccggacaagcaaagtcccctgggtgctgtaggagaacacaaggtctgcatagtttcccgcaagattgtccacctgtccggcccgtgttgcaaaatctgcgtttttagctgtttcagctgcggctgcattctcagcttgagccgcagtctctgcgctctccgcgctctttgcagtttcggcagtctcagcgcttttcgccgtatccgctgagcctgcactggcggcagtgtctgcctttgtggccgtcacagccttgccagcggtctccgcgtgtccggcctcggatgcataggcagcacgggcggcgctgtccgcatagatgctctgcgcaggcgcgcccaccgggtattccactacataggtgccgctgtcctcaatgatccgcacacgctggccggcagcgaaccgca

SEQ ID NO: 4066 - DNA, 17219 bp, synthetic construct
  source 1..17219: mol_type = other DNA
  misc_feature 1..17219: note = Synthetic
ggggggtgtgttaaagtcgcccttttttaaggacacggcggtatctgggaggtattgccgtgtcctttttgctttttcgcaacgtccatgatctgcaccagttaaaaaaagcgtagcccctccatcggactattccggctatgagtatgaacacagaaatcatgtaaatagattttataattcttctgcgcctgtctgcgttttgcagacaggcgctttttgtcgttatcggggatgtttctactgtccccgcgctccgccctttgcctgatccggccacccacccgatcaggacgaaaggagcgcacaaatgagcgacagaaaaaataattttgatttttcccggcagagctggccaaaacagccttccgcagaacgagtagtgggcgaaaggggaagaaaagaactgcctcccggcacgaagggaggtgagaacatgaaacctgatcgccacgccgaacacaagcagcacgcctttgacagcttttgcaaaaaggtcttgaagtgcgaggcctgcaatggctatcgagagaacagccgcaggaagaagcacagcatccctttcagcgaactgccggaggacgcaatggagcagcttgcggcctatgaccgttatccctgggagtacaacaccttcattcttggcggtgatgtgatcctgatcgaaaacgatctgctggccgatgcgctgaacgccttgcctcaggacaaccgggatatccttctgatgtactggttcctggaaatggcggaccgtgagatcgcggagcgtatgaacctggcccgcaggacgatcaacaaccgcaggctgaaatcctatcggctgctgaaagagctgatgggaggtgatacggatgcgtgacaccgcagcttcccggaataatcttcttccttatccggtcattaccgccgctgtccagggcgaccctgacgcggtaaaccgtgtgatcggccactactccggctacatagcggcgctttccacaaggacaagctatgatcctcagggctgtcctcattctcaggtggacgatgatctgcgccgcagactggaaacgaagctgattattgcgattctggattttgacctgacctgattcagatgaccgccgtgcgttcccctttccgcatggtgtgttccgcaccttgacaaagaaagcccgttgggaggccagcgccgcagtataaggcaaacggatacattcctgtttgtgccgagccatacggtcggtgcgccatgacctccatgcggagagagcgagaaacaccagaccgcaaagcaagcgtggcagcttgcgggcgatgacacacgggcagggtcaaagatactcgcgcattgaacgcccacaaagcattgtgcgccgcacccatcagcatgggccggggttagactcccgtggagctgtgccagcagccgtccgttttgcctctttcattgctatctttatgctttatgaaaggggattttatcatgcaagataaagctacaaatcccggcaagaccagcagaccagagaaaaatcctctggatgcaaaaacgacctatcacattggcaatcggtcgttcgttgttgagccggttttcaaagaagaaagcccggataccctgggtagcgttctccttcgcctgatgaagtccgagagtgaaaagctgtaaatagctttcaaacccggctgacagaggcagcaaatggcggtataatgtgttcgtacaagtatatttgctattcgactgccttgacggaaggaggacttatgaaacagtcgaataacaaaaaatcccgtgacgtgaccgcctttctctatgaaaggctttcccgtgacgataatcttgaaggcgaaagctacagcatcggcaatcaaaagaaactgcttgccaaagtcgcaaaggaaaagggttacacaaatctggttcattttctggatgacggcatttccggcgtgacgatggatcgccctggttttgtagaaatgatctgccagttggaacagggaaaagccgccgccgtctttgtcaaagacctttcccgcctggggcgaaactacattgaggtcggacggctgacggaagaatttttcccgaaccatgatatccgcttggtggccgtttcggataacatcgacacggcagagggcgaaaatgagcttgccccgatccgcaacctgttcaacgagtggtatgcccgcgatatcagcaaaaagcggcgcatcagcaataagatcaagggcaatgccggtgagccgatgggccagcctccctatggttacatcaaggacccgaatgatccgaagcattggatcgtggatgacgaggcagcccaggttgtgcgccgcgtttacagcatgactttggaggggttcggaacagagcagattgccgcccagcttgaaaaggacgatgtcctgaccccgcgggcctactggctcacgaagggcatcaaacgccccggcaagggcaaacagcagcctcctaccaagtggaacagctccacaataaccaaaattctctccctgcaggaatactgtggtgacattctcaatttcaaaacttattccaaatcctacaagaataagaagcgaatcgacaatgaccgtgagaattgggtggtgttccaggacgtccatgaggcgatcatcgagcgtgctatgtatgagcaggtgcagcagaagcggggcaaaatccgtaagcgtcgcaccaacaatggagaacacaatatgttttccggactgttggtctgcgccgattgcggcagcaaccttcactttcacttcaatcagggcaatccggagatcaagtatttcaactgctccaactacaagggcaatcgcggcacctgcacctctacccattatgtccgcgtagacttcctggaggaagtagtgctgggagagatacggcgcttaacgaaattcgccagcctctatgaggacgaatttgtaaaagctgtgatcggtcattcccagcaggcggaacagacagaccgcaagctgaaggaaaaagagctaagaacgctccttgcccgtgatgaagaattggacggcctttttgagcgcatctatgaggataatgtttccggcaagctctccgatgaccgcttcgcaaaaatgtcccggcggtatgaggacgagcaaaaggagctggcggagaaaataaaaaagctccgctccgaaatagagaagcagagcagccgttccatgacgacagatatgtttatcggtcttgtccgtaagtacaccagagcgagaaaactgacgccccggatgctgaacgaactgattgagaagatcgaagtgttcaatgcggagaagatcgacggcgtatgggagcagcggcttcgcatccactataactgcgtcggaacgatcgagattccaacggtgctgcccctgccgatcccggaagtgtccgtaaatacaagaaaaggcgtagtcgtcaactacgccccctgtgaactcgctgtataaaaagcgagtgttcttacagcttttcaaatgctgtaagaacactcgccatggtgcgcgaggcgggacttgaacccgcacgcccggagtgagcactagaacctgaatctagcgagtctgccaattccaccactcgcgcatttaagtgcctgataataatagcattaccggccctcgttgtcaagaaaattctttcgccgggcgtttaatattttgtgaagggcgtaaattctatagcaacaattaattttgccgggttaaatgcaaaaatgtgttgcaatttgacggcgggtattgtaatataaatacagttcttataccataccaagaactatttaggttactatgataaggtttagtacaccttagagctctgacgcctcgcttttgcgaggcgttatctctttatattgcccaaaatacaaatatagcgtataattatggcataaattacaaaggaggcacagttatgcgcccttatgcgatcggacttgatattggcataacctctgtaggctgggcggcgttggcgcttgatgccgacgaaaacccgtgcggcatcattgatctcggaagcagaatattttatgcagccgagcatccgcaaaccggagaatcacttgctgccccaagaagggaggcacgcagcgcaagaagacgcctgcgccgccatcggcacagaaacgagcgtatcaggagcttgatgctcgaggaacaactgatatctcaagacgagcttgaggtgctttttgacggccgacttgaagacatttatgctttgcgtgtaaaagcgcttgatgagattgtcagccgaaccgattttgcaagaatattattacacatatcacaaaggcgcggatttaagtccaaccgcaagaacccgaccacaaaggaggacggcattttgttggcggctgtcaatgagaacaagcagcgcatgagcgagcacggctatcgcaccgtcggcgagatgtttttgctcgatgagacgtttaaagcccataagcgcaataagggcggtaattatatcacaactgtagcaagagatatgattgccgacgaagtgaggtcgattttttccgcgcagcgtgagcttggcgcgagctttgcaagcgaagaatttgaggagcgctatctcgaaatactgctcagtcagcggtcttttgacgaaggccccggagggaacagcccctatggcggcagccagatcgaacggatggttggacgctgtacatttttccccaatgagccgagagcggcaaaggcaacctattcgtttgagtactttacgctcctgcaaaaagtaaatcacattcgtatagtcgaaaacggagtctcctcaaagctgacagacgagcagcggagaataataattgagcttgctcatacgaccaaagacgtttcctatgcgaagatacgcaaagtgctgaagctttcggacaagcagctgtttaatatccgatacacggataatttgccggccgaggacagcgagaaaaaggaaaagctcggccttatgaaggcatatcaccagatgcgcagcgccattgaccgcatatcgaaagggcggtttgcgatgatgcctcgagcgcagcgaaatgctataggcacggcgctgtaattatataaaacttcggacaagataagaaagtatctgacagacgcagggctcgatgaaattgatataaacagtgcagattctatcggaagcttctcaaaattcgggcacatatccgtaaaggcatgcgatatgcttattccgtttcttgagcagggcatgaactacaatgaggcttgtgccgccgcaggacttaattttaagggacacgatgcaggcgaaaagtcgaagctgctccacccgaaagaggaagattatgaggatataacaagcccagtcgtccgcagggcaatagctcaaacgataaaagtgatcaacgccataatccgcaaggagggcagcagcccgacattcattaacattgagcttgcaagagaaatggcgaaggacttccgggaacggaatcgtattaaaaaggaaaatgacgataatcgcgcaaaaaacgagcagttgctggagcgcataaggacagaatacggcaaaaacaaccctaccggactcgatctcgtaaagctgcgcctgtatgaggagcagagcggcgtctgcatgtattcactcaagcaaatgtcgctggaaaagctgcttgcgccaaactatgccgaggtcgatcacatcgttccgtacagcatcagctttgatgacagccgtaaaaacaaagttcttgtacttacagaggaaaatcgaaataaaggcaacaggctgccgctgcaatatctcaaaggccggcgcagggaggatttcatcgtttgggtcaacaacaatgttaaggattacagaaaacgcagactgctgctaaaagaggaactgacggctgaggacgagtccggcttcaaggagcgaaacctgcaggacacaaaaaccatgtcgagatttctcctcaattacatttccgataatctcgagtttgcggaatcaactcgcggccggaagaagaaagtcaccgctgtcaacggcgctgtgaccgcctatatgcgcaaaagatggggcataacaaaaatcagggaggacggagattgccaccatgcagttgacgccgttgtcattgcctgcacgaccgatgcaatgatccggcaagtgtcacgctatgcccaattccgcgaatgcgagtatatgcagaccgagtccggcagcgtggctgtagataccggtaccggagaggttcttcgtaccttcccgtatccatggccggatttcagaaaagagcttgaagcccgactcgcaaacgaccctgcgaaggtgataaacgacctgcatctgccgttttatatgtccgcaggacgaccactgccggaaccggtcttcgtttcgcgtatgcccagacgcaaggtcacgggtgctgctcacaaagacacgataaaaagtgccagagagcttgataacggctatttgatagtcaagcgtccgcttacggatctgaagctgaaaaacggcgaaattgaaaactattataatccgcagagcgacaaatgcctttatgatgcgctcaaaaacgcgctcattgagcacggcggcgatgctaaaaaagcctttgcaggcgaattccgcaagccgcagagcgacgggactccgggcccgatcgtaaagaaagtaaaactgcttgagccgacaactatgtgtgttcccgttcacggcggaaaaggcgctgcagataacgattccatggtcagagtcgatgtgttcctttctggaggcaaatattatcttgtgccgatctatgttgctgacactctgaagccggagctgccaaacaaagctgttacgcgcggcaagaagtactcagagtggctcgaaatggctgacaagaattttattttctctctgtatccgaatgacctgatctgtgcgacaagcaaaaatggcataacgctcagtgtatgccggaaggacagcactctgccgccgactgttgagaataaatcgttcatgctgtattatcgcggcacagatatctcaacaggaagcatttcatgcatcacccacgataatgcttataaactcagaggcctcggcgtaaaaacgcttgaaaagcttgaaaaatacacagtggatgtcctcggagagtaccacaaggtcggaaaagaagtaagacagccgttcaacataaaaaggaggaaagcatgcccttccgaaatgttatgatcgaaagcccggcgcacatatctcttagcaacaggcagcttataatcagaaccgacagcgagcacagcttggctgttgaggatatttctgcgcttctgctcgaaagcagagcgtcaaccatcacagcagccgctttgtcctatcttgggcaaagcggctgcgccgtttttgtttgcgatgaaaagcatatgccttgcgccgtgctcgaaccgttttcgcagcatagcagagcgctgggtgtgctcaaagctcagcttgaggcaacagagccgcttaaaaagcggctttggcaaagcattgtaacggcaaaaatcgcaaatcaggcggcttgcctgagcttatgcggaaatgccggtgaagccgctgctttaaagcgcatgtccgaaaatgtcagatccggagatacggataatgttgaagctttggccgcgcaaagatatttcccggctttgttttactccgggttttcaagaggcaatgactgcgcgcttaatgccgcgctcaactacggctatgcaataatccgcggcagcgttgcaaggcacctggctgtatatggctttgttcctgcgctcggcctgcatcacaagagtggcctgaacagcttcaatcttgcggacgatgttatggaggctttccgtccggtcgttgacctgcttgtgtgctcgtttatcactgaggacgacaccgagcttacgcagcagatgaaaagaatgctgtttaacgtcctgaaccttgacatcatctccggaggtcagcaccacagcgtggcatatgctgttgagcggcttgttcacagcctttcacgttcgctttttgacggcaaggcagcactgtgcctacctgagctgatagatattcagcagcataaatatgaataagtttatgagaatacttgtcttttttgacctcccggtcaaaacaaaaaaagagcggcgcgaggccactcagttcagaaattttctgctcaatgacggatatcatatgatccagtattccgtatatgcgcgcgtgtgcaacggtatggacgccgtttcaaagcatcggacgcggctgaggcagaacctgccgtgcaacggttcaatacgtatgctcgttataaccgaaaagcagtttgaagcaattgagatacttatcggaaaattaactgaagcggatgatagctttcagtgcgagcaattatcgattttttgataaaaaaactccgccttatccattgataaagcggagttttctcgatagtctattataccataccaagaactatcagggaactataacctatatgccggcctttgcgaacctcggtgaaattataccataccaagaactatcagggaactataaccggtagcgtagccgattatttgggcctgccattataccataccaagaactatcagggaactataacgccgcaatcgcttcgactactatctgcctgattataccataccaagaactatcagggaactataaccggttccggtattgtgaacggcgtttacgaattataccataccaagaactatcagggaactataacacaagcacagtatgagcgtgacgcccgcggattataccataccaagaactatcagggaactataactaccctgatgatgctgtgttttacaaggttattataccataccaagaactatcaggggaataaaattcaaaaaaaggatcaaactttttcatcagttgaggaaatctctgagctttttgcttctgctggggtggcggagcttgcgcagcgccttggcctcgatctggcggatacgctcacgggtgacgttgaactccttgccgacctcctcgagggtacgggtgcggccgtcaactatgccgaagcgcagctcgagcacctttttctcgcgcggcgtgagtgtgtcgagcacctccatgagctgttccttgagcagcgagaagcttgccgcctcgctcggctcggatgcgtcctcgtctgggatgaagtcgcccaggtgggagtcctcctcctctccgataggcgtttcgagcgaaaccggctcctgcgcgatcttgagtatctcgcgcaccttttcaacgggcatgcccatctcggcggcgatctcctcggcgctggggtcgtggccaagctcctgaagcagctggcgcgatacgcggatgaccttgtttatcgtctcgaccatgtggacgggaatgcggatggttctggcctggtcggcgatggcgcgcgtgatcgcctgacggatccaccacgtcgcgtaggtcgagaacttgtatcccttggtgtagtcgaacttttcaactgcctttataaggccgaggttgccctcctgaatgaggtcaaggaacagcatgccgcggccgacatagcgctttgcgatcgaaacgaccaggcgcaggtttgcctctgtcatgcggcgctttgcctcctcgtcgccctggctcattcttatcgcaagctcgacctcctcctcggcggtcaaaagcggaaccttgccgatctccttgagaaacatgcggacggggtcgtcggtgctgtagctgtcatcgaccttaacgtcggccatttcctcctcggtgacctcttcgatctcgttaagctcctcgatttcgggcatgtcgatgtcgtcaaggatcgtgactgcgtcgtcgtcgctgatgtcgatctctatcttgctggcttcgagggcgtcgtaaaacttcgcgatagagtcggcgtcaacgcccttttcctcgagcgctgcgatttcttttgtggtgatcttgccggctttcttcgccttttccatgagctcgttgaggatatcctcggtggttttcgcctctgccgcttcctcgacgggcttttcctcggcggccttggtgcggcgcgtgctttttttcttcggagccgattttgcggcgtctgccgcaagcagctcgtcggttgcgcgctcgagatcctgcgtggtcatggtttcaatgtctttatccatagttttacccctcatatcctttggtttctttaagtctgtttgcaagtttgcgaaggtcctcgcccgactgcttcagctcgtgccgggagcggatcctttctatgtaatcggcaagcgccttgtcaccgtttcgcagtgcctccggtttttgcagaaccgaggccaaaagcgccgcctcctgcggaagcagcactgcgctcatcgaggccatgctgattatttcgccgttttcaaattttgatttgagcacggaatatatccgcgccagcgccggcgacgagaagatctccggcggcgggagctccttgccgcggcagatgccctgatcgagatacagaagccttattatgccctcctcggcggcggcggattcgggatcttcatagtgcagctcctttgccttgggctgaaactgccgctcgggatgtgaggcgctttttgcgtcggtgcgctgggccgtgcgcacaaggcgcttgcgccttcgctcaacctcctgcgcgacaacgtcgctggcaacaccggccattgacgcaacgcgcatcgcgtagacctgacgctccacgctgcccggcaggtgcgcgaccatatccgaggcttccttcaagaatgcgaccttctgctcgtcgatgctcaggtcgtatttatccgtcacattttgcagctggtagtcgatgtggttttccgacttgtctatcagatttcggaacgcgtctgcgcccttggtccttatatactcgtcagggtcctttgcgccgctcatcgacagcaccttgaccttaagatcgagcttttcaagaagcccgatggcgcgctgcgaggcttttttgcctgcgccgtcgttatcgtaagcgatgatgacctcgttcgtgtaatgcgagatcagccgcgcctgctcgggcgtgagcgacgtgccgagcgacgcgaccgcgccgtcaaagccggcctgatgcatcatcacgacgtcaacgttgccctcagcaagtattatatgtccgctcttcgactttttagccagattaagcgcaaaaagattgcggcttttgttgaacaccatcgtttccgggctgttcatatacttcggctcgccgtcgccgagtattctgccggaaaagccgatgaaatcgcccctgacgtcgatgacggggaacattagccgattgcggaaggtgtcgtagtgtccgccgtttttgcccttgcggacaagtccggcgtcgaacatctcatactccgagtagccgagcgccttcatggcgtttatgaggctgtcccatgtgtccggcgcgtagccgaggccgaagcgctttgccgtgtgcggtgttatctgccgccgcgccatgtagtcaagcgcaggcttgccctcgggcttgctgaggcacgagtagaaaaatctcgctgcatcgcggttcaagtccagaagccggcggcgttttttagcctcgcggctatcctcctgctcgggcatggtcatgccaacgcgctttgccaggaactcaacggcctcagggaagctgagattttctatctccattatgaaatttataacgcctccgcccttgccgcagccgaagcagtgatatatctgcctgtccggcgacacggaaaacgacggcgttttctcgctgtggaacgggcacaggccgaattggttcgagccggagcgcttcgttaagcgcacatactcgcccacaacgtctactatatcgtttttttcaacaagctcctgaaggaagctctccggtatagccattgcccatcctttcttttagcagcgaattgacgcacctacggatacatttatctctggcagcccggtgtcgaaacaacggaggaaaccatgacgtttcgcgtaacgcaagtgcgctgctggattttttgccgcgcccctgtagggaacagacttgcctgttccgtttttttagaggcgctttagcgctgtacctatacataatattgcggcagcccggtgtcggaacaacggagaaaaccatgtttgcctcgtgctgcgttcgtgcgctgctgaatttttcaccgcacctgattggctccactgttaaggggagcaggcagctttgctgccgaggggttgaattaaatccgtgcgcttgcgcacacattaattattcatcattcactattcattattaattttatttgaccgtccacgacatggggataaatatctcgctgaatttttccatggcgtagccgtcggtcatgccggagatatagtcgcaaacggcacgcgaaactccctcgcggcttgcgataagctgcatctcgtccggcattttatccggatgcttgaggtaatagtcaaaaagcgagccgatgatgccgtcaaccttgctctcctcgcccttggcgatcggattggtgtacacgtccgaatacatgaaggcgtggaagaaatcgaccgcctcctgcatgtaatcgctcatttgaatttttccgccgccgctgttttcaatgaggtcgagcatgatagaattaatcctctcactgttgcgctcgccgcagcgcgtgcggatcatgtcgggaacgtcctctgcgcggagtattccggcgcggatggtgtcgtcaaggtcatgatttatgtacgcgatgcggtcggcaaggcgaacgacggtcgcctcggtcgtgtcgtccggcgcgccgtgcgtgtgatgcaggatgcccatgcgcgtttcatagcacaggttaagcccccgaccgtcgcgctcgaggatatcgacaacgcgcagcgactgctcatagtgcttgaagccctcttcgtatattttgttgagcgcgcgctcaccggcatgaccgaagggagtgtgacccagatcgtgccccagcgccattgcctcggtgagatcctcgtttaagtccagcgcccttgctatggttcgcgcaaggcgcgatacctcaagcgtgtgcgtaagccgcgttctgtagtggtcgccctccggatgcagatacacctgcgttttgtgctttaatctgcggaaggccttggagtgcgttattctgtcaacgtcgcgctggaagcaggtgcgtatctcgcactccggctccggtgcgcgccggccctttgagttctcggctctgacgccgaactcaccgacgagcgttcgctcgatcatctctcgcttttctctcggacacgccatgcatttccctccaatcaaaaaaggcatcaaattttctttcaatactttatacgacgcaaattcacatttccctgcaatttattttgaattttctcgaaaaaattttcggaggcacggctgcgcccccgaaattattttattctgaccggcataagctcctcgcccacggtctgcgcgctgcacgctccggcactcagctccgtaacgcgcgcggaaaaagcctcggcgttattctccggcagcagcagcgaaagcagcacgtccgcgccgtagtcaacgttctgcacagccccgtcaagcgaaaggcactccgttttcatgcgctcgagaagcgaatacgggcaggcaacctcgagctttacccagcggcgcacggcggcgatcccggccgcgtccagcgcgtccttcgcgcttttcgtgtatgcgcgcagcagtccgcccgttccgagcagaactccgccgaaataccgcgtgacgacgcacacgacgttttcaacgccctcgcgtttgaacacttcgagcatcggcagtcctgccgtgccctgcggctcgccgtcgtcggagtagcgcacggctccgccgcggattatatagcaccagcagttgtgccgtgcgtcatagtgctttttcttcatctcgtttatgaagtcgcgcgcggcgtcctctgtttcgacaaagcgcacatggccgagaaagctcgaacgcttttcgacaaattcagcctcgccgctgccggctggcacgaaatactcgctcaatcctcccagtcctccttgggctcggtgtaattgggtatataccgctttaccttgccgaaaacctcgggcggaaccgtgacctcggccttgatgccgtcgtcgagatattcaaggctcgtcactgcggcctcgcggtttaaaagatccatgatcccggcatcggaatacggtatgcgcagcgtgaccttgtggttgccgcggtcgagcagagccgacaggcgctgcaccagctcctgtacgccctcgccgctttttgccgaaaggcagacaacgtcctcgccgtgcggcagtatgccgaggtaggcgtcgcacttgttgaaaacgcggatgcacggcgtctgctcggctccaagctggcagataagctcgtcaacgacgcgcgcctgctcctcccagtcggggtttgaaatgtctatgacatgcagcagaacatcggcgtagctcagctcctcgagcgttgccttgaacgcctcgaccagatggtgcggaagcttgcggataaagccgacggtgtcggatatgagcacctcggtcacttcatcgatgcgcagcttgcgcgttgtggtgtcgagcgtgtcgaaaagacggtcatttgccggtatgccggcatcggtcaggcagtttaaaagagttgactttccggcgtttgtgtagccgacgagcgcaacgacgggaacgtcgtttttctcgcgcttgcggcgttgggtcgagcgcaccttgcgcacggcggcaagctcctcttcaagcttttgtatcttcctgcggatatggcggcggtcggtctcgagctgagtttcgccggggccgcgcgttccgatgggcgatgagccgccggaggccgtctggcgcacaaggtgcgtccacatacccgtcagacgcggcagcaggtatttgtactgcgcaagctcaacctgaagctgaccctcgcgcgtctgtgcgcgctgggcgaaaatatcgaggataagccccgagcggtcgagcaccttgaccccaagctcctcgccgaggactcgcatctgcgacggtgacagctcgttgtcgaaaacggcaaggtcgcagttgttcatttctataaattccttcagctcggcaaccttaccgtcgccgatgaagctgcgcggatcgggagtcgggcggttttgtatcatcatgccgacggcctgaccgcctgccgtttcgacaagcgcggcaagctcctgcatcgagatctcgcttgagcgctccgactgctccatcgacgccgccgcaagtccggccagcaccgcgcgttcgatttttatatcgttagtctctattgttatcagtccttatttttggtttacattatattataccaaatccgccgccgcttgtcacgaaaatatgaaaaaggctctctttcgggagagccttgtgcttgcgtaagatcgtttatttgcctccggacgcgcgatagaggaaggtcacgacctgtgcgcgcgtgcagccttcgttcggtgaaaagcgcccggcgcttgtgccattggttatgccctcggagcttgcccaaataacagcgtcatggcagaacgagccggaggaaacatcggaaaaattgcatgcgccgcttaccttgggcgagcctgccgagcggtacaggaacgtgactatctgtccgcgcgtgcagggagcatacggcgaaaagctcgtgctgctcgttccctttgttatgccgcgctcgaccgcccattgcaccgcttcatagaaaatgtcgccgggctttacgtcggcaaagctcacggccgccttggcctcaggctgcccggccgcgcgccagagaaacatcactatctgatatcgtgagcagacgtcatttggagagaaagtatttttccccgtgccgtttgttatgccgttttccaccgcccactgcacggcgtcgaagtaaaacgcgccggacttaacatcgtcaaattccggcacggcttccgcacccttcgtgccgcagaccgagcacacgccgccgaaaaatttgtgccctgctgccgcaacggtcttgccgatctgtgtcatgtctccgcagcgcatgcagataagatcacccgtgtagccgctttcggtgcatgtcggcgctttgacgcgcgcaggctgaggatcgtgaccgagagcgaatatgacgctgccctgcttgaacaccttgccgcagacggtgcatacctcgtcgccggtgtagccgccggtcatgcagcctgcggctttggcgttttgcagctgcgttttatgcccgacggcgctgacataatcctttgtgtagcactcgccgcaggagcaggcgtaggtcgtaaatccctcggtcagacaagtgggctttgtgacgatggggataaaatcgtgcttgtgcgggatgtccttgttcggatcgagtatgccgcagcggacgcatatgccgcccttgtagctgtgcccgagcggcggcgtgtagctgtcctcgcgcttatcgccgcaggcgcacagatgcacggtgcagccgcgctcggtgcatgtcggagggataacggtgtcggtgtatttgtgctcgtgatctgtgcgggtaaagctcttttcggcattgtcgagcgcgttgttgccggtttctttcgtgacctggctccagtccgtgtcgctgccgagataatctacctttttcagcgccgtgcagccgtcgaaggcacgctcgtttatgtggctgacgtttttcggtatcgttatgctctcaagcgatgagcagccggaaaacgcctctgccggaatgacggtcacctcggcaggaattttcacgcttttgagcgcggcacagcccgaaaacaccttttcgccgagcgtcttaaggccgtcgggcagcgcaatctccgcaagcgcggcacagcctgaaaagcatgaggcttcaagctttgttatgcttttaggaagcgtgatgcgctttagcgccgcgcagttttcaaacgcgctctcgccgatcgatatcaccgaatcgggaatgacaaggctttcgagctttgcgcaatctttgaacgcgccgccggcaatggcgacggtgccgctcggaacggtgtagtctgccgacttgccgacgggatatcgcagaagctctttgtcggcggaaaaaagcactccgccgaccgac

SEQ ID NO: 4067 - DNA, 14096 bp, synthetic construct
  source 1..14096: mol_type = other DNA
  misc_feature 1..14096: note = Synthetic
tattaatttgttatcacttgagggctgtcgcatttagcggcagcccatattataattatatggagagaaataatttatggattacgttttaaatatcatccctcagatgatggatggctgcctggtatcatttcaagtttttattatcaccatcgtactgagcattccgttgggcattctgctcagcctcggccgtgtttccggcattaaacccctgcaggccctcataggcggctacgtttggattctgcgcggctccccgctgatgctgcagattttcttcgtttacttcgtactgccgtccgtaggcattcgcctgccggactttgaatcagccatcgtagcctttgtattaaactacgctgcctacttctgcgaaatcttccgcgccggcattcaggcaattcctgcaggccaatatgaagcagcgcacactctgggcatgaactacgtgcagaccatgcgccgcattatcctgccgcaggttatccgcatcattctgccgcctatcagcaacgaaaccattactctggtaaaggatacctccctggtatacgttctggcgatgaacgatctgatgcgtaccgcacgtaatctggtacagcgcgacttttctattacccccttcatcgttgcagctgtcttctacctgctggcaactctaattttaacccttgtttttgaacgtctggaaaaacgcttctccagatatgaccaataggaggagtaaccactatgactactaaaatcaaagcaaccaatatctggaaaaaattcaataacctcgaagtactaaagggcattgatcttgaagtaaatgagggcgaagttgttgccgttatcggcccttccggcggtggcaaaagcaccctgctgcgctgcctcaacaagctggaaacaatcgataaaggcagtatcaccatcgacggcgaagagctgtgccgtgaaacctccggtggtacggaatatgtcaagaacaatgatgtccgccgcatcgcctgcaaaatgggcatggtattccagcagttcaaccttttcccgcatatgactgttctggaaaatctgattgaagcgcctgtcaacgtacaaaagcgcgataaagcagaagttatcaaggaagcagaggttctgctggcaaaggtcggcctttccgaaaagcgtgatgtttatccgcgcaagctcagcggcggccagcagcagcgtgtagctatcgcccgtgctttagccatgaagcccgccattatgctttttgacgagcctacctcttctctggacccggagctgaccggtgaggttttgcgcactatgcgcgagctggcagacgaaaaaatgaccatggtagtcgtaacgcatgaaatgggctttgcccgtgaagttgccaccaaggttgttttcatggctgacggccatgtgcaggagcagggcagtccggaggaaattttcgttaaccccaaaaacgaacgtctgaaatccttcttaaaagtaattttaaagtaatcagataaaggtttctaaattaattcacagattacacctacctttgtcatatatgtttgttacaataatactcgaggatgaaaggaacctattgaacaaggcaagcaaagaaaggtgatttcaatgcacgttaaaattcttggccccatgactaagcaggcagagctgctgttgcagaatactgctattgctttaaagaagctcaaggttaaggccgagtttgaaaaagtttccgaattccaaaaggtagtggcctatggagtgatggctttccccgctttagtcatcgacgaaaagttagttgctgtcggtagcacgctttcggtagatgaagccatgactcttataaagcaactctcctaaacatatcttttcatcatacacctctccttaaaatacaccgcaccgtgcgaaatgtgcggtgtatttttttgctttgaaaacattttgattaatgttaaatttatgtaaagttccttacgcacttttaacatcataaaatttcgagtataataagtataggtatatgctgtttttacagcaatcatggatgcatacaaattaaaaaaggggacttattttttatgcttgcttatttcttggcatttttaggcggtatcgccttatttatgtatggtatgcagctgatgggtgacggtctgcaaaaggctgccggcgctaagctgcaaaagattttggaagccatgacaggcgtgctcgctatgggcattctgttgggcgcagttgttactgcagtgctgcaggccagcggtgctaccaccgttatgaccgtaggcctggtaaatgcgggcctgctcacgctgaagcagggcttcggcattatcatgggtgccaacatcggtactactatgacggcacagctcatcgccttcaagctttccgattatatcacgattttaatcttcatcggctttttgatgcagctgctggcgagaaaaagccgcacaaaatatcttggccaggtaatgctgggcttcggtattctgatgctgggcatggatatgatgggcaaagctgttatgcctctgcgtaactatcccggctttgtgcatttcatcgaagttttctccagcaatccgttgctgggcatcggcatcggtatgattatgactgtactgattcagtccagcagtgctaccatcggtattcttatcgctatggccggtcagggacttattccgctggagggtgcgattcctgtactgctcggcgacaatatcggtacctgtattactgccgtactcgcttcactgcgtgctaaccttacggctaagcgtgtagctgcagctcacgtaatgttcaacgtcatcggcagtataatttttgtagtctttatgccgttcttcattaaattcgtgctgcttgtatcgcctgacggcgacatagcgcgtcagattgcgaatgcgcactcggcgttcaacattttgaacacgctgctctttatgccctttgttaaccctttcatcaagctggtagaaaagattgtgcccggcaaggcagaaatcatctccatgcgccctgtttatcttgacaaaaacatgctgaacactccctctatcgctatcagccttgctgtcaaagaggttgtgcgtatgggcgagctggcacgcaaggacgtgcgtcttggcatggaggctattcaaagctttgatgccgacaaggtaaaatacgttttggagcacgagcctgttgtcgatgcgctggagcgggatattaccgactatctgacacagatgagctcatctgaaatgagcgaaagcctgacgacacgccacaccggtcttttgcacgcctgcacggatatcgaacgtatcggtgaccatggtgaaacattagctaaacgcgcacgcaagcttgttgaggaggacgtggttttctctgatgaggctaaggccgagctgctgcagctcagcgaaatggtactgcgtgcctccggacgttcattggaggccctagagaaaaatgataaggttattgcggaggacgctgtgcgtctgtgccgtgaggttaagcaataccagaaggaaatccgtaagaatcatatcacgcgccttaacgaacatatctgcaatcctactgcaggctttgttatgatggagctgctgattaatatgaagcgtgtatccgatcattccaagaacattgcccagctggtgcagggaacattctaaagcttataaagcaacagcaagcatacagactactgctcaacatagtctgtatgtttttcttttgcgtaaaagcattgctaagctaacagagtacgtacataattaatccgcactttctcatatgcgcttatgaatttactcaagtatactttagtaaatcgtacttgagtaaatttactcaaaatattgcaaactctgcttgcctaaaacaacagtacaatcaccatagtcttatccttacatacctattttgctgtacttataaaatcacagctttttcacaaaatctttgctataatttaagtaagcaaggactgcgtttccgactgctacagtcttagcgcagtcctttttggttacgcgtagagcctcaaacggctttacggttttttattatacctattgcagcagtgatttttataatatataaatttataaaatatattatatatattgagcacaacatttctccgctgcaaaacgacggaacgctgcagcgtttcacactttttttactttaattatcgatgacaccttttactaattacaggtaaagtattacaatataagatgagtatttatcagcttagattcagattataaaaaaagaatatgaacatgcttcggatatcgccctgagcttcatattccaggaggttactatgcagataggatttgatattggcagtaccacaattaaaatcgccgtactggacgatgcaggcaatctgctattccataaatacgaaagacattacagccagattgcagagaaaattctggccctacataaagaattgatgactaaattccctacactgcatagcgcacgtctggccatcagcggcagcggtggtatcggtgtagcagacagctgcggcctgcaattcgtacaggaggtttttgcggaaaaaatctgcgccgaaaagctcaatctaggaaccgacgccattatcgaattaggtggtgaggatgccaaaattctcttcttaggccgccattttgatgcacgtatgaatgacagctgcgccggaggcaccggtgcctttatcgaccagatggcttccctgctgaatgtagaaacaccccaaatgaacgagctggcacagcaggcacagaacacctacaccatcgcaagccgctgcggtgttttcgccaaaagcgatatccagccgctgctcaatcagggtgcggaaaaaagcgacttggcagccagcatcttccacgctgtagcaagccaggctatcaccggtcttgccaaaggccgtcccatcagcggcaatgtgttgtatcttggcggtccgctcacctttatgagctgtctgcgcgatgcctttgacagtgttctgaatatcaaaggtgtctgcccggaaaacagcctgctttatgtagcaatgggtgcagccttctgtgccgagcacgaggtggaccttaccacgctgccagaaaagctgcaggcagcagcagcacagcacagctttgaacatctgccgccgctgtttaaaaacgaaggcgaatatactgtttttaagaagcgtcactctaaggaaagtgtcgctataggcacccctgcggaggcaagcgaagcctttatcggtatcgattctggcagtacgactattaaaattgctgttatgagccctgatggcaagctgcttgactccttctatcaaagcaacaagggtaatcctgttgttgccgtccgcaattatcttaccgatttctatacaaaatatccccactgccgcctgttggcaggtgcagtcaccggttacggcgaggagctgattcgccacggctttggtgttgactatggtatcgtagaaaccatggcacacttttatgctgcccaatatctggagccggaggtagatttcattcttgatatcggcggtcaggatatgaagtgcctgaaaatccataacggtgccatcgataatatctttttgaacgaagcctgctccagcggctgcggcagctttttgcagacctttgccgaaattcttggctacacagccgagcagttcgcacaaatcggtcttaaagcagatatgcctgtagatttaggcagccgttgcaccgtgtttatgaacagcagcgttaagcaggcacagaaggacggtgcctccgttgccaacatcagcgccggcctgtccatcagtattgtcaaaaacgctttatataaggttatccgtccggccagcaaagaagccatcggcaagcacatcgttgttcagggaggcaccttcctcaacgactgcgtactgcgcgcctttgagcaggaaatggatttgaacgttatccgtcctaatattgccggccttatgggagcttacggcgctgccctgtacgcacaacgccgctacaaggacgcaccgcatcagacaacgctgctcaacctgcaacagctgggtgaattcgtccacaccgtcaagggtatgacctgcggcctgtgcaataaccattgccacctcaccgtcaacacctttgccggcggcaaacgctttatcagcggcaatcgctgcgagcgtcccatcacccacatggcacccaaggatgagctgaacctgtaccgtcaaaagctgcagctgctcaaggaattgcctgttaacgaaacgcctaaacgcggcattatgggtatacctatgggcctgaatatgtatgagctgctccccttctggaatgccttactctccagcctgggcttcaaggttgtacacagtccgattgaagacaaaaacatttaccgtcttggtcagggaaccatccccagcgacaccgtctgctatccggctaagctgatgcacggtcatatcaaatggctgctgcagcagggaatcaccaatatcttctatccctgcatgacctacaatatagatgaacagagcacggaaaactgctataactgccctgttgtagcctattatcccgaagtgctgcacgctaacatccgtgatttgaataagcccgagatacatttcttctatgattatcttggcctgctgcataaaaagaagctggtcaaaaagctgcaggaaatgtttgccaaggcttatccagatatcactaagtatgaaatccgcaaggcagttgatgctgccttcactgccttttatgactatgaagcacaggtaaaggctaaaggacagcaaatcatcagtaaggcacgcgaagagcataagcctatcgttgtactggcaggccgtccctatcacatcgaccctaaggtcaaccacagtatcgaccgcctgattactaacatgggtgctgccctcgtcagcgaggatgccgtaagcagtcatattaagaccaaggaactcaaccgcgacctgcaggtgctcaaccagtggacctatcacggccgcctgtatgcggcagccgaatatgttgcccaaaatcctgatatgcatctgattcagcttgtaagtttcggctgcggctgcgatgcgattacggccgatgaatgccgccgcctcctcgaagaacgcggacgcatctatacacaaataaaaatagacgatatcgacaaccttggtgctgccaaaatccgcatccgcagtctgttctccgcagcccagcttttcgatatagataataattaaaggagatttgcatatgctaccagcagctaacgttaagtttacccccttcacggaggatatgaaaaaaacgcatactatacttatacccggcatgctgcctatgcatttttcactgctgcaggcagcactcgtaagctgcggctacaaagccgaggttctgcacaacaccgggcgcgaggtaatcgaaaccggtctgaaatacgtcaataatgatatctgctatccggcactgctggttatcggccagctgataaacgctttggaaagcggcaaatatgatttggagcacactgcgctgattatcacccaaaccggtggcggctgccgtgcctccaactatatctatctgctgcgcaaggctttggaaaaagccggccttacgcacatccctgtcatcagcctcaacgtcaacggtctggagcagcagcccggcttccatctggacgcatccatggtgcataagttcttggctgccgttgtttacggcgataccctgatgtacctgacgaataaaacacgtccctacgaagttgtacacggcgctgccgacagactggcgcaaaaatggctggcacgcttaagcgaagccttcaagagtggcaaggcgcaggctttaggtaccatcaagcagcttactaaggctattgcgcacgaatttgcggatttgcctatcaccaacaaggagaaaactaaggtcggtattgtcggtgaaatctatatcaaatatgccgctttgggcaacaataatctggaagccttcctgcagcgtcagaactgcgaatatatgctgcccggtctgatgaatttcatcatgtactgtgttgatacttatcttacggactataagctttacggcggcagtctgcttaaatacagtgtcaacaagggcgctatgtggtatttaaaatatatggaaggcatactgcatcaggctctcagtatcgctcccttcagcgcccccgccacctatgaggaaaccaaggctatggccaagggcgttatcggctacggcaacaatatgggcgaaggctggctgctgactgccgaaatgttggagctggtgcacagcggctacaccaatatcatctgcgctcagcccttcggctgcctgcctaatcatatcgccggccgtggtatgattaataaaattaaggaaattgctgaagaggctaatattttagcactagactacgatgccagcgctgcccgcgttaatcaggaaaaccgcattaagctgatgctggcgacagcgaagtaaaaaagaataaaaacgctaaagttacgagttacctgctgcattttacggtttacagtatattcttgtcccggcaggcgattttctttatgaaatatcttaactttttgttttttatttttgcttaaaatattgtattatttttcataagtatagcaggatttatatagcttcatctagaattataaaaatatattttattttgagatttacaatttgaggcagacgtgttatacttaaatcaatccttataccataccaaggattatcgggttactatgataaggtaacacaccgaaaagctctaacgccctgccatccggcagggcgttatctttttacacgctcaaataagaaaggatgttgagaatgaaatatgcaataggcctcgatatcggaattgcatctgtcggctatgccgttctagcgttagatcacgaagaaaatccttggggaattatacgccttggttcgcgtatctttgatgtagcagaaaatcccaaggacggtgcctccttagccttgccacgtcgtgaagcccgcagcgtccgcagacgcctgcgcagacatcatcatcgtttggagcgtataaaaaatcttttgattaacaccgagcttataacaaaagatgagcttttgcatttatatgatggtaatctttctgatgtatacgaattacgtgtaaaggcccttgattattctgtaactaatgcagagcttacacgaattttattacatctcgcacaaagacgtggttttaaatccaacagaaaatctgatgccaacgacaaggaagcaggccagcttttggaagcagtttccgcaaacacaaaacgcatgcaggaaaaccattatcgtactgtaggcgaaatgttttataaagatgatttgttctcaaaatataaacgcaataaaggaggcacctaccttactacagtgcatagagatatgattgctgccgaagccagaactattcttgaaaagcaatttgctctaggcaacgatatctgtactcaagattttatagacaaatatttatctattctcttaagccaaaggcaatttgatgaaggtcccggcgaaccaagtccctatgcaggcaaccagatagccaatatgatcggcaaatgtacctttgacccgaatgaatatagagcagccaaagcaagctattcttttgaacgcttcaacttgctgcaaaaagttaatcatttacgcctattacttgaaggaaaatccattgctcttgataacgaacagcgcaaaaaaataatagcattagcgcacgacaaggcagatttaagatattctcatatccgcaaagctttaggcttagatgaaaaggtattgttcaataccataacatacaatgatgatgtaagcgtaatagaaaagaaaacaaaatttaattttctccaagcctatcatcaaatcaaaaagtcttggcagaagatatgcagaaacttacaacagaacaactagacaatataggtcagatactttctacatataaaagcgacaacaaacgtacagaagaactttctgcactaggcttagaaaagaaaattattgatgcattacttggcattaacggcttatcaaaatttgcccatctttctctcaaagccttacgcaaaataaatccttatcttgaagaaggtaaaatttacaacgaagcatgtgctgctgccggttatgattttaaagctcatgccaacacacaaaaaacagagcttttacctgcatacaaggaagagatggacgatataaccagtcctgtagcaagacgagctattgctcaaagcatcaaggtcattaacgctattatcagagagcaaaaatgttctccggtttatattaatatcgaattagcacgcgaaatggccaaaggatttgatgaacgtactcagattgataaagcaaataaagaaaaccaagctaaaaacgagcgtattatggaacgtatccgcactgaattccataagtcaaatccaaccggtatggatttaattaagctaaagctttgggaagaacaggatggcagaagtccctatagccagaaagcaataagtataaaccgtctttttgagcccggttatgtagatattgaccacatcgttccctacagcataagctttgatgacagttttaaaaataaggttctcgttttttctgatgaaaaccgtgacaaaggcaacagacttcctattgcttatctccaaagtaaatttggcgcaaaagcagctgagaattttattatttgggtgcaaagcaatataaaagattataaaaaacgtcagaagctgctgaaacgtgaaattacggaagaagatattaataaatttaaagaacgtaatctgcaagataccaaaactatctctcgttttctttataattacattaatgattatctgctgttcgctccttcagatacaggcaagaaaaaacgagttacagctgtcaatggtactatcacagcttatttgcgaaaaagatggggcataaataaaatcagagccaacggtgataaacaccatgctgtagatgcggttgtaattgcctgcactaccgacaagatgattaaagatctttcttctttttccaaataccatgaattggagtacatgcacacagacacagaaagccttttggttaattctttaaccggcgaaattttaaaacgtttcccctacccatgggaagattttcgccccgaactaatggcgcgtttgtctgataatccagccgatgctttacgcaagcttaatttgattttctatcacggaaccgatttaagtaccattaagccgattttcgtatcacgcatgccacgtcataaggttaccggtgctgcgcacaaggcaaccatcaaaagcgcacgctgcctaaataatggtattgtaatctgcaaaacaagcctgcaaaatctgaagcttgataaagaaggggaaatcgcaaactattacgcacccgaaagcgacaccattctgtacaatgctttaaaggaacgcttgcgtgcctatgataacaaaccggcaaaggcctttgccgaaccgttttacaaaccaaaagctgacggcacaccgggtcatttggtaaaaaaggtcaaggtatacgaaaaatctaccttaaatgtcgctgtacagcagaatactgctgttgccgataatgacagtatggtacgcgtagatgtgttccatatcaaaggtgaaggttattatcttgtgcctatttacatagcagacactctgaaaaaagagctgccaaacaaagctattgtagcttacaagccttatgctgattggcctgtaatggatgacagcaactttattttctcgctgtatcctaatgatttaataaaatttgaacatagaaacggtgttaaattcgccaaagtaaataaaaaaagcagccttgctgaaacctatttgacaaaaagcgaattggtatattacaaaggaactaatattactgtaggttcaacttctattattacaaatgataattcgtatactgtaaaaagtttaggcgtaaagacactctctaatctcgaaaaatatcaagtagatgtcctaggcaactataccaaagtaaaaaaagaaatacgcaggccttttcgttaagaggtgattaaaatggcttatcgtaatctgatgattgccagcaatgcgcaattaaaaataaaaaacgagcagcttctgattaaaacagatactactcacagtgttcctattgaggatattaattccgtactcgtcgaaaatcatcagagcacgataaccattgccaccttagccaaattagcgcaagacggcgtaacaatttttgtctgcgacgaaaagcatactccttgcgctattatgatgccttttgcgcaaaatgccagacaatacggtgttgttaaattgcaggaaagcctatctctgcctctacaaaaacagctctggcagcagattgtgaagtacaaaataaacaatcaggccatttgtctggaattcaataagcaggacaatgccgcacagcagcttcgttcattggcaaaaaaggtaaccagcggagatagcaataacacagaagccgttgctgccgctgtttatttcaaagctctatttggcccagactttatcagaagcaatgacgatgacctgcgtaacgcggccttaaattacggatatgctattatacgcggacatattgcacgattaattgccagctatggctttctgcccatgaaaggcattcatcataaaagcgaattaaacgcatataatttggcagatgatttcatcgaaccattccgtcctgtagttgacctgtttgtagcacaagaagtacaagcctttgaagcattaacaccacagcttaagcaaaagctctataatcttttgaacatggatatcaaaatagcacagcaaaatcattctgtggcatatgcagctgaaaaaatgattcaaagcttcagccgctgttgccaaaaaacatccaaggaactgctgcttcccaccttagtagccttgaggcagcacacatatgaataaatttatgagaatgctggtattttttgatatccctgtaaaaactaaaagagaaagacgcattgctgcagcgtttcgtaattttttgctaaaggacggctaccatatggtacaatattcggtttatgctcgtgtctgcaacggcatggatgcagtacaaaaacatcgcagcagattaaatacagctttaccagaaaacggctctgtccgtttattagtcataacagaaaagcaatatgaaactattgaaatattggttggcaactatcacgaagatgatacaccatttgtctgcgaacagctttcaattttctaaaaaactaattttactgctcatttaatgctatttacattattttttctcataccaaaaagcccttgaagccaagcttcaagggctttttgcagtggtctattataccataccaagaaccaccggggaactacaacttgttgttccctgcggtcaatgccttggttattataccataccaagaaccaccggggaactacaacgcagaaagcgcaattgctcgagcagagcgcattataccataccaagaaccaccggggaactacaaccacagttatctaatgttgcaaaagctgattattataccataccaagaaccaccggggaactacagccaagattctgctacaataaaagcgtgatttattataccataccaagaaccaccggggaactacaacccgatgcgcggtagataggcgcgcaacgccattataccataccaagaaccaccggggaactacaactacacgctctgtgatatgctcgatggtaacattataccacatgtatctggaaatattacatcatactcaaaaatctcaacatagcaaaaaaagctctcataaaaagtatatcttcttgacattcccttcaaatcccattaaacttaaactaagttctttaaaaccgcaagtaagcttattcatccggctcatttacctgcggacaattaaataagcagtatatcctgcagatgca

SEQ ID NO: 4068 - DNA, 13237 bp, synthetic construct
  source 1..13237: mol_type = other DNA
  misc_feature 1..13237: note = Synthetic
tgcatatggtggggccgatgggctttaccatcgacgataaaaaattaaagcgcgccgggcttgactactggcaccagcttgatataacatattataaagacctggcggactttttcgcccgaaacaaggggccgtttttctacttcacatccaaaggcccgcgccgccatgtggatgtacactatcccgacggcgcatacctcgtctttgggcgcgaggacgccggcctgcctgaggaactgctggcagcccacgaggccgactgcgtgcgtatgcccatgcgccggggcgagcgctgcctgaacctgtccaacgctgtggccgtaggcgcgtatgaggccctgcgccaatgggattttgccgacttagagacccgcgggcagctgacccgctacgaatggagtgaggatgtaaaatgagcaagatcggttttctgacggattcctgttccgacattccgcaggagcttgcggacaagtacggcatcgaggtcgtgggcttccccatcaacctggacggcgtggaatacatggagcgcaaggatttcaccaatgaccagttttaccagatgatgcgcgacgcccagggcgtgcccaccaccgccgccatcacccagctgcagtggtgcgagatttacgagcgctatgtggacgagggctataccgacctggtgcatctgtgcatcaacagcgcgggatccagtacctacaacaacgccgtcaaaggtgcggagatgctggccgaggagcgccccggccataagctgaacatccagctcatcgacagccacacctactcgatgccctacggctggtatctgtgcgagtgcgcccgcaaagtgcgcaacggcggcgagcttgccacctgcgtggaggagatgaagcagagcctggaccgcgtggagatctgcctggccgcatacagcctgaagcagatgaagaagtcgggccgcgtcagcgccgccgccgctgtggtcggcgacctgctgggcatccgccccatcatcagcctgaacgcgggcgtctccaaggtcgaggccaaggtgcgcggagacgccgccgtgcccgccgccatgatcaaatgggtggagagccgcgtcgattccatgaaggacaccccctacatggtggcttacacgtccagcacctccaagcgcgacgagcttgtcaaggcctgcaaaaaggcattcggccatgcgccggtcattgtgttccagctgggcggcgttgtcagcgccaacaccggccccgacggcattgccatcgtctaccccggccatccccgccatctggaggcctatgccccgcagctgccgtaaaaaagacttgcattttttcaagggctgttgtatactataaacagttcttataccataccaagaactattatggttgctatgataaggtcataggaccgtaaagctctgacgccctgtcttatgacagggcgtcatcttttttgtcaaattttcgtggaaaatgtcagttgccgtgtgattctttatgcggtatgataatagtaaaaaagaaaaggtgtggtgaatatgaagcacccctatggaattggcctggatattggcattgcgtctgtcggctgggccgtggtagtgctgaacgaaaacgcggaaccctatggactgatccgctgcggctcgcgcatatttgacaaggcggagcagcccaaaaccggagaaagccttgctgcgccgcggcgggaagccagaagcacgcgccgcagactgcgccgccgcagcttgcgcaaggcagacttgtatgagctgatggcgcaaaacggcttgccgggcagagcgaaaatagaagaagcggtgcaggcgggccacctgccggatatctatgccctgcgtgtgcaggcgttggatggccctgtaacggcgatggactttgcccgaattttgctgcacttgatgcagcgccgtggtttccgcagcaaccgcaaggcagatgatgcccagaaagacggaaagctgctgcaagcaatcgatgccaacacgcgccgcatgaaagaaaaccactaccgcacggttggcgagatgatgtaccgtgacccggtgtttgcagagcataaacgcaacaagtcggaaaactatctttctacggtcagacgggatcaaatcgtggaggaagcggtacagctttttgctgcgcagcgccagtatggtgcggcgtgggcttcgcaggaaatggaagcggagtaccttacgattttaacgcgtcagcgttcgtttgatgaaggccccggcggaaacagcccctacggcggcaacatcgttgaaaagatggtgggaacctgcacacttgaaggacaagccgaaccgcgtgcagccaaagcaacttggtcgtttgaatattttacgctgctgcaaaaaatcaatcatatccgcattatagagagcggtgcggcacgtatactgacggcagaagaacggcaagaattactttccgtatgctatcaaacggacaagttggattttgccaggatacgcaaggctcttgccctgtcggaacaggcaagattcaatatggtgcgatatcgggacggacaaacaactgaggattgcgagaaaaaagagaaaattgtatgtctcccctgttaccacaaaatgcgcaaagtgctcaataccttgcggaaagactacatccgcagtgtcagccgcgacaggctggatgcagcggcaacggcgctgacaatgtataaaaatgaagctacgctcagagcaaagctggaagaagcgcagtttgaaccgctggaagttgatgctttgatgacgctgcccagctttagcgggttcgggcatatttctgtcaaagcgtgccgaaaactgatcccctatttggaacaaggactgaactatagcgacgcttgcaaagaagcgggatatgactttcagggaaattaccgtggtgaaaaatcgcagttcctgcctgcgtccacagaggaaatggaggatatcacaagcccggtggtgcggcgtgcggtggcacagactatcaaagttgtcaatgcaatcatccgcgagcagggagaaagcccggtcaatatccacttggagctggcgcgtgagatgagcaaaaacttccagcagcgcaatgaccttgacaaggccatgaaagacaataacgccgagaacgagcgtttgatgaaagacctgcatgaactgttcccagggagaaatatcacaggccaggatcttgtaaaatacaggttgtggaaagaacaggatgggcggtgtgcgtattcgctgcagccgctggaactggaaaagaccattactgtttcaggctatgcggaagttgaccatattgttccgtacagcatcagctttgacgaccgccgtgcgaacaaagtattggtgctggcgtcggaaaaccgccagaaaggcaatcgccttccgctgcaatatctgcaaggaaaacggcgggatgattttattgtctacacaaaagcaagtgtaaaaaattaccgcaagcgtcaaaatttgctaaaggagaagttgagcgaagaagacagcaaaggttttatgcagcgtaatttgcaggacacacagtatattgcaagttttatgctgaactacattcgcagccaccttgcgtttgcagatttccctgcggcaggtaagaagcgtgtggttgctgtaaacggcgcagttacagcgtttttgcgcaaacgctgggggcttggcaaggtgcgtgctgacggcgacctgcaccatgccgtagatgcggcggtcattgcctgcacgacggatggaatgatccaacgggtgtcgcggttctacacgcatatcgaaacctcggacacccggggtgagcgcttcccggagccgtagccgcgattccgggatgagttgatgcagcgtttgtcggcctgcccgcaggaaaatttaatgcagatcaacccggtatattatcaaaatgtggatatagcaagcatccggccggtgtttgtgtcgcgtatgccgcggcataagatgacgggagcggcacataaggagacgataaagggtcgcttggatgatgcgcatacggttcagcgccggtcgattacagatttgaagcttgacaaagagggagaaattgcaggatattttaatccgagcagtgataccctgctgtacaatgctttaaaggaacagctgacagcttttggcggcgatggaaaaaaggcatttgcagaaccgttctttaaaccgcgtgccgatggaacgccgggagcacaggtgcgcaaggttaaagtgtatgataaagccaccagcatggttgcagtccatgaaggaaaaggtgtggccgacaatgatacgatggtacgcattgatgtctattttgtgccgggcgacggctattactgggtgccgatctatgtggcagatacggtgaaaccggaattgcccaataaagccgtagtcgcatacaaaaattacgatgagtggaaggaaatggacgaagaaaactttttgttctcactttgtcagaatgacctgattcgtattgaaagtaagcgcacaatgaaattcaaagtgcaaaacagtgacagtacactggaaaaagaaacacagatgaattgcggcctgacctattttgaaggcggaaatatttcgacgggtgccatcacggtaactacgcatgataacgcgtatattgtaggaagtcttggttttaaaaccctgcaaaaggttcaaaagtatcaggtcgatgtcctcggtaactataccctcgtaaaaaaagaaaagcgtcagaacttccctgcacaacggaggtgacctatgtcctaccgctgcctgatgatcgtgaacccggcgcgtatccgctgcaaaaatgaacagcttttgattgaaaccgaagaagttcattctgtaccaatcgaggatatcagcgccattgtgctggaaagccgtcaaagtacaataacaacggctgcgctggcggcactggcgcaaaacggcgtggtgacgttttggtgcgatgaaacacacttgccgtgtggtatctcgctgccatttgcacagcatagccgccagttgggcgtgctgcgctggcagatggaactgacactgccgacgaaaaagcggatgtggcagcaaatcgtgacggcaaaaatcaaaaaccaggcggaatgcttggccctgtgcggcaaaacacaggaggcggcgttcctgtttggccgtgccaaggcggtgacaagcggcgataaggacaatttggaagccagtgcggcggcctactatttccccgccctttttggggcaggctatacccgccgcaatgaggatacccggaatgcggcgctgaattatgcttatgcaattttgcgcgggtacatggcacgctgtttggcggtatatggatttttgccctgtttagggctgcaccatgacagcgaactgaaccagttcaatctggcagatgacctgatggaaccgttccgcccggtggctgatttgtacgtggccgcaaatgttgccgaggatgcagcaatgacaaccgctttgaaagggcagctggtgaacctgctgaatgcagatgttctttccggtaatcagcaccacagcgttgcttatgcgatggaacgaatggtgcaaagcctgcgggggcaaacattgcagctgccaaaactgctggaatataagcagcacagctatgagtaaatttatgaggatgatcgttttcttcgatttgccggtgcagacaaagacggaacggcggtatgcaacgactttccggaactttttgctgaaagacggctaccatatgctgcaattttctgtgtatgcgcgtgtgtgcaacggcaatgatgcagtcaagaaacacgaaagccgcctgaaggcatctctgccgccaaacggctcaattcgattgcttgttgtgacagaaaagcaataccaatctattcaaatacttttgggaaattatcagccggaagaagcaccctttgtgtgcgaacagctgagttttttctaaaacaaaaagcgcatcggaccgcaatccgatgcgctttttgcatagcctattataccataccaagagctattagggaactatgacaaaattacaaaacagggaataccaaactcaattataccataccaagagctattagggaactatgacatcttttcttccaatattttccgtatgattattataccataccaagagctattagggaactatgacggttattctgtgcgccctttttatatttgcattataccataccaagagctattagggaactatgacggagctgcacaagtaatgacatctactttaattataccataccaagagctattagggaactatgacgtctgtggggcgttcacggcggcgtttggcattataccataccaagagctattagggaactatgactatatccgcagccggcgttatgctgctgtaattataccataccaagagctattagggaactatgacataaaatagatggtttcgcattcttcgccgattataccataccaagagctattagggaactatgacgcgtgatgcagtccgtgccgagctgtacaaattataccataccaagagctattagtaaatcacaacacccccaaataaaatcccgctagccccaaaatttcttccccgcaggccttgaaacggtctgcggggtttgctataatttaaatttgttgagcaacttaggattttaggctccaccgcggcttgctgcggtgcaaaccccgcaagcctggcggtcttgcgcgcggtcaaaatctatccgccggagtattgtatgaatcagaaaaaactgtccgttcacagccttgtgcgctgtgctgtcattgccgcagtgtatgtggtcgtctgcctggtgctggcccctttcagctatggggctatccaggtgcgcgtggccgaggccctgtgcctgctgccggttttcggcgcggagtacatcgtcggcgttacgctgggctgctttttggccaacctgctgggttccaccgtcattgacgtggtgttcggcacgctggctaccctgctggcctgcctgctgacttacaagctgcgtgatatccgcgtaaaagggctggcaattccggcatccctgccgcctgttgtttttaacatgatcattgtgggcgcgttcgagatcaccttcttcttctcggacggcgcacccacggcggccctggcggcgttcaacgccgttacggtgggcatcggagagctgatcagctgcacgattttgggcgtggccctcgtcaagctgattgagagcaacgcggccctgcacaagttctttacagaagaataacgaggtaacttctatgcgcccggaactgattttgtgggattggaacggtaccctgctggatgatgtcgaactctgcgaaaacgcgctcaaccgtcttttgcagcgctacggctacccccagcggtacgaccacgagcagtaccgggcgatttttggcttcccggtcgaggattattacgtccgcgccgggttcgacttcacccgccacagctttgccgagctggcggaaagctacatggaggattacatcccggccagcgccgcctgtccgctgatggcaggggccgttgacgcgctggaagcgttcaaaaatgccgggctgcggcaggtgattctgtcggcaagcccggtcacaacgctgacccgccaggtggaagaacgcggtgtgacgccgtattttgaccgtctgctgggactgggcgatatctatgccaaaagtaaggtggaggtcgggctggcttatttacaagaggaaggcttcgacccggtgaaggccgtgatgataggtgattccgtccatgattttgaggtggcccaggcgctgggtgtgggctgtgtgctgcaatcgagcggccaccagccgcccgagacactgcgccggaccggtgcaccggtggtggcagggctgcgggaagcggcggagttgattttgaaaaagtgagctgtgcggggcgtcaagggcaccgccccctacaaccgtagagaggcattgaaaatgataggcagagaggtacaaaaatgtctgaccgcgtaaaaggcacctgcctgacgatgggcggcgcggcgtgctggggtgtttcgggctgcatggggcagtacctgttcacccgggaagggatggattccacctggctggtgcccatccggctgtttctggcagggctaattttatgtgcgttcttttttgtcaaaaaccgcaaaatgctgtttgacccatggaatttcaagaaaaatccgcgcaacgtcgttgatcttctgatttacggcctggcgggcgtcagctgctgccagttcacctattttctgacgatccagctgtccagcgctggcatggggacaatcttgcaggacctctcccctgtcattattctgctggtggtctgcatccagcaaaggcgcgggccgcgggtgtttgagattttctccatcctgctggcgctggtgggggtgttccttatcacgacccacggcagcttgaccgaccttgccatcagcccggcggcgctggcgtcgggcgttgtcagcgcctgctgcgtcgccatctatacgatgtggcccaagaaattgcaggagcagtaccccaccccgatgctgcagggctgggcgttcttgatgggcggcacgatgttttccctgatcttccgcccctggacgataaattatgtgccgacgccgatgggcgtgttcggtattttcacggtcgtggtgctgggcaatgtgctggcgttcagtctgtacatgtcgggtgtgccgctcatcggcccgcagaagtccagcctgtacagctttgctgagccggtcacggcggctattatcagcaccttggtgttggactcgccgtttacgctgtgggatgccctgggctttggctgcatctttttgatgctggtgctgttgagtctgccggcgaaaacaaaagcgtaatagattcgagaggctgtccgcaatgggcagccttttttgctgccatgtgggggccggacatgtccggccctcaacctgcccgcgaacgaccgtccgcctttatgctgcgggccgggcatgcccggcccctacaacgctataataaaataaacctatcctaactatgaattgacatatccccctccctgggtgtattatagtatcatgtgtaaaactatatagccgcacctctacacgaggcggaaaatacaggggaactgttatgtctttttttgaaaaactgttcggctctttctcggacaaggaacttaagcgcatcaatcccatcaaggacaaagtccttgccttggagccggaaatggctaagctgaccgacgaggaactgcaggccaagaccaccgaattcaaagagcgcctggccaagggcgagacgctggacgatatcctgccggaggcgttcgccgtctgccgtgaggccgactggcgcgtgctgggcatgaagccctatccggtgcagatcatcggcggtattgtgctgcaccgcgcctgcatcgccgagatgcagaccggtgaaggcaagacgctggttgccaccatgcctacctacctgaacgccctgaccggcgaaggcgtccacgttgtcaccgtcaacgattacctggcccgccgcgactctgagtggatgggcaaggtctaccgtttcctgggtctgaccgttggtctggtcgtccacggcgtggagtccatcgaccgcaagaaggcctacgaggccgacgtcacctacggcacgaacaacgagttcggcttcgactacctgcgcgacaacatggtcgtctacaaggcaaacatggtccagcgcggccacgcctttgccatcgtggacgaggtcgactccatcctcatcgacgaggcccgtaccccgctgatcatcagcggcaagggtgaggattccagcgtgatgtacaagcgcgccgacgacttcgccaagacgctgaaaaagagtgtcatcgtcgagctggacgacaaggttgaggctgaggaacaggtcgacggcgattacgttgtggacgaaaagcgcaagaccgcgaccctgaccgagtcgggcgtcaagaaggccgaggcgttcttccacgtggataacctggccgacgccgacaatatgtcgctgcgccattatattgacggtgccatcaaggcccgcggcgttatgcaccgcgacaccgactacatcgtcaaggacggcgaggtcatcatcgttgatgagttcaccggccgtctgatgtacggccgccgcttcaatgatggtctgcaccaggctattgaggccaaagagggcgtcaccgtcgccgccgagagcaagaccctggcgactgttaccttccagaactacttccgtatgtacaaaaagctgtccggcatgaccggtacggcctccaccgaggccgatgagttcagcgagatctacggcctgaacatagtcagcatccccaccaataaaccccgtgcccgtaaggatctgcccgacagtgtctacaagaccgtcaacggcaagtacaacgccgtcattgagcaggtcgccgagtgccacgccaagggccagccggttctggtcggcaccgtcagcgtcgagaagagcgaggctttgtccaagctgctgaaaaagaagggcatcgagcataacgtgctgaacgccaagcagcacgagcgcgaagctgagatcgttgcccaggccggcaagcagggcgctgtgaccatcgccaccaacatggctggccgtggtactgatatcatgctgggcggcaatgtcacctacatggctaaggccgcgctgaagaaggaactgtccaaggaactgaccgccgacctggcccagctgaaggacgagtacgagcacgccaaggcccgcgccaaggccaacggaaccgaactgcccatcccgccggaggctggcattgacgcgaaattggaaatgctgatgaccgagtgtgacggccacgccgaaaccgaggacgccgaaattctccacgcccgcaagcgctttgaggaactgtgcgaggagtttgcccccgaagtcaagcgcgaggccgaagtcgtccgcgaggcgggcggcctgttcatcatcggtaccgagcgccacgagagccgccgtatcgacaaccagctgcgtggccgtgcaggccgtcagggcgaccccggtgcatcccgcttcttcctgagcctggaagatgacctgatgcgtattttcggcggcgagcgcgtgcagaacctgatggactccctgggccttgacgaggatgtccccatcgagaacaagctcatcaccaacacgattgagagtgcccagaaaaagctcgaagcatcgaactttgcaattcgtaaacaggtgctgcagtatgacgacgtcatgaatcagcagcgcgagatcatctacaagcagcgccagatggtgctggacggcgaggatatctccggcaagctgcacgagatgatgcgtcagtccattgacgatgcctgcgcgaactacctgaacggcgagaccgccgacgattgggatttcgcgggcctgcgccgccactttatgaactggctgtgcctgcccaccgacttcaactacaccaccgagcagctcggcgacctgaccaaagatggcatcgccgacgaactgtacaagcgcggcatggatatcctgaccgcgaaggagaagcgctacggtgccaagacgatgcgcgagttggagcgtatctgcctgctgcgcaatgttgactccaagtggatggagcacattgacaacatggaccagctcaagcagggcatgggcctgcgcggctacggccagcatgacccggtggtcgagtaccgcatcgaaggctttgccatgttcgatgagatgatcgcctccatccgcgaggatgccgtgcatatgctgctgacgatcgaaatccgccaacagaacgccgagccgaagcgtgagcagatcgccaagcccaccggcgagggtgccccgaaccaggccggtgccaagggtgccgccccggtgcgcgtgacaaagatcggccgcaatgacccctgcccctgcggcagcggcctgaagtggaagaagtgtacctgcaaagagtaccaccccgacctgtaattcatcatcaaggcgccgcccggaacaaggcggcgcctttttgtagggggcggcgtcctcgacgccccgcagctttcccgcaacgaccgttaatgggggaggccgcgggccgggcatgcccggcccctacaccatttcctgtcggtttcttggggctgattccatatccgcctgcccgttcccgtgaccaccccttccctttcaatgaggtgaatttctatgaaagccagaatcatccgtgaaccccggtgcgccctgctgtggcgcattgatgaaagctaccccaactacgccgccattgagcgcgcggccaagcgatatgaggtgaagctgcgccgtgtggcagatggcgacctcggcggcattgtgggtgacctctgcgcgggtaagcctgccccggtgtttgccccgcttatcgccgtgccggaccgcccggctatcatcatcagcggcctgcgccacgacaatggcgagctgggtgcgttcctcgaccttgtcaaaataggcggtgcatccatcccggtgcgcagcatggtcacgcccaccagcaagcaatggacgctggccaacctgttgcttgaattaaacacggaacacgaaactgtgcagggagacaaggcgtgaagcgctgtcttgccgcgttggcgctggccgtgctgctctgcctgccgctgactgcctgtcaaaaacagcaaaatttgtacagcgcgacctggtttgatctgttcgatacggtcgccatcgtgcaggggtacgccgccggccaggacgagtggaacgctcaggctgccgccgtgcaggaagatttgtcgcgctataacgaactgtttgatatctataaccactacgacgacgttgtgaacctgtacgacgtcaacgccggggccgctgccgcgccagtggctgttgatgacgagctgtacgcattcttgcgctggtgtaaggacaccgtttaccccaccaccgacggcgcgacgaacattgcggcgggcgcggtgctgcggctgtggcatgacgcgcgggaaagcgactcccctgccccgcccgatgcagaggccattgcggcggcgctggatatacaagataaaaaagcaggctacctggaaggctccggctacctggtcagctggtgcgtcgggcatctgggggagctggctc

SEQ ID NO: 4069 - DNA, 13230 bp, synthetic construct
  misc_feature 1..13230: note = Synthetic
  source 1..13230: mol_type = other DNA
tgccatcggcatccagataacggtagatgatctcgtcatccggggccttgtaaatcaggcaaacgctatctaacgtttcatcggtgatgaataagccgggaaatttttccttttcgtctggcaggctttccagccccagcttttctgccagagccatggcttcttgccaatgggtgtcctcaacagggatgttttccagctccacccattcatcatccttgtaattacagctgaaaaggcagccgtcagccgggtcatttgttatactgaacccataggtgtcgtcatagcacataccggaataactgatgctgataccggtcagtgtgccgggcggtgcctttttacagccggacattgtcagaaaagcggctgcggcgcaaagcaccgcagcactttttttgcgcatcactggccaaagggcttaccgcactccgggcagaacttgggcggatgggccgggtcaaccggggtccaaccacactggctgcacttggcgggggccggggcgggcttggggctgccgcagttgcagcagaacttaccggtgttggaggtgccgcagctgcatacccagctggcggctgcgggtgccggggcaggcttggggctgccgcagtttgcgcagaatttgccggtgttgccggtctggccgcagctgcaggtccagcctgcgggggcagaggccggggccggggcgggctgtgcggcggcctgctgctgggcacccatctggtacaggttctgggcgttcataccgcccgccgcaccggccatattcatgcccataaaggccatggcggggcctgcgccctgattaccggccgcggtctgcatggcactggcctgtgcgccgacaagatgcgcagcggcgcgggtcgggtccataaaagctgcgttgcgctgcatttccttgagcatctgctcgtcttcctcgctggccttcacgctggaaacgccgaaggatacgatctcgatgccgcgcagcttgccccacttggcgctcagcacatcgttgagggcctcggcaagctccatcgtgtggccaggcagtgcggaatagcggatgcccatatcgctgatcttggcaaaggcaggctgcagggcggtcatcagctcggatttcagctgcccgtcgatctcatcgcgggtgtagccttcctccacattgccgcagacattggtgtagaacaaaatggggttggtgatgcggtagctgtactcgccgaagcagcggatggcaatgtcgatgtcgatgccggcgcgctgatccaccacgcggaagggcaccgggctgggcgtgccatatttgttgcccaccagctccttggtgttgaagtaatagatgcgctgatccatcggggcctcgccgccgaaggtaaagcgcttgccgatgttctggaacactgcgccgatggactcggacaaatcgccgctgaacagcgtcggcgcgctgccggtatcgtaggtgtactcgcccggctcggcgcacatatccacgaccttgccctgctccacgatcatggcacactggccgtcggcaacggccacgatggagccgttggagataatgttgtcgctgccctttgtgttggcgctgcgtccgctctggcgtttccagccgcgggtagccaacaggtcagccggcatggcttcacaataaaagtattccttccactggtcggccataacgccgccagcagcgcccattgcagctctgataagtcccataatgatcctcctatgtcaggggcgggcaggacccgccccattttgtacagataaatcaggtcgttatttgttggccaaggcggccttgtactcctcatagcggggcggcagctcttcgagctcctcgttccactcggtgccgtccagcctcatgtagaagctgaccgcacaggccgtaccgtcgtcgccctcgtagtcatacatgaacagcgagatattgtcgttatacgggtacaggttgaacttatacgcatcgctctcggttatgttctggtcaagcacccagtcgctgccgtccaggataggctcgatatggtcatcatagacgttgacccacatcgtgataacggggtcgtcgggcatgccgtcacggtaaacctcaaagtagtggctgccgtcggaggtctcaccgatgtagccccagcagtcgtaggtgtcggtgtcgaaatagtcgcggttgggcacgttcttgtagttttccatgcggaaccagccgtaccagttggtgttgcccaaatcgtcgtaggtgttgccgtcgtcgtagctatagggcgggtccggctcattgggaccgtcggtgccgtccgggtcaaggtcatcgccgccgttcagctgggcggggtcgatttcaggcttggtgtcgctgcgcttaaagaccatggtcataccgtcaaactcaatggtcagcaggtcaccctcgcgggtgtaggtcatggccggggtatcggggtcggtcagcgcgtagaagctgccgtccttccattggaaggtgacaaaatcctccatgtaggtttcgccggtgccgtccgcgcgcagctcaatgtagaagtcctccatatcgacgagggcaagctcctccttggagagggtgtactcgctgtcggaggcggattccagcacatagatgcccacatcggtatcgctgcctgcggtggtgccctgggtcatgctgtcaccgtccagaggctgctgcatggtgctgccggacttgacgaagtagatcgtcacgccctgtccctgcacatcgttcagggtcaggatttcgtcttgcagggtgccggtgcagctcaggccgccgcaatccagctggaagaccccgccgttcagcgtccacttgccgtaggacttggtgccgtccaccgttacaacgcacttgcccttatcattcaggtccatcaggaacccgctgccgaaggcatcctcgacctgcgtcacggagccgccgatctcggcgtaggctgcttcccaggtgccctgattcgggtcaccggcgttcggcttgccggtgcggatggagccgctgatcattgttacgatgatcataagcaggaatatcaccgggatggcgatcaggatcatccgcttgggggacattggtgcgcgggggcgcttgggcttgccgccgggggccacattgccgtaagggttgccgcccgtgccgccgggtggcggcggcgtgacaggcggtgcggacgcggacgggggcgttttcccggcgtaaagcggtgcgcctgcgccggtctgcggcggtgtgccgggcgcattgcctgcgtaaggattcgctgcgttcgtccggggctgcggggcggcaggtgcgctgcctgcatagggattgccgccgcttgcctgcggctgcgggggcgtctgtacaggctgtgggggcggcggtgcagcctgggtcggctgaaccgggggcgggggcacagctgcgggctgtgctgcgggctgtgcggcaggctgcggtacggatacttttgcaccgcaattctcgcagaatttagtaccgggctttaactcggcaccacattgcgtacaggttgccatagtgtctgcctcctttacaagataatcgtttcagatttttttattcgtttgtcatttcaaaccaaacggattcgtcctttggcaggttcagcagggattccccgccgatatgccttacgtaaaagccgccgtaatcggtgggcatcatggccacggtttcgcgctgtgcgcgccctagatccatgcggtacagcgaaatgctgcagatccagccgcggtgatccataccaaggtaggtgatgccgctgtcccatgtggcgggctctcggttttcgtttcggtattcgccgatgtagaagttcggctgatcctcgcaaatttcaaaccaggtaccggtgtagtcacttacatacgagccgatcaggctggaaagttccatcgggtcggcattgtgcatggcctcgaccaggttgaatttttcattgttgcgggagacagcgtacaccgttgtatactcggcctcgaaatccgcatcgtaagcggtgccgatctcaaacttgacgatctcgttgacgccgtacagcgggccgccgttggccatggtgccgcactgtgcgccgctgatgacgtcgatgtactcgacattgccgtcctcggtcagcaggaacacatagggggcataatcctggccgacactggtcatgagcatctttacatagttgccgtagcagccgtttaccgtaaactcggtttggtcgcccagctcgtaccattccttcatgtcttggtaggtaactgcgccgtcggagcttacatagtcggtcagggcgcgcaccgttaccttgccggtggcggtcacatcgcaggtaaaccattcgtcctggccgtgcagcacctggccgctggcctgccgcttgttggggtcaacctgaacatctgtccagtacattcccgacccggcgggggtgtacatcggtacggtcacgacaaaaccgtttgaaaaatggggaaatatggagtagtaggtaaatacactgtcaagctcgctcaggctttgcgcgcgcatcttgtacagcatggcggtatattcggggtcatagccgccgaaatggacatcgaaatgctgtgctgtggcgcgctgcagcgcgttcagggtctttgcgctgtcggtgtagcccatgtattcgagcaaatccagattggtaagctcctgccctgtggcaaagttgtaatggtagctgcccacatcgtggttgaacaacgtgtcggaactggtcacctgcaggctcagcacggggccgttccagttgctgacccagatgatgaagccggtgtcgatgaaatcattgcgggaacgggcatcctgggcacgctctaccagatagccgtatcggtagtcgatcatctcgttgatatgctgtgcgtcctcggtgtcatcgtcaatctgcggtacctcataaaaataggtgtcctcgatgccgtaggggttggtgtaggtaaagcgctcgttgtacagcgggacaatgcgggaatcgtccagcctgcggttgttttgcggcttggcggtgtcctcgtcggtctgaacggtcggggccgtatcgtcgggcggctcgactgtcggttccgttatcggggcggaaaccgacggggtgccggaagatgccgaggcaggcggggcattgctgcgcccgcagcccgttgtgatcagcagcagggccgccgccgtcagggatagcagttttttcatggtcggttcacctgccttttcgttgcgggtagtgtgtgtcagcgattgccttagccaaaggtaacgctgttcagaatggtgtcgccctcggtgccggggtcaatgtctacgccggagatcttgatggccagccaaccgccggtgggcatctcgccgtagtattccgtccacaacatacctacgtttttgtaggtgcgtccggccatctccacgccgccgatggtgcgcggggcaagctcctccacgttttcaaagtcgtcgtaataatagttgatcttgtccagcccgcttttcagttcaaaggttatgcgcgggtctccggagaagatatggctggggtcatcggtcgggaacagcttgatatccgcgaaacggggcgaaacggacttgtaccagccctggtcggggcaggtcacgttgagcaccagcgtatagtccgaaccgaatgcctccagggtctgggtgttcaggccagcggccgatggataatcgggattgtccgcaggagcggaagctggggctggttcggcggtgacttccggctccggctctgcagcaggctccgatgcaggttcggatgcaggctcggatgccgcgtcggtcttgggctctgccggggtctccgtctggggttcaacagccggttcggcggcctgcgctttcaggtcggataaaccggaattgacctctttggtcacatcccccttggagcaaccggccaaagccataagcatcatggctgccaatacggcagcgagcgttcgttgtacttttttcatagctgtcctccttttggtcataaagtgtccatcatagcgctcagataggcaggcgagacggaagcgtagacgaaatcatcgacaatatggtccttttttgccaggcacacggcggtggccagctcgggatattcggcctcatccacaagcagtaccgttttgcagtgcgggcagacatcccgcaggtcgtttgccagcagcagtctgtcctgcagggtgcgcggcggatgtgggcagacctccagcagcaggacatccgccctgcaggaacggcatagctttacaatatcctttgtcttaggaccagcgttttgcacctggaagtccggcccgccctgtttcagtgccattgtcaatgcgctcgtcatcacagagtattgcgcgtccaaaacgatcctccgcacggctcagccctccttccctgcaaggaatacgatttgtcaatttcatcatacaggaatcggacgatttctgcccccgccatttggatagttttttggacttttttctgcttttttcagcactattgcaaaaaagtgcagattacgtcataatgatactggaaagaaacagacggatgatctcccctttggaaaggacaggcactatgacaaaggtacggcttggcaacctgtgtttagccgctgcggttgcaggggtgattctctgcgctgtcctgatgcgggcgttttatatgccgtattccggcttttggcgcacggtgctgtataatattctgatcttttcctgggcggtatcggtctggtggcgtatcctgcacgcacagacccgccgctgcctgctgggtgctgccgccctgatgctgttctggctggatatccgcctgatccgctatgactttgcccagacgccggagatgctgcggcgattgtggtatgcgtactatatcccgatgctgctgatcccgacccttgcactttatacgcttttctttttggatcgggggcagtccgccccgctgtacaagtaccggtacgtgatttttgtattccctgtggtactgttcagcctggtgctgacaaacgactgtcatcagcttgtgtttgcgttcccacccgggcaggaggtactgggcagccccgattacacctatcggttcgtatattacctctgtctgctgtggatattttcctgtgccgtgttcacggtggtgtaccttgtacggcgctgccgtattccgcatacaaagcgcatcctctggctgccgcttgtgccgattttttttgccaccctctatgctttactgtacaagcatattttaaatgtgccgtggatgcatgcgatcgccggtgatatgaccgtggtgcaatgcctgacctttacagcgtcctttgaggcgtgcatccggtgcgggcttatccaatccaatatggggtatgccacgctgtttgaggtatctatggccaagggtatgatcacggaccgggcgtttgtgcctgtgcaatgctccatgcaggcagcgccgctccatgaggagcagctgcgtcaggcgctcaccggcagtgtccagttggatgcaacgacccagcttcacggccacccgatccggaaagggtatattttctggcaggaggacatcaccgaactggtggctctgcttgaggagttacgtctcacgcaggaggaattgcatgacatcggggacgtcatacaggcggaaacagcccaaaaggcacaatggctgaagctgagcgagcagaaccggctatatgacaagatcgagaccgtcacagcccgccagctggcacggatacaggaatatctgatcgcgctcaaggccacggacgatgtcgataccgcccggcggctgctgaagcacatcgtcattttgggaacctatatcaagcggcgcagcaaccttgtttttgtctgcgacaaggcggaggacatcgacaccacggagctgcggctgagcctgtttgaatcggccgagagcctgcgcctgagtgatatacgctgcgccgtacagattgccgacacagcaaagatttcccctgcatctgccgtggcaatctatgacgcctttgaagccatcatagaagcgaccctgccgggattgcaggagatccttttctgcgccgagcatacggcgcagggctgggggctgcgctgcagcgttcaatgcaccgacgcgcccgctgcgctgcccggcctgccgcagatgcagcttgaacgggatgatgacgggcttttgtatttcacgatgtttccggcagaaggaggcggcctatgattccccgaatctcccgcaacgccgtcaaggaaggctttgacacgctgccggcggccatctgctactttgaccgcaatggtctgctgcgtctgatcaatcacaggatgcaggaaatcgccgcagtcctctgtggccgggatctgcagacccttacggatctggagcaggcgctgcgcagtcccggcggcggtgtgcggctacgcgatgaggccgcccgcatctacgaattcccggacggaacggtatatcatttcacggtgcgccctgttcaggacaaatacggtataccgtacaccgaggtgatggccaccgatgtcacccagctggctacattgcatgctgcactgcagcaggaaaacgagcgccttgccgatgcgaaccgccgcgcaaagcgcttatatgacaatatgcccgacattgtgcgggaggaagaaatcctgaaaatgaagatgcgggtgcatgacgacatcggccataccctgcttgccgcacggcgcgcactgcggcatgagcataacctcgcccggctcaggagcgaagctgcgaagtgggaaagctccatctccctgctatgccgcgcccggcaggagaatgctgcagaggacccgctgagctatatgcaaaggcgggcggctgttctgggtgcagccgtacagctgcgcggtgcgtaccctgcggcacgcgccacccgcgagctctacgcactgatcctgcgggagtgtacctccaacggtgtgcggcatgcgggcgccacggaattgtacgccgattccgagcatcggccacaggcatggcacctttgcatcacgaacaacggcgcaccgcccagggcggagataaaggaaggcggcgggctttcctcgctccgccgccgtattgaaaaagcagggggtacagtaaccgtacattccctgcctgtatttgttctggaagtcaccctgcccgataaggagagcactaatgatacgcgttatgatcgttgaggaccaaaagctggtacggagcctgcttgaaagctatattcagaacgaggacgggtatcagcttgctgtgtctatccccggcgctgcagaggctcccatcctgtgcgataccgaggacatcgaccttgtgctgatggatgtgcagacagaacaccgcgaaaacggcctggccgccgccaaaaagatacgagaagcgcacccggaaatcaagatcgtggtggcgacctcgcttattgacacacaggtcttggcacgcgcaaaagccgtgggcgcggacagcctgtggtataaggacggcgatgaagggaccctgatgcaggtcgtgcgccgcacgatggcgggggagcatatcttccccgatgcaccgcccagcgtggagatcggcactgccatgagcgccgagttcaccaacgctgtcttgtgcgcgggctgtcctataacgagattgcaaaagaactcggcatcgagccatccaccgtgaagtaccacgtcatcaatatgctgcaaaagacgaacctggagaataaacttcagcttgccatcgccgccaccgaagccaaattggtggtggagttggcggaggagtaatttgtagtatataaggcaataccgcacaattcccgcctacttttcgctgctgcaaaagctcaaccacatccgccttgcggaaaacggcgaaacgcgcccactgacgcagccgcagcggcaacagcttctctcgctggcgcacaaaaccccggacatgagccttgcccgcattcgcaaggagctggcgctcccggaaacggtgcaattcaacggcgtgcgctgccgggcaaacgaaacgcttgaagagagcgaaaaaaaggaaaagttcgcctgcctgcccgcataccacaaaatgcgcaaggcgctggacggcgttgtaaagggccgtatttcctccctgagcatttcccaacgcgacgcggccgccaccgcgctttccctttacaaaaacgaggacacgctgcgtgcaaagctgacggaggccggtttccaagcacccgagatcgacgcgctggcgggccttacgggcttttcaaaattcggccacctttcactgaaggcctgcagaaaattgatcccgcatctggagcaggggctgacctacgaccaggcctgcagtgccgccgggtacgatttcaagggccacggcgcaggtgagcgggcctttacattgcctgccgccgccccggaaatggagcagatcacaagccctgtggtacgccgcgccgttgcgcagacgatcaaagtggtgaacggcatcatccgcgagatggacgcaagccccgcatgggtgcgcattgagcttgcgcgcgagctgagcaaaactttcggcgaacgacaggagatggaccgctccatgcgcgaaaacgccgcgcagaacgaacgcctgatgcaggagctgcgcgatacgttccatctcctctcccccaccgggcaggaccttgtgaaataccgcctctggaaagagcaggacggcgtgtgcgcctattcgctccggcggctggacgtggaacggctgtttgagccgggctatgtggacgtagaccacattgtaccgtacagcctcagctttgacgaccggcgcagcaacaaggtgctggtgctttcctccgaaaaccggcaaaagggcaaccgcctgccgctgcaatacctgcagggcaaacggcgcgaagactttatcgtctggacaaacagcagcgtgcgcgactaccgcaagcgccagaaccttttgcgcgaaaagctctccggggacgaagccgagggcttccggcagcgcaatctgcaggacacgcagcacatggcgcgctttttgtacaactacatttccgaccatcttgcatttgcgcagtccgaagcgcttggcaaaaagcgcgttttcgccgtcagcggtgcggtaacgtcgcatctgcgcaagcgctgggggctttcaaaggtgcgcgcggacggcgatttgcaccacgcgctggatgccgccgtcatcgcctgcacaacagacggcatgatccgccggatctccggctattacgggcacattgagggcgaatatcttcaggacgccgacggcgccggttcgcagcacgcccgcaccaaagagcacttccccgcgccctggccgcgcttccgcgacgagctgatcgtacggctctccgagcagcccgccgaaccgcttctggacatcaacccgggattttactgcgaatatggcacagagcatatccgcccggtgtttgtttcccgcatgccgcgccgcaaggtgaccggcccgggccacaaggaaaccatcaagggcgccgccgcggcagacgaaggcctcttgacggtgcgcaaggccctgacagagctgaaactggacaaagacggagaaatcaaagactactatatgccctccagcgatacgctgctgtacgaagcgctcaaggcgcagctgcgccgctttggcggcgacggcaaaaaggcctttgcggaaccgttttacaagccgaaagcggacggcacgcccggcccgctggtgcgcaaggtgaagacaaccgaaaaagccacgctcaccgtccccgtgcacggcggcgcggccagcaacgacacgatggtgcgcgtcgatgtgttccttgtacccggggacgggtattactgggtgccggtgtatgtagcggacacgttaaagccggagctgcccaatcgggcggtagtgcaaggcaagccgtacagcgagtggaaagaaatgcgcgaggaggattttattttttcgctgtatccaaatgaccttgtgtatgtggagcataaaagcgggctgaagtttacggtgcagaacgcggacagcacgctggagaaaacgcggacgcaaacgagcgcatttgtatattttgtgggcggaagcatttctacagcttctatcaccatccgcacgcacgacaatgcctatggcatcccaagccttggcgtcaaaacactgaaaactttccacaaataccaggtagatgttctgggcaacgtcttccccgttcacaaggaaacgcggcagaaattccgctgattcatcaaaaaaggaggcggttatgtcctaccgatgtgtgatcgtcagcaatccagcgcacatcagcacgcgcagcgaacagcttgttgtggaaacggacgagcgccacaccgtgcccatcgaggacatcagcgcgctgatgctggaaagccgccgcgccacgctttcggctgccgcgctctccgctttggcgcaaaacggaacggcggtgttcgtgtgcgacgaaaagcatttaccctgcggcgtgctgctgccatacgcgcagcacagccgccagcttgccgcggcacgcgcgcagctttcgctgacgctgcccgccaaaaaacgcttctggcagcagctcgtcaccgccaaaatcggcaaccaggcggaatgtctggcgctgtgcggcaaaacacaagaagcggcctttctgcattcccgcgcacgcgccgtgacaagcggcgataaggacaatctggaggcagccgccgccgcatattacttccccgccctgttcggcacaggctttacccgcagcgccgacgatggccgcaacgccgcgctcaattacggctatgccattctgcgcggctatgccgcccgctgcgccgcagtttacgggcttttgccgtgggaggggctgcaccattgcagccagctgaaccaatacaatctggcggacgaccttatggaaccgttccgcccggttgtggatttgtatgtagccgccaatgtggacgaggcaagaacgctcgcccccgcgctcaagcacgcgctgttcgggctgatgaacgctgacattctttccggcggacagcaccacagcgtggcttacgccatggaacggctggtgcaaagcctgcgcaccagcatggaaaaccagcgtgatctcccagtccatgtcgatgccgtcgtaaccgttcttttcgacc

SEQ ID NO: 4070 - DNA, 12609 bp, synthetic construct
  source 1..12609: mol_type = other DNA
  misc_feature 1..12609: note = Synthetic
cgagtcggcgagtgacactcgccgactcgtttttttttgtacgccgggaaacagctctcggcttcgagagaatgcgccgccgtcgacatgtgccgccttcgacgcatcacaaataccgattaacatcctccgtagtaatccccgggtgcagcgcgatatttaacgtattcgccaaaatattcgccaggcgcacaatcaccgcatcgacgtctttcggcgtaacaaacatgttttcgtccgtgagaagttccgcaattagtccgtaacgctcgtcctcttgaagggaattaagcatctcgtaaaaatttttttcctccgcctcggcggcctcggccattgcgacaagcattttgtccatcacgtcgtttgccaaagtcgccgcgtcaacaacagtcggaacgcctacggcaataaccggcacgcccatggtttcgcggtttatagacatgcggcggttgcccagacctgcaccggggtttacgccggcgtcggacatttgaattgttgcgttaatgcgagacgttttgcgggcggcgagggcgtctattgcgataattaaatcgggcgacgttttgtctgccacgcctttcacaatttccgccgtttcgatgccggtaattcccattacgccgggcgataacgcgcttacgccgcgcagttttccgcgcaaatcctccggcacatcgtcgccgaggtgccgcgttacaagcaacttttcgcaaactttcggccccagcgcgtcgggcgtgacaaaacgattgccaagccccacaacaagaacgctggcatctgcgctaagctcgtgcaatcgcccgagctttcgcgccaaaatttttgcgatttcctcgtgggtttcggggtcgttaattttcatcgcgcccgcctcgagcgttacatagttcccgacgggcttgcccattcgcgacgcgccgtcctcgttttgaatctcgacccacgttacgcgaacgccgagttcttcgtcttcttccgtagaaatttcaacgccggaaaactcctccgacgaatcctcgcacacttcaagcgcgaggtctgtgcggaatttcatagccatattttttgccactcgcagaacacgcaaactcctgatgaaattcgccgccgcgtccctctctctgatttttcacatccggtcaccacgaatagtatgcacacttttctcatatttattttaaagccacacaagaaacctcttctgaaaaaaaatccccccctcaaaaaaaaccgacatttacccaaattccaaatatcaaagttttgatgaaactttttcaaaagtttccggggtttggggcagagccccaaggtcttaaaaaggagatgcacaatgaaaacctctttaacaattcgcaaaaaagcgttctacgtaatgttgctgatgcaagtgatgtttgtggtgtacatggggcgaatagtgtacatacaaaccgtgcatggcgaggaattacgcgcgatggcgtttgaacagcaaacccgcgaccgcttgattcgtccgaatcgcggcacgatttatgacagaaacatggtcggactggcggtaacggaaacgacggcaagcgtaagcgtaatatatgtacaaatgcgcgaccgcgaaatgacggcacagattcttgcgcgcgagctggagcttgacgaaaccgaggtgtttgaaaaaatttcacaacgagtcgcactcgttcgcgtggcgcaacaagttgacaaagaaatcgcggacagaattcgcgcgcataatttgcccggcgttgccgttgacgaggacattcggcgggtctatcccttcggctcgcttgcgtcgcatatgattggatttgtcgggcgcgacaatcaaggaattatcgggcttgaggcgcgatatgactcatatctggcgggctcgcccggccgcatcttatcggaaacagatgtagcgggacggcactacgaaggcgcgcgcgcctatcgcattccccccaccgaaggacacgatttggtgcttacaattgacgctgttttgcaaagttacgcagaacaagccatcgaaatgcttgttgaacaaaaagatgcccttcgcggcgttgtaattctaatgaacccacaaaacgggcaaatctacgccttggcgaacaagcccgatttcgatttaaacgaccccttcacaatccaagaccccgaactggccgcactttggcacacgttcacgcaggaacagcaaatgaacgaactgaatcgcatgtggcgaaactttgcgattaatgacacatatgaaccgggttcgacatttaaaattgtaacgagcgcggcggggcttgcggagggcgttgtgacgcttgattcgccgttttcctgctcgggatgcctgaccgtcggcggtcggcaaatcaaatgctggcggtcgccgcgctcgcatggcgcgcaaacttttgtgcagggcgtacaaaattcatgcaaccccgtgtttatgataatcggcgagcaactcggcgcggagctttttcacgattacttgatgcggtttgggtttcacgaaaaaacgggcattgatttgccgggcgaggctgtcggcattatgtattcggcggataaaatcgggccggttgagcttgcgacgatggcgtttgggcagagcttgactattacgccgatgcaattagttgcggcggcggcgaccgttgtgaatggcgggtatcgcgttacgccgcatgtcgggatgcgccttattgacgcggacggcaatattgtggaggaattcgcgcccgaacgcggcgcgcaaattattccgaccgaggtttcagattcgatgcggttcgtgcttgaatccgtcgttagtgagggaacggggcggcgcacatttatcccgggctatcgcgtcggcgcgaagaccgccacgagccagaaactcccgcgcggaagcgggcgatatatctcgtcgattatggcattcgcacctgcggattcgcctgcggttgtcgcgcttgtgcttgttgatgaaccaaagggcgcgtattacggcgggcaggttacggggccggttatgcaggcacttttggaaaatgtgttgccgtatttgggcgttgaggcaatttatgtaagtgaggaggagcttgatgtcgcgccggttattatgccaaacgtgcgcgggcttgaaaaaaatgaagccctgcgtgtgcttaaagacgcagggcttgggtacgatttgattggtgagggtggagatattttggagcaattccccattccgggcgaaattgttaatcgcggtgaacgggtattgcttcgcgttatttagcagccggattattccactctcgcataaacaaacgttccgagttcgccaaccattgttaaaatgtcgcccaccacggtgtattcggaagaaaagctgtcgccgcccggcatgtgatacgtaatgactccgtccacggcggtccatgtgaattcaaccgacaagtaaacttgaccgtcttcaacccaaacatattcttcgaagcctgtgccgtccgcatacagggacgttactacgtgatattcaaacactccgtatccgatgtcggtgttcatcgttgttgcccatacgcctaccgcgtcggaaaatgccgtgccgaaagcctcgatgaggtcttgcgggtctacccgttcgtaaatgaatgtgccggcttcgcccaccattgttaaaagattgccggttacgctatattcgctggatacatcgccaacgcccggaatatgataggtaataactccgtcggcggcactccatgtaaacgccattgtcaagtaaatttcgccgtcttcaatccaaacgtattcttcgaatcctgagccgtcttcgtttaacgttgtgaaaacatgatacactgcgtggccataaccgatgtcagtttccattgttgtcatccaaatgcctgcggcttgagaaacagcggcgggttgcgcgggtgcggggtcttgaacgggcggtgcggggtcttgcgcgggtgtttccacgttttctgcgggtggagcgggggttgcgggtgcgggcggttcgttgcccccgttacatgctgtcagaagcaaggttgcggcggcaaacattagtaccgccgctaaagtgacgaatttgtttttcattttgaaaaacctccttaaaaaaatttgtcggttcacaatcggttcacacatgtaaccttgtggccgacgaaaacattaccatagtaccatgattttgtaaatctttatgaaaacaaggtgggtttggttgacacgggcggttgacaattttataatagggatacaataagaaacggcttccgttgagagcggaatcgtttcgcacaacctaatgtttatcagttggttgaaccgtccctaccgtcagtcggggcggttctttcttttaagcgggaaattacgtgtttcgcaagtgatttaatgtgaacggagagtacaatgtcaaaatacatagagaaaatcagcccgcgaaaggtttttgcaaaattgagtcggcgagtgtcactcgccgactcgattttacttttctgcttgcttctcgttttcactgcctgcggacgcggcgaaatcggcggtccgctaccgattttgtacttcgacgaagcccgcggtttttcgtggtactacgtcccggacttgccttctgcaccgggaaatattcgcgtggtaatcgggactacgaattttaccgggcttgtacacgaaagcgtggaaatttcaagcgacagcatgttttttgtacaaagcggaaatgatacttttagatttgagccgggggagatttttcacggggcagaaatcgaaggagagcgagttgttatttcggcgggcgatgccgacggaagattggaaatccgttcaatagcccgtaatcatcccaacggagcggctccaagctatcgcggcacactcgaggtatcacaggtggacggcgggttcattattgtgaacgagcttccgattgagcactacttgtacgcagttgtgcccagtgaaatgccgtcgtcattcggcgttgaggcgtcgaaagtgcaggccgtaacggcgcgaagttttgcactgcaccagatgcggcaaagcgcgtttcgcgcatacggggcgcacgtggacgactccgtaatcagccaggtctacaacaatttgcccgaaaatgagatttcaattgaggcagtgcgggccacgcgaaaccgcgttttgacccacaacggcgagataattttggcaaattatttttcaacaagcggcggaacaaccgcgaatttcggcgaggtctgggcggttggcgcggaatttccgtcggcaacccccgaatttttgcgcgcgcgagggcaggttttcgcgccgattgcgggcgatttgcgcacggaagccgccgcatcggcgtttttccgcaacacggaaatcgccggggtcgacgaaaatttcccgtggttccgctggcaagtcacaatgacaacggaggagatttccgagcgaatcaacgcaaatctcgccgcgcgacaagccgcaaaccccgcattaatccacgtaatcgacgcgaacaataaccccaccgacgcccgcgccgtatcaatcggcacactgacgcacctccaagtcacgcgccgcggccaaggcggcaacataatggagatgcatttttacggcaccgagtccgacgttcgcgtacaaaccgaattcaatattcgcgcgcttttaaaccccggcacaatccccgtaacccgccgagacggcacaaccacgcaaaactcaacccttctccccagcgcgtttttcaccatggaactctacagcgaaaaatccccgcttttagccgtaaccttctacggcggcggaaacggccacggcgtaggcatgagccaaaacggcgtccgcgcgcttcttgacatgggcttaaattacgcacaaatcttgtaccactactaccccggcacggaaattttgtatattccgggcgggttgtggtaatatgtaacaaagacgcctcgagcgagaacccctgcgagagcgggaagtcgtcagttcctgtttccgaacagattaaggaggattcaaaatgttcatgatgttcgacccgctatttatagcacttgtcctgcccgcgctggcgttcacgctaatcgcgcaattcatggtaaagggccgcttcaacaagtattcaaaagtccgcacgcaaaacggcataaccggtgcgcaagccgccgagcaaatcttgcgcgaggcgggcataaccgacgtacgaatcgagcaaacccacgggcatttgtccgaccattttgacccgcgcggaaacgtgattcgcctgtcggaaagcgtgtacggcgcggcgactgtggcggcagtgggcgtagccgcgcatgaggcgggacacgccgtacaatatgcacggggatatttcccgatgaaagtacgtgccgcgattatccccgtaacgaatttcggctcgcgcgccgcgatgccgctgatttttatcggcatactcctcggcgcggcgtcggaggcgacggggccgaacgtcggcatgatgctgcttaacgccggaatacttttattttccacggttgttgtgttccagcttgtcacgcttcccgtggaatttaacgcatcgcgtcgcgcgcttgtcgcgattaacaacaattcgatgctaaccccgcaggaacgagtcggctcgcgaaaagtcctgaccgccgccgcactgacatatgtagccgcgcttgcgttatcgattgcgcaacttctgcgctttctcgcaatggcgcgacgcagatagcatccggcttccgaaaaggggcacaagggaacgcgcgtcgcaaccaacacgcgtccccggtacccaccgcgcgcgtggcgcgctatctgaaattcatccagcctaattctgcggcaatgtagaacaatccgaaaaaaataataattgtcacaattgcaagcatgattttgccgaattttatttggcggcgtttgcgttcagcgttggctttttcacgcttgaccgcatctgccgcttttttgtgttcacccaaatcgaagttatcttcatcgaaacgcatgtttactgtcggttttatcatttttcacacccctccttaatataacgctaaaccaccttcgcgtgcaacgctgtcggcgcagaaactgaaacagaagcctaaactgccttcgcgtgcgaagcgtggcgcgcgtagtctatctttataagtatattgtaacctgtgtcggtttgttgcacgtcgaaatgcgtatccagtcccgaacggcgcacaatttcaaggttgtcgcgaattgtgttcgtcaaaatacggatgtcccgtatgtacgccttgaagggaatgggttttttagttttacgaactgttacggctttttcaacgagttcctccgttttgctgacattcaaattttcctgacggatggtcgcaattgcggcgagttggtcggcctcgctttcaagccgcaaaagcgcgcgcgcgtgtcgttcggtcaaaccgtcccgtataataagacgacgaaccgtatgcggcagacgcaaaaggcgcagtttgtttgcaatcgtggactgattcttgccgacgcgccttgccaaagcctcctgcgtaaaggcgtaatcgcccaaaagattcgcaaagccctcggcctcctcgaagaaatgcaaatcgcgccgctgcaaattttcaatcatagccagaaccgcgctgtccaagtcgctcgtctcaaccaaaattgccgggattgtttccatacccgcaatccgactcgcgcgaagccgccgttcccccgcaatcaattcgtacgacgcgccgttaataatccgcacactaatcggctgcaaaactccatacgcccgaatcgactcggcaagctcgtccagcgcggtttgttcaaaaattcgacgcggctggtacggattcggattaacgtcctcaagcggcaaatgcaatatttcgttcatttctgtcactccttttttggaattttttggcatgataccatgcgaaaaactgcggataatgaatttacgaaattttgggaatcttttacatgcgacagaatgctttaatttttcgcgttaattttttagcttattttgtgcataaaaaaattttcctgccatcacacgtcgcgaagcgcaggaaaatgacggaaaatttttcgtaaattttcttagaataacttcacacaaccgcttgacaacgaaatttcgttcgcatatactgagctcaagtttcgaggcgacaccttctaacgccgtctttggcaagcgtccctatatgacaaacggtagccccgtccctgcgtaataaacgcctctgcaaaacaatgctcgaaacgagcgtgtaaaaaaacgtctgcaagacgagtttgggttgattaaccctacgggacaggatattgttaaattaaaactgtatgaagaacagcgaggcgagtgtccgtattccgtatcgacaatggatatcacgcgcctttttgagtacggctatgctgaaattgaccatatcgttccgcgcagtatttcgcataacgatacgtatgcaaacaaggttcttgcaaaggcaacatatcagcagaaaaaaggcaactgtttgccgcttgaatttttgcagggcaaggagcgcgataattttattgtttgggtaaacaattcaaatttacgccgagagaagaaaaatcgcctgcttaaagaaaaaattactgatgaggagcgaggcgaatttaaagaccgcgcacttaatgacacgcgaacaatgtcacgttttttgttgaactatttaaacgatttcctcctgttctctccgtttttgaccggacggaagcgtcatgtgacggcggtgaacggcgggacaacggcaacacttcgtaaacgttggggtctgacaaaaatccgcgaggatggcgatttgcatcatgccgtggatgcggcagttattgcttgcaccacgcaaaaaatgataaatgacttatcgcgacattacgaccataacgaaacgagatttttaaatgcaagacgcgacccgcgcggcgaaaaggaagagcgtttcccgcagccctacccgttttttcgagaggaacttatggcgcgaatcgctccgacaaaaacacagcttgacattgcgattgcgcagcttagtctcttgccgtatacgcaaggcgaaatcgcaaacttgcaacccatttttgtttcccgtatgccgcgaagaaaagttggtggcgcggcacacaaggagacaatcaagggcataaccgaaagtggcgagcaggtgaaaaaggtttcgcttgtgtcgctgaaattggataaagacggcgaaatagcaggatattatcgaccggaggatgacgtacttctttatgacgcgttgcgtgagcagcttatcaagcatggcggtaaaggcgaaaaagccttcatcgaagatttttacaagcccaaaaaagacggcacgcccgggccacttgttaaatccgtaaaaattacggaaaagagtacgctcaatgttttgcttcgcgacccgaaaggatgcgtaaaagcaagtgccgaccacgacagcatggtacgggttgatgtttttcacgttgcaggcgacggtttttatcttgtgccgatttatgtagcggatactattaagccggaactgccgaatagggcgattgttgcaaataaaccttatgagcagtggaaagaaatggacaacgaagattttattttttcactttacccgaatgatttggtttttgtgaaacaaaaaaagccaatatcatttaacaaaacacataaagagagtagcctccccgaaacggaattatatgaggatgcttttgtgtattacaaagggacggacatagctgtcggaagtatatcgctgataaaccacgataacagctactccaaacgccttggcgtaaaaaccttgctcgcacttgaaaaataccaagtagatgtacttggcaactattccaaagtttcgcgcgaaactcggcagtctttttcgaggtgactttatggcatatcgacatgtaatcgttgaaagcgaagcaaaactttcgctaaaaaataatcagctttgcgtaaacacgtttcacggcgacgggacagtcccgatagaggacgtctcaacccttttgatagaaaatcgtcggagcgtgataagcgcggcggcacttgccgctcttgcaagaagcggttcggcggtttttatctgtgatgaattccatatgccatgcgccgttcttacgccgttttcgcaacactcgcgccaacttgaaattacaaaaaagcaactcgcgctttctgtccccgtaaaaaaacagctatggaagcaaatggttgttgcaaaaatttcgaatcaggcaaaatgtctttcgctttgccctcatgcagagagcgcgaacgaagtcacggaaaagttgaaaagcatttcaaaacaagtgcgctccggtgacgaaggaaattccgaaggacatgccgccgcaatctatttttccgcgctgtttggcagcaaattttcgcgaagcgacgaacttgacccgcgaaacgcgtggctgaattacggttatgcgattttgcgcgggtgtatcgcgcgttcactctgcgtgtacggtttttttcctgcgtttggaatttggcatcattcggcactgaaccaatttaaccttgccgacgattttatcgagccgttccgtcccgttgttgacctgtttacggcacaattttcgccgcaagaattatcgccacaaaataaacgacaacttacaaacttattaaattacgacgttcgcatttcaaaaaatatgtacgcgctttcatacgctgtcgagcgagcggttcagagtttttccgcagtatgcacgggcaaacggaaggatttgctgctccccgaaatcgtgccgcttaaacagcattcgtatgagtaaatttatgagaattttgatttttttcgacttgcccgttaaaacaaaggtcgagcgcaaagttgccacaaactttcgcaagtttttgctaaaagacggctatcacatgctacaattttcgatttacgcaagaacatgcaacggcaccgacgccgtagagaagcataaaaagcgcatatacgacgccgttcccgacaatggttcggtacgaatgctcgtcataaccgaaaagcaatatacaacatcggtttggacattggtattgcgtcggtaggttttgcggaatggctgtcttgggctacccgctctcggcttgagcctttcaaagatttcgcaaagatggtgaagcggcactatgcaggcataatccgttatttcacctctcgccttacctccggcaaaatggagggcattaacagtcgcattcaagaagtgaagcgcagaggcagaggtttccgcaatatctacaacttcatcactatgatttatctcgaaacagcagggcttgatttatctgctacccacttgaagtagcgaagagccaatttttcttttcagactaaacgccacacctcgcgccactgttgcacttactttgggaatttacgtaacgtataaagacagtgggggcagttaagaattttcttagctgctcccgttttgtgctataattgctaaacacgacaacagagagggtgttcactctgacagactatgaaaaaacattggaaatgtgggagtcttacgatataaaaaccgtagcggatttggatttacggctaaacagcttccgagtccagttcgcttataacagtgcaaaaatcgaaaacccggaggtaacatacaacgctacgagagaggtttttgaggacaagtcagtaaaaacattcaagggcagcccggaaacattgacggaaataagcaaccaacgaaaatgctatgcgtttctgctcccaaaaatcatgagcaaagaaccgatgacgttggatttaatcaaggaagcccatgaaatcaccactatgggaacatacgatgaccgccgcttttttgagcttggggaacgcccgggtgagtttaagaaaagtgactttgtggtcgggcgtaacgatgttggctcactgcccgaagaggttgaagctgatttaaccgaactgcttgatgaaattgctgatgtcaaaaatttatccgagccgaaaaaagttatgaaagcggcaacgtattttcatctgcgttttgaaacaatccatccctttgcagatggaaatggtcgggtcgggcgcaccatgatgaactattttttgatggtacacaatcatccgccgctaattgtctacgatgacgacagggaagaatactacaaggcattggaacacttcgataaaggcgaagatattgaaccgttgtttgatttcttcacgcaacaattgaacaaaacatgggcgaaagccttggagcggcataataaaaggaatagccgttagtacggcatcgcaataaaacacaactaaacgggaatggtttgcttcgattggagcagtccattcccgtttttaattgatttttcgatatcggcatgatggaggtggattatgacaaaaatgcaagcgaaaaccgttgaaaaaatgtaaccgtcaaactgccgcccgtattgattgcgcgaaaagcgaaaaattttagccggcagaatcgtgatgacccacggcgcaagcaatcttaaca

SEQ ID NO: 4071 - DNA, 12064 bp, synthetic construct
  source 1..12064: mol_type = other DNA
  misc_feature 1..12064: note = Synthetic
gtgcgatgttgttgccaactacggtgtcggtcgcgaaacggtcgcttatgtcacccgcggtgtcaccacgctggcactcttctttatgctgtttgccgtggaggcggctgtccgtctgggcatcaaaactgccgccgagggtgaggccgtcaagcagcagctgctgaaggccgcagacatcaatgccgccgtacaggcacagaccccttcctttattaaagagcactaccgtcagctgtccggcatgaccaacgcttatgtctgcggcgtgggtgccaacctcggcaccgcaagcgagggcgcactgaaattcggcgagaccgtcagcatccccaccgctgcctatgaggtcgaggagtacatccacggccccaacatccagatgaccccccgctacagcgtatttctgattgacggcggcgagggcacggagcgcatccaccgcatttttgagggtaccaaaattgtgacggataacgctttcctgctgacgcgctgcgccgattacaaggacgagcacaatgttatgtatgtgcctatggatgtgccggaggaaatcaccccgctgtgctggctgcccttcttccagatgactgcctgccggctgacggatgatctggaccgctggaacaagcacccgctgcagcgcgcgatggagaagtttgtttcctccaagagcgccaactatgtcaacagtcccttcagtgaagacacgccgggtcgtgcgtaagaacgatggcgtggatatctgctgtatttttctgcctgggtgctgcggacaccttgttaggtgatcggctggggttgggtagtgccttccggcagggctttgccgccgtggtggatctgctgctgctcatgaccggttttatggcactggcaccgtggcttgggacccatctggcgcctgttatcacgccggtgttttccgccgtggggtgtgacccttccctgtttgcctcactgtttttgagctgcgatgcaggcggtgccgtgctggccgcgcagatcgcgcaggaacccgccgccgggctgtataatggtttgatcgtggcggcctttctcggtgccacgatcaacggtacgattccgctggcgctgggtgggctgacaggcaccaaacgagccgctgccgttcgcggattgtttctcggctttctgatcctgccggtgggctgcctgctcaccggggtgctgtgcggcatccccttgtcggttctgctgcacaacacatggcctgttctggcagtagcggtcctgttgctgctgcttttcaaatccggcagcaatgcgatcggcccgatattcaacggcatctctctggcggtgcgcggcctgaccttgttcggcttctgcatttccgtgctgcaggaaacgaccggtattgtgttgctggaggggttgacccccttggcggaaatctacccggtcataggcagtatcggcgcgtttcttgccgggatcctgccgtttttcgcctttgtacagcggctgttgagcgcaccgctggccaagctggccgcacggctgcagctggagcctgcctccatcaccggtctggtcgtgacgtccgccaactgcatccccacgttgctgagtcttgatacgctggaggaacgcggcatcacactgaacacggcctatgccgtagtagctgcttacagcgtcggcgattttctggcatttaccctgcaattcagccccgcacacgccctgccgatgatggcaggccgccttttaagcggcttgctggcagtggtgctctgcctgaaaacaacacccaaaaccacctgagtaaacacccccaactggcagctaaagcccgttgggggtgttggtgttttcctatagcgttccctgtgagccgcacgcatgtctataatgcgagaattgtgcggcgatgccttagaaaatttcccgcttcactgtcagatacccgtttttgattgattatcaacttcccaatgcccgctgaagccgcgaccaatgtagtgaacattatccagtttctttatacgccgcagaatggttcgggtgcttacgcccagcatcatgcccattttttcggtgctgattttattgttccgcttgatgagcgcgatgatttttgcatccaaatcgtcttgagcgacatcttgactgacatcttgggtgacatcttgggtgacacgttgggggacaccgtaattcaagttcggcataacgaccgtaaactggtagcggtcagaacggaacgtagggactttgctcggcacgaagttgacttgcgccttgtagccattcagaattttgccgaagccgctgcccttgcgctccatatagcccagacggttgaacacatcggccagtaccgggttgcgccgggtggacggcacggtaagcgggtcgcggtcttggatcattgacccgtccggcataccgcccggcgagtagatctccagacgatcatcgtaaatgtcaatgtggacctcgctgccgtagacgagataatcgcggtgcgccagcgcgttgacaagcgcctcgtggtagctgcgctcgacgtattcgggcagttcctcccgcgagttgggtgtcttgcgccacatcatgcgggcgttgcgcttgatgaacgcctcgccgttttcaatcagagaaagcacactgccggaatactcggcatcgtccagcgcgtccatcgttccgccgcttttgtccagcccgttccagcgtgtgcagaacaaccgtgaccagcggatcgggctttcatcagcaatcagggcgccggcatttgtcaaaaagccgccctcgtctgccagaccgaaggaaacaaggtctttgttgtcaaagctgtttcccgtccacttcttatagcgctcccgcagcttggaaaaggcgtagtcctccaccctgtaaagcgtcatctgagagtcgtaggaggtatttctgccgcgcagaacaaggcgttttagctcggtggcggatgccttgacgctctcatttccgatgcgtacaaacgcctctaaggtgccgtcgccggagtaatagtagggcgtttcctcgcctttgaacacatcaaggatcagcagcaccttgccgtcatcggttctgtgaaaccgcagccgaaactccgggataggctccatgcgcgtcttgaggatctcgctgattttctcggcgtcactgtcgggttcggtcaacccaacgatctgtccatcatccgccatgccgaaaatcagcgcgccgcccagcgtgttcgcaaaagcgctgacactcttgcaccagcttttgggcttttttacctcaagcgccgctttcttgtcatattcggttgtttcaccgatcaggttctccatattcatctgttccgaccaccttttgcgcgaaatatcggtgctttcagtataatataaagtcgggcgtttttcaaataatcttttgaaatcaaagttcatacgcgcagaaatcccatatcttttccagaagctgatgcgtttctttccactggtcctctgtaattttcccggttgcgttcgcaagatgggcaatctggttcaggttatttcccaccgcagacaactcctttatgagcttgatgtaggtggcattagggcgcgggcgaatctcgtaaccgacaagcagcttccggatgacaggctccatttttaagccggatgtttcgctcatctcgcgcagtttggcgtactctttgtcggtaagccgcacggtgattttcttggttctgtatatcatagtgtcaatatcctcttgaatcaaaagccacaaaatgagggacggggtttcaggggtattcccctgacaagtgggcgttttgccgtcatgacggcaagatgccgtgcttgcgggggacgttcccgcatttccatgcgggaacagccctctggaaaagagttaaatataaatcaactcgcagcacacgatttcctcggcttgcgcctgcaaagcttgcatctgcgccgcccattccagagggcgatgccgtttcagatcctcggtgacgccgcgctgttctgcaagccggcgcaccagcgcactgacctgattgtgtgcctcgctgtcgacgccggcaaggtgctgtgccagcgtaccgtccagcagcatttggtcgcgttcaaaggggcgatgttcgtcaagaaaacgcgcccgcatcgcaccgtatttgcccaacggcggtgtgctgcccgtgggcagggcaaacgacggaatcaggtatccgtttacgttagtgtaatccgtagacatttttgacctccttgtatggcgcggtaataccgctgatggtgttgagtttgtaggtagcaaagcttgtccacaaaagcgatttcatgtactgcggcaggtttttgaccttccgcgtggtgattgcctgcaaaaaggtatccagcacatcctccacatacggttccaagccgtcctcctcgcagccgttgctggcgcagctgatttcagccagcaccttatcggccgtgacaagcgcaccgcgatatgactgtgtgccggtggcgcagcacatctcggtaagacaggtgttgagcagtccaaatgcgctttggcgggcgtcatcggtgatgccgtttgcttggtacggatgctgctgacggaagtcgtatccggtcaggtagtggatcgccgtctgcataagggcgggcttagccatatacgcctgcggaatggacttgtgctttgtcagcgcggacagaactatgttttccaaagcgttttcatccatctctcccccgtcttcaggcagctctgccgcaggagagattgatagattagtttttataagtttttctttatgatttagttttatattaccgccccggtttccaccgcagtggtttccactatggtggttaccaccggggtagtaattggggtggtggtctgcggctgctttttcagcaggctgttcggcggtttcggtttggtttcgtgtcagattggtgcttttcacatcgccgttgcggtcgtggtagaaaaggtaggcgccgtcccaaccgctgttgtcggggcgcagttcatactgatagacgaagcgccccttttcaccgggatacacatggatgaacaaataccccttgcttttcaattcgttccatgccgtattgaaggcgtattctccctccggcacacgctccataaggctgcctttggtgagggtaatgttttccattgtgatatagctttggatgcgtgtatacagccccaatgcgccgctgctgaggttccagtcgcgggcgacactgttctgcaccacagtaaaaccgggcttggggataaaagtgccgttattggctgcttgatttttcattttccctccaaatggtagaagagtttgataatcccaatatgccgaattcttccgaaacagagggtaacagacaaaaattaggagctgttcttaattttagaaagtggtaactaaggtggtaacagatagaggcaaatttgcggcaaaaaccacgcataaagtatctttaaggtacataagaaacgcaaaaatcgaagaaaagcgtatctttaaggtacagaaacagatcggtatgcgctcataacccggaggtcgcaggtgaataggttcccacttttgaacccggtaactccggtttgaaggtgggaacttttctttttataaacagccagaatagaacgccgattcatattggttcggcgttttcatgtttagttttctatgcgggcgttggctgttgtagaaattgatatattcgtccagaacggcttgcagttcctgcggtgtgccatacaggtggtgataaagcgcctcctttttcagcgtgtggaaaaacggctcgcagacggaattgtcgtaaggtgtgccgggtgtggaaaaggattgctttatatgaagctcttttaaatgtgcgcggaaaatgtaggatgtatactgtgcgccttggtcgctgtggaacatcagatcttgcggggggtcccgagactggaaagcgtcatcaaaagcagcaagcgtaagagctgtgttgatggaatccgatatgctgtacgaaagtatacgccgtgagaacaggtccagcactacgcagatatagtaatattggtcgagcactttgatataggtgatgtcgctgacccaaattagattgggctgaggctggtcaaattggcgtgctaacaaatttctgaaataagcacgcggcagacttttttgatgctcggccttgcagcgcggttttgcaacggataatcccatctcattcataagacgaacgatgcgcttttcactgactttgtagcctagttctgcaagtttgtgatgaattggctttctgccaaaacggttcttactgtcgtggaagatttgacgaatcagaggcttcagcttttcatcatttatctcataagaagtccgttgccccgctctccgttttcggttgtagtaagttccgcgcggtaggcttagagcatcgcataagacatggatggaatagcgcccgcacaatgcattaacagcagctactttttcgtcgatggaggctttactgccgcacggacactgccgaaggacctctaattccagcgcaagtttttcaaggtggcgcttagatttgtggctggttgcccggttggtggtaatagccgcatgtacgggatgagctttatcaaatttctgcttccatgtaaagaatgtgctttcagtcatgccatacttgacttgtatttccgcgaaagagtgaccgagctcgtagaaaagaacggcttcatctttgatagattgcgagtaatgctttttgcccattggtgaactcctttgctaaaatagtgtgaggattccagtatagcaaaggaggcgagaaaagtataatttataggcgatatttcgacgttctatactgtgaatatgtgctaattttaagggaacgactacatacagaacaaaggagaaaagcatggattttattagcacaggcacagagatacttaaacaggaaaacgtacttacgccgcggcaaaaagatattattgatacggaaaaggaaatgttaaaatctccgttcgataggaatactgcgattggacaagtagagaaaaattgcatgagctatcccgaactggcattaggagtgactgtgccgattgcgataaggggacgttcattagaacaaatgacgaatgatgatatactaaaaatactgcaattgcagtttggaatcctgatggcggaagaaggggtaagaggcataagaaatcagtgatttgcaaatcataaatgggacaaaatgcgagtcataaaatataagaaatcaaagatataacaagtatagaaaaaggaatgttggaaacaacttgaagccaacagaccctttcgctttactaaataatggatttgaagcgaatgcaacgactatttctattacacatacaatcaatgtgttaggcgggatagaggaaatatgtatttctgataatggtagtggaatttgtttcgaaacgattcaggatacatttggagcgtttctggcttcgcagaagaatgcactttctctcaaaattaaatcaaaagtgaatcaaggcaaggggcgatttgcgggattttcttttgcaaatagaatcaagtgggatacagtttgcgcggaaaatggtaaaaatgttcaatattcaatttccgtttacagtgaaaataaaaacgaatatgaagttacagaaaaagcattgaccgaaagatccacaggaactacggtaattattggtaatgtggatcagatactgccagaacaggtaacgattttagcgttggaggatacactattaaaagaatttgcatggtacctttatcttaataaggaaagaaatgttgaaatactggtcaacggtgaacgcgtagactatacgaaatacattgataccagatttagcgcaaaaaaggatttgctgatagacggtattggattaaagattgacgttgtagtttggaaagaaaaaattcgagagaaattttgtatatattttatgaatcttgagggggtgttaaaagggagagatacgacatcattcaataggaatacagtgaactttaaccatagtgtatttgtaagatcactctgttttgatagagacagtgacacttctttaacgacagatgatagcggcaatgaacagatagctttcgacgatcagccgagtaatcgcacttttttgcgaaaagtaaagaaagagatccaagaagctattgatgatgcacttacagcattcttatcggcccaagcgacgaaggctgttcaagatatgatggatcgtgagtcttttccaacgttttcggacgatattccggggcaactacaaaagaaggacttaatgaccgtaacgcaagaactttataagttggatgcccggatcttctataagctaaaaccgattcaagagaagtctctgctaggatttatcaatcttctgctccaatcagaagaacgcgaaaatatgctcgatatcatagaaagcattgtcagtttgacccctgagcagcgaaagggcttctctgatatattaaaacgaacccaattgggaaatattatagatacgattcagtttattgaagaccgctataaggtcgttgaggctttaaagcaagtagtatttgattatactgattatgcaaatgaacgtgaccacgttcagaaaattgtcgaacaacattattggctgtttggggagcagtacaatcttgtgactgctgatcaacgaatgcagaaggcattagccaattatttaaatattctttatggttcagatgctcccgatgccacattgaatcctgattaagaggagatgcggcgaatggatatttttctatgcggtgcaagaaaaacagaggactctgttggagatgaaattcaagaaaacttggttatagagttaaaagcgccaaaagttgttttgaccaaaaaagttctgcgccaaatagaggactatatggatttcgttaggaaacagcctcaatttaatacacaattatccaggtggaggtttatcgccgtttgcaataatgttgatgacgatgtaagagcacgctatgccacaaatcagacaaaagggaagaaaggcttggtttttagtgtagagaactacgaactctacgctttaacttgggcagatgtttttaagagcttcgagctaagacacagtttcttacttaagaagctaaaaatcgatcaagaggctatagaaaaagatatatcacagcaactcggtaatagtactgggagggaagcggtaaataatttgacagccttggcgttgccagttagtatgatttccggttagtgattcaaaagagctcattttgttccgactatgaataaaggtatcttttttgtaacactcagacaacaaaagctcgttgaaacgacaagtttcaacgagcttttttctgcaatatggcaaaagtggtaacaagctggtaactttgaccccaaaatgaccccaaaacggaaaagtgactgcgcccggacgattggacttttcaaccgtccgggcgctttttgtggataaatcttgcggagttagcaggtaaatataggagcggtcagtgcggtcagcttgccttgacgagtaccagtacgctgttctgtggcactacgatttgctcttgcttggtaggaatgggcgggttcttgtactggcgcagggctttttcgatttgctgcttgacttccagcagggcggcttccagcgtgggggcttgtgcggtaactttggggaagtcaggaacatgggcggtgtagccgtctgccgagagtgtacaaagcacaggataaggctggttctcaacggagatgctgtactgcatcccgaacatatcgttcatcttgtccatctcgcgccgcttgtgttcgtccatactgtgaacgtaggtgtccattgtgaacgccaccgagtagtgaccgagaatggctgacaacgttttgtaatccatgccgcgttccagcgcacgggtggcgaaggtgtggcgcagggcgtggaaggtaaagtgcccgatgtcggcatccttcaacaggcggtcgtagtaatccttgaaggttttctgctcaaagtagtgtccaaactcgttggtcactacaaagccgttgtcaaggtacttgtcccctgcccgctgcttacccagtatatcgccagctttatgctgaactatatccgcggtcatcttgcttttgctgcgcatcctatggcaggcaaaaagcgggttatcgccgtaaatggtgctgtcacttcgtttctgcgcaagcgctggggtattgccaaggtgcgcgcagacggcgatttacaccacgcggtggatgcagcggtcatcgcctgcacgacggacggtatgatccaacgggtgtcgcggttttatcagcgggaggaactctcccacgcacggggagagcgtttccccgaaccgtggccgcgttttcgggatgaattgatgcagcgcctgtcgtcctgcccgcaggaaaacctgctgacgatcaatccggtttattataccaccgcggatatagcgggtatcaagccggtgtttgtttcccgtatgccgcgtcacaaggcaaccggacccgcccacaaggaaaccatcaaggggcgcttggacgacacctatgtgacccagcgccgcagcatcaccgacttaaagctgaacaaggacggcgaaattgacggctactttaatcccagcagtgacaccctgctctacaatgccttgaaggatcggctggtcgcctttggcggaaacgggaaaaaggcatttgccgagccattcttcaagccccgcgcagacggcacgccgggtgcgcaggtacgcaaggtcaagctttacagcaaggtcaccagcacggtgccggttcacggcggaaacggcgtggctgacaacgataccatggtgcgggtcgatgtgtattatatccccggggatggctactattgggtgccgatttatgtggcagataccgtaaagccgattttgccgaactgtgcatttgtcaggtgcaaaaacagcatcattaagaaggaaatgtccgaggaaaatttcctgttttctctgtgcaaaaacgatctggtttgtatagagagcaagcgtcccataaagctgaaggcagccaacgaggacagcacgctggaaaaagagctgaccgtccagcgggtgcttgcctattttgagggcggtgacatctctaccggcgccgtttccgtaaccacgcacgataacgcttatattgtcagaggtctgggcttcaagactctgcaaaaggttgaaaaatatcaggtcgatgttctgggcaattatacccgcgtaaaaaaagcgccagctttttcccgcccaacggaggtgacgcatgtcttaccgctgccttgcgggtatatggtgcgctgcttggcagtatacggctttttgccatggctggggctgcatcacgacaacgaactgaaccagtttaatctggcggacgatctgatggagccttttcgcccggaagcggatttgtatgtagctgccaatgtggcagaggatgccgccatgacccccgggctgaaaggcagccttgtcaatctactgaatgttgatattctttccggcgggcagcaccacagtgttgcctatgcgatggaacggcttgtgcaaagcctgcgcagccaaccgctgcagctgccgaagctgttggaatacaagcagcacagctatgagtaagtttatgcgaatgatcgtattttttgatctgccagtgcaaacgaaagctgatcggcggcacgcaaccgtctttcggaactttttgctgaaggacggttaccatatgctgcaattttctgtttatgcgtgggtgtgcaacggaaacgacgccgtgaaaaagcacgagggacgtctgcgggcttccctgccgccgaacggctctatacgcctgcttgtcgttacggaaaagcaataccagtccattcaaattcttttgggaaattatcagccggaggacgctccctttgcctgtgagcagctgagttttttctaaacaaaaagcgcatcggaccgcaatccgatgcgctttttgcatagcctattata

SEQ ID NO: 4072 - DNA, 9066 bp, synthetic construct
  source 1..9066: mol_type = other DNA
  misc_feature 1..9066: note = Synthetic
acctggtatttggccgcgaggatgcgggtctgccggaggaactgctggccgcccatgaggccgactgcgtgcgcatgccgatgcgccgcggcgaacgatgcctgaacctttccaacgctgttgcggtaggtgcctatgaggctttgcggcagtgggattttgccgaactggagacccacggacagctgacccgttatgaatggagtgaggacgtaaaatgagcaagatcggttttctgacggattcctgttccgacattccgcaggagcttgcggacaagtacggcatcgaggtcgtgggcttccccatcaacctggacggcgtggaatacatggagcgcaaggatttcaccaatgaccagttttaccagatgatgcgcgacgcccagggcgtgcccaccaccgccgccatcacccagctgcagtggtgcgagatttacgagcgctatgtggacgagggctataccgaccttgtgcatctgtgcatcaacagcgcgggatccagtacctacaacaacgccgtcaaaggtgcggagatgctggccgaggagcgccccggccataagctgaacatccagctcatcgacagccacacctactcgatgccctacggctggtatctgtgcgagtgcgcccgcaaggtgcgcaacggcggcgagcttgccacctgcgtggaggagatgaagcagagcctggaccgcgtggagatctgcctggccgcatacagcctgaagcagatgaagaagtccggccgcgtcagcgccgccgctgccgtggtgggtgacctgctgggcatccgccccatcatcagcctgaacgcgggcgtctccaaggtcgaggccaaggtacgcggtgatgccgctgtgcccccggccatgatcaaatgggtggagagccgcgtcgattccatgaaggacaccccctatatggtggcttacacgtccagcacctccaagcgcgacgagcttgtcaaggcctgcaaaaaggcattcggccatgcgccggtcattgtgttccagctgggcggcgttgtcagcgccaacaccggccccgacggcattgccatcgtctaccccggccatccccgccatctggaggcctatgccccgcagctgccgtaaaaaagacttgcattttttcaagggctgttgtatactataaacagttcttataccataccaagaactattatggttgctatgataaggtcataggaccgtaaagctctgacgccctgtcttatgacagggcgtcatcttttttgtcaaattttcgtggaaaatgtcagttgccgtgtgattctttatgcggtatgataatagcaaaaaagaaaaggtgtggtgaatatgaagcacccctatggaattggcctggatattggcattgcgtctgttggctgggccgtggtagcgctgaacgaaaacgcggaaccctatggcctgatccgctgcggttcgcgcatatttgacaaggcggagcagcccaaaaccggagaaagccttgctgcgccgcggcgggaagccagaagcacgcgccgcagactgcgccgccgcagcttgcgcaaggcagacttgtatgagctgatggcgcaaaacggcttgccgggcagagcgaaaatagaagaagcggtgcaggcgggccacctgccggatatctatgccctgcgtgtgcaggcattggatggccctgtaacggcgatggactttgcccgaattttgttgcacttgatgcagcgccgtggtttccgcagcaaccgcaaggcagatgatgcccagaaagacggaaaattgctgcaagcaatcgatgccaacacgcgccgcatggaagaaaaccactaccgcacggttggcgagatgatgtaccgtgacccggtgtttgcagagcataaacgcaacaagtcggaaaactatctttctacggtcagacgggatcaaatcgtggaggaagcggtacagctttttgctgcgcagcgccagtatggtgcggcgtgggcttcgccggaaatggaagcggagtaccttacgattttgacgcgtcagcgttcgtttgatgaaggccccggcggaaacagcccctacggcggcaacatcgttgaaaagatggtgggaacctgcacacttgaaggacaagccgaaccgcgtgcagccaaagcaacttggtcgtttgaatattttacgctgctgcaaaaaatcaatcatatccgcattatagagagcggtgcggcacgtatactgacggcagaagaacggcaagaattactttccgtatgctatcaaacggacaagttggattttgccaggatacgcaaggctcttgccctgtcggaacaggcaagattcaatatggtgcgatatcgggacggacaaacaactgaggattgcgagaaaaaagagaaaattgtatgtctcccctgttaccacaaaatgcgcaaagtgctcaataccttgcggaaagactacatccgcagtgtcagccgcgacaggctggatgcagcggcaacggcgctgacaatgtataaaaatgaagctacgctcagagcaaagctggaagaagcgcagtttgaaccgctggaagttgatgctttgatgacgctgcccagctttagcgggttcgggcatatttctgtcaaagcgtgccgaaaactgatcccctatttggaacaaggactgaactataacgacgcctgcaaagaggcggggtatgacttccaaggaaattatacaggcgataagacgatgttcctgcctgcgtccacagaggaaatggaggacatcacaagcccggtggtgcggcgtgcggtggcacagactatcaaagttgtcaatgcgatcatccgcgagcagggagaaagcccggtcaatatccacttggaactggcgcgggagatgagcaaaaacttccagcagcgcaatgaccttgacaaggccatgaaagacaataacgccgagaacgagcgtttgatgaaagacctgcatgaactgttcccagggagaaatatcacaggccaggatcttgtaaaatacaggttgtggaaagaacaggatgggcggtgtgcgtattcgctgcggccgttggaactggaaaaggccattactgtttcaggctatgcggaagttgaccatattgttccgtacagcatcagctttgacgaccgccgtgcgaacaaagtattggtgctggcgtcagaaaaccgccagaaaggcaatcgccttccgctgcaatatctgcaaggaaaacggcgggatgattttattgtctacacaaaagcaagtgtaaaaaattaccgcaagcgtcaaaatctgctaaaggagaagttgagcgaagaagacagcaaaggttttatgcagcgtaatttgcaggacacacagtatattgcaagttttatgctgaactacattcgcagccaccttgcgtttgcagatttccctgcggcaggtaagaagcgtgtggttgctgtaaacggcgcagttacagcgtttttgcgcaaacgctgggggcttggcaaggtgcgtgctgacggcgacctgcaccacgccgtagatgcggcggtcattgcctgcacgacggatgggatgatccaacgggtgtcgcggttctacacgcatatcgaaacctcggacacccggggcgagcgcttcccggagccgtggccgcgattccgggatgagctgatgcagcgtttgtcggcctgcccgcaggaaaatttaatgcagatcaacccggtatattatcaaaatgtggatatagcaagtatccggccggtgtttgtgtcgcgtatgccgcggcataagatgacgggagcggcacataaggagacgataaagggccgcttggatgatgcgcatacggttcagcgccggtcgattacagatttgaagcttgacaaagagggagaaattgcaggatattttaatccgagcagtgataccctgctgtacaatgctttaaaggaacagctgacagcttttggcggcgatggaaaaaaggcattcgcagaaccgttctttaaaccgcgtgccgatggaacgccgggagcacaggtccgcaaggttaaagtgtatgataaagccaccagcatggttgcagtccatgaaggaaaaggtgtggccgacaatgatacgatggtacgcattgatgtctattttgtgccgggcgacggctattactgggtgccgatctatgtggcagatacggtgaaaccggaattgcccaataaagcggttgtacagggaaaaagctatgcagagtggaaggaaatggacgaagaaaacttcttgttctcactttgtcagaatgacctgattcgtattgaaagtaagcgcacaatgaaattcaaagtgcaaaacagtgacagtacactggaaaaagaaacacagatgaattgcagcctggcctattttgaaggcggaaatatttcgacgggtgtcatcacggtaactacgcatgataacgcgtatattgtaggaagtcttggttttaaaaccctgcaaaaggttcaaaagtatcaggtcgatgttctcggtaactataccctcgtaaaaaaagaaaagcgtcagaacttccctgcacaacggaggtggcctatgtcctaccgctgcctgatgattgtgaacccggcgcgcatccgctgcaaaaatgaacagcttttgattgaaacggaagaagttcattctgtgccgatcgaggatatcagcgccattgtgctggaaagccggcaaagtacgataacaacggctgcgctggcggcactggcgcaaaacggcgtggtgacgttttggtgcgatgaaacacacttgccatgtggtatctcgctgccatttgcacagcatagccgccagttgggcgtgctgcgctggcagatggagctgacactgccgacgaaaaagcggatgtggcagcaaatcgtgacggcaaaaatcaaaaaccaggcggaatgcctggccctgtgcggcaaaacacaggaggcggcgttcctgtttggccgtgccaaggcggtgacaagcggcgataaggacaatttggaagccagtgcggcggcctactatttccccaccctttttggggcaggctatacccgccgcaatgaggatacccggaatgcggcgctgaattatgcttatgcaattttgcgcgggtacatggcacgctgtttggcggtatacggatttttgccctgtttagggctgcaccatgacagcgaactgaaccagttcaatctggcggatgacctgatggaaccgttccgcccggtagctgatttgtacgtggccgcgaatgttgccgaggatgcagcaatgacaaccgctttgaaagggcagttggtgaacctgctgaatgcagacattctttccgggaatcagcaccacagtgtggcttacgcgatggaacggatggtgcaaagcctgcgggggcaaacgttgcagctgccaaaactgctggaatataagcagcacagctatgagtaaatttatgaggatgatcgttttcttcgatttgccggtgcagacaaagacggaacggcggtatgcgacgactttccggaactttttgctgaaagacggctaccatatgctgcaattttctgtgtatgcgcgtgtatgcaacggcaatgatgcagtcaagaaacacgaaagccgcctgaaggcatctctgccgccaaacggctcgattcgattgcttgttgtgacagaaaagcaataccaatctattcaaatacttctaggaaattatcagccggaagaagcaccgtttgtgtgcgaacagctgagttttttctaaaacaaaaagcgcatcggaccgcaatccgatgcgctttttgcatagcctattataccataccaagagctattagggaactatgacactgtgctgtaacggtctgctggcgcttgtattataccataccaagagctattagggaactatgacccgtgccattccgtgccatcgctccagagcattataccataccaagagctattagggaactatgactggaaacgctgtacaaagatagcgctgctaattataccataccaagagctattagggaactatgaccgcttgcctcgtcggttttcagtgcccggcattataccataccaagagctattagggaactatgacttgcgatcgctgctcacgcccagcgcagggattataccataccaagagctattagggaactatgactgcgggaacggacgcagagtgccgatcagaattataccataccaagagctattagggaactatgacaaactatataagtacccgcgcccgcgcgcgattataccataccaagagctattagggaactatgactgacactgcaatcgtgccagagagagctgcattataccataccaagagctattagggaactatgactccacgcgcctgtatgtgaatgtcgctccgattataccataccaagagctattagggaactatgacgaaagatttccgcacgttgttgtgatcgcgattataccataccaagagctattagggaactatgacacagccgcctttctgttgctttgcgcctgaattataccataccaagagctattagggaactatgaccctgtgcaaactgcacaagactgtcttacgattataccataccaagagctattagtaaatcatcccccccaataaaatcccgctagccccaaaatttcttccccgcaggccttgaaacggtctgcggggtttgctataatttaaatttgttgagcaacttaggattttaggctccaccgcggcttgctgcggtgcaaaccccgcaagcctggcggtcttgcgcgcggtcaaaatctatccgccggagtattgtatgaatcagaaaaaactgtccgttcacagccttgtgcgctgtgctgtcattgccgcagtgtatgtggtcgtctgcctggtgctggcccccttcagctatggggctatccaggtgcgcgtggccgaggccctgtgcctgctgccggttttcggcgcggagtacatcgtcggcgttacgctgggctgctttttggccaacctgctgggctccaccgtcattgacgtggtgttcggcacgctggctaccctgctggcctgcctgctgacttacaagctgcgtgatatccgcgtaaaagggctggcaattccggcatccctgccgcctgttgtttttaacatgatcattgtgggcgcgttcgagattaccttcttcttctcggacggcgcacccacggcggccctggcggcgttcaacgccgttacggtgggcatcggagagctgatcagctgcacgattttgggcgtggccctcgtcaagctgattgagagcaacgcggccctgcacaagttctttacagaagaataacgaggtaacttctatgcgcccggaactgattttgtgggattggaacggtaccctgctggatgatgtcgaactctgcgaaaacgcgctcaaccgtcttttgcagcgctacggctacccccagcggtacgaccacgagcagtaccgggcgatttttggcttcccagtcgaggattattacgtccgcgccgggttcgacttcacccgccacagctttgccgagctggcggaaagctacatggaggattacatcccggccagcgccgcctgcccgctgatggcaggggccgttgacgcgctggaagcgttcaaaaatgccgggctgcggcaggtgattctgtcggcaagcccggtcacaacgctgacccgccaggtggaagaacgcggtgtgacgccgtattttgaccgcctgctgggactgggcgatatctatgccaaaagtaaggtggaggtcgggctggcctatttgcaagaggcaggtttcgacccggcgaaggccgtgatgataggtgattccgtccatgattttgaggtggcccaggcgctgggtgtgggctgtgtgctgcaatcgagcggccaccagccacccgaggcactgcgccggaccggtgcaccggtggcggcagggctgcgggaagcggcagagttgattttgaaaaagtgagccgtgcggcgcgggcgtcaagggcgccgctccctacaaccgtagagaggcattggaaatgataggcagagaggtacaaaaatgtctgaccgtgtaaaaggcgcctacctgacgatgggcggcgcggcgtgctggggtgtttcgggctgcatggggcagtacctgttcacccgggaagggatggattccacctggctggtgcccatccggctgtttctggcggggctgattttatgtgcgttcttttttgtcaaaaaccgcaaaatgctgtttgacccatggaatttcaagaaaaatccgcgcaacgtcgttgatctgctgatttacggcctggcgggcgtcagctgctgccagttcacctattttctgacgatccagctgtccagcgctggcatggggacgatcttgcaggacctctcccctgtcattattctgctggtggtctgcatccagcaaaggcgcgggccgcgggtgtttgagattttctccatcctgctgaccgaccttgccatcagcccggcggcgctggcgtcgggcgttgtcagcgcctgctgcgtcgccatctatacgatgtggcccaagaaattgcaggagcagtaccccaccccgatgctgcagggctgggcgttcttgatgggcggcacgatgtttgccctgatcttccgcccctggacgatgaattatgtgccgacgccgatgggcgtgttcggtattttcacggtcgtggtgctgggcaatgtgctggcgttcagcctgtatatgtcgggtgtgccgctcatcggcccgcagaagtccagcctgtacagctttgcggagccggtcacggcggctattatcagcaccttggtgttgggctcgccgtttacgctgtgggatgccttgggctttggctgcatctttttgatgctggtgctgttgagtctgccggcgaaaacaaaagcgtaatagattcgagaggctgtccgcaatgggcagccttttttgctgccgtgtaggggccctgggatagaatctatttaaaataatttttaaatagattc

SEQ ID NO: 4073 - DNA, 8714 bp, synthetic construct
  misc_feature 1..8714: note = Synthetic
  source 1..8714: mol_type = other DNA
tttttgtcgggttcgttaattgccttttgcctcgtcacgcggtatcataggagcaaaaagaagggatgtgtatgtatgaacactgcatatggaatcgggcttgacatcggcattgcctccgtaggctgggcagttgtagccttaaacgaggatgccgagccttatggcttgattcgctgcggctcccgcgtgtttgataaggcggagcagcccaaaaccggtgacagccttgctgcctcacgcagagaggcacgcagcacacgccgcaggctgcgtcggcgcagcttacggaaggcggatctgtatgctctgatggaaaaaagcggtttacccggcagggcggctgtcgaggaagccgtgctggcaggcatctgcccgatatttacgcgctgcgtgcacaggctttggacggtccggtaaccgccatggattttgccagaatcctgctgcacctgatgcagcgtcggggatttcgcagcaaccgcaaggcggacgatgcccaaaaagacggaaagctgctgcaagccattgacgccaacacgcagcgcatgaaagacaaccattaccgaactgtgggggaaatgatgtaccgtgacccggcatttgccacccacaagcgcaacaaaaccgaaaactatctttccaccgtcaggcgggatcaaattgcatccgaggctgcacagctttttgctgcacagcgccaatacggtgcagcgtgggcatccccggaaacagaggctgaatacctgaccatactgacgcgccagcgctcttttgacgaaggaccgggcggcaacagccctatggcggcaatatgattgaaaagatggtcggcacctgcacattggagggcacagccgagccgcgcgctgccaaagcaacctggtcctttgaatattttacgttgctgcaaaaactcaaccatattcgcatagaggaaggcggcaacagtcatcccctgacccatgcacaacggcaggaacttctcaccctgtgctaccaaaccgacaaactggattttgcgcggattcgcaaggtgctggatttgccgccgcaggcgcggttcaatatggtgcgctaccgggccgaccaaccggcggatgcctgtgagaaaaaagagaaaatcaccgccctgccctgctatcacaaaatgcgcaaggcgctgaacactctgcgaaaggattatatcctcacggtgggtcatgaccggctggacgccgccgcaactgcactgaccctatataaaagcgaggatttgctgcgggaaaagctgcagcaggcggattttgagccgctggagatcaacgcgctgctgaccctgcccagcttttcaaaattcggtcatatttcggtcaaggcgtgccgcaagcttatcccgtatctggagcagggagaaaattacaatgatgcctgccgcgatgccgggtatgattttcaaggcagcggtcacggcgaaaaatccatacttttacctgctgaagcggagggattttctgacattaccagtccggttgtccgccgggcggtggcacagaccatcaaggttgtgaacgccatcattcgggagcagggcgaaagtcccgtcagcattcatctggaactggcgcgggagatgagcaaaagcttccaggagcgtgcagacctggaaaacgccatgaaggaaaacaatgcagacaacgagcgcctgatgcgggatctgcacgagcttttccccgggcgcaacatttccgggcaggatcttgtaaagtaccgcctgtggaaagagcaggacggacgttgcgcctactctttgcagccgttggagttgcaaagcgttatcacggtttccggctatgctgaagtggatcacattgtgccgtacagcatcagctttgacgaccgccgcaccaacaaggtactggtgcttgcctcagaaaatcgtcaaaagggcaaccgcctgccgctgcaatatctgcagggtacaaggcgggacaactttatcgtttacacaaaaaacaacataaagaactaccgcaaacgccaaaatctggtgaaagaaaaccttagtgccgaggacagcagcgggtttatgcagcgcaatttgcaggatacccagtatatcgccagctttatgctgaactatatccgcggtcatctggcttttgctgcgcatcctatggcaggcaaaaagcgggttgtcgccgtaaatggtgctgtcacttcgtttctgcgcaagcgctggggtattgccaaggtgcgcgcagacggcgatttacaccacgcggtggatgcagcggtcatcgcctgcacgacggacggtatgatccaacgggtgtcgcggttttatcagcggacggaactctcccacgcacggggagagcgcttccccgaaccgtggccgcgttttcgggatgaattgatacagcgcctgtcgtcctgcccgcaggaaaacctgctgacgatcaatccggtttattatgccaccgcggacatagcgggtatcaagccggtgtttgtttcccgtatgccgcgtcacaaggcaaccggacccgcccacaaggaaaccatcaaggggcgcttggacgacacctatgtgacccagcgccgcagcatcaccgacttaaagctgaacaaggacggcgaaattgacggttactttaatcccagcagtgacaccctgctctacaatgccctgaaagagcggctaatcgcctttggcggaaacgggaaaaaggcatttgccgagccattcttcaagccccgcgcagacgcacgccggtgcgcaggttcgcaaggtcaagctttacagcaaggtcaccagcacggttccggttcacggcggaaacggcgtggctgacaacgataccatggtgcgggtcgatgtgtattatatccccggggacggctactattgggtgccaatttatgtggcggataccgtaaagccggttttgccgaactgtgctgttgttgctcataaaagctattccgagtggaaggaaatgtccgaggaaaatttcctgttttctctgtgcaaaaatgatctggtctgcatagaggcaagcgtcccataaagctaaaggcagccaacaaggaaagcacactggaaagagatctgaccgtccagcgggtgcttgcctattttgagggcggcaacatctccaccggtgccgtttccgtaaccacgcacgataacgcttatattgccaaaggtctgggcttcaagacactgcaaaaggttgaaaaatatcaggtcgatgttctgggcaattatacccgtgtaaaaaaagaaaaacgccagcttttccccgcccaacggaggtgacgcgtgtcctaccgctgccttatggttgtcaacccggcctgcatccgatgccaaaaggaacaactgcaattttctgtttatgcgcgggtgtgcaacggaaacgacgccgtgaaaaagcacgagggacgctgcgggcttccctgccgccgaatggctctatacgtctgcttgtcgttacggaaaagcaataccagtccattcaaattcttttgggaaattatcaaccggaggacgctccctttgcctgtgagcagctgagttttttctaaacaaaaagcgcatcggaccgcaatccgatgcgctttttgcatagcctattataccgtaccaagagctattagggaactatgactcaaatagtatttctccggcacgccacctattataccataccaagagctattagggaactatgactcccggacgcaccaaaacttgaacacacaaattataccataccaagagctattagggaactatgacatctgcaccagcagcgccttgcagtccctgattataccataccaagagctattagggaactatgacacttccacacaattttgcggtgcgagttgattataccataccaagagctattagggaactatgactacaatagaaactactaaagccgcttagacattataccataccaagagctattaggaaactatgactgtgtgggtggttgtggggggaggtcagcgcattgatatttttgcagctgcaatgcagcggcgcagaaaactgccccatcaccatcggtgcttatggtgaaggcggtgcccccatcgacaacgacggacagggcatctggtatcaggattatgggtgcgcaccggactcgcccacccatgtgtatcacggctggattttccccgccgtgccgccgtgctgctgtacgatgccgcccggctcggcagccacatccatgctgatcaagttccagaaatatctggtagagagtattgccacagacggcattaagggttaaaataaatagaaagaacgtaggggcgcatcctgtatgcgcccgtggggccgtgccgttggcagagctgcacgggcggataggaaaacgcccctacatttgtatatagggtgattgccatgcttttgaacaaaaataccgttctccccgccgcacctgcggccaagccggtgcagtatgcgctgaaagcgctgcgccgcgattttgaccgcgttttcagcgcgaccgaggcccccggcgggcgtgtcctgctgaatgtaaacgatacgctggccgcagagcagtatgttctgacggccggggcggacacactgctgctctcgctgccgatgatctggctttgtctacggcctgtttgagatcagcgccggtatctcgcgtccagccgttctggttctggaatgaccagacccccgaagtccgggaagatgcggcgatagcggccggcacggtcgtggagtccaagccgtaccgggtgcgctaccgcggctggtttgtcaatgatgagacgctgctctcccactggaaggtcgagcggcgcagcgatctgccgttcatcatggcgtttgaggcactgctgcgcctcggcggcaacatggtcatacccggcaccggcaaaaacggcctgctttaccgccggaccgccgccgatatgggtcttatcatcaccccaccaccacgccgagcctttgggtgccgagatgttcgcgcaggcctaccccgatctggagccgatgtacagcaagtacccggagaaattccgcgcgctctggcaggcgggcattgatgcgcagaaggatatgcgcgttgtctggaacatcggcttccgcgggcagggcgaccgccccttctgggacgatgacccccagtacgacacgccggaaaagcgcggcgcgctgatttcttccttaataaaagagcagtacgatctggtcagggccaacgaccccgaggccgtctgctgcacaaacctctacggcgagacgatggagctgtacaaggatggctttttgcagctgcccgccgatgtcatcaagatctgggcggacaacggcttcggcaaaatggtcagccgccgtcaggaaaacaacaacccccgtgtaccggctctgccgcgctgggcgatacaagcgcccacggtatctactatcacgcatccttctatgacctgcaggctgccagccacatcacggcgctgcccaactcggcagcctttgtggcgaaggagctggccgatgtgctggcccacggtgccgatgattactggctggtgaactgctcgaatgtcaagccccatgcgatgctgctggatctgatcgcccgctgctggcgggacggcacggtggacgccgggcagcagtgcattgcctacaccgccgcctactacggccttttgtaccggtgcgagatcgcacagtgccttgcggattatgtacagtttgccgtgccctacggcccgcatgaggacgatcatgccggtgaccagttctacaaccatgtgccgcgtatgctgatttcgcagtttatccaagaccgcaccgcccccgccgagaacctgcgctggctgtgtgagcagcgacctttgccgggcagctgcagcactgcaccgccgtctttgacaaggcagtccaaagctatgcagctaccgcgcgaatgtgaaaaggtgctggccgagttgaccggcgcccgcgcgtgctgtttatggacagcgtgatgctgcaggcgcggctctacgacctgtgggcgcagggggctgcgtttgtctgccgggcgctgaccgccggccttgccgccgactggcagcactgcttctactacgcaggctgcgccaagcggctgtatgtgcaggcctaccgcgccatgcaggaacgcgagcatggcaaatgggtcggctattatgccaacgaatgtcagaccgatgtgcgccagagcgcacaggtctgcgggtatctcatgggctttgcccgcacctcggcgagggaccgcactactacgagtggatgcgcgagttcggcgaccccgaggacgagcgccgcatcatgctgatcctgaacaccgagcctcaccccggcgatgacgacctctggctgctgatggagcagcggtggggcttctgatgcagctgccatgtagggccgggcatgcccggcccgcagcttcccgcaaacgctcgtttgcctttcacttgcgggccgcacatgtgcggcccctacaactctgccgttaggtacaaagggttctctcctcatgctcacccgcttcaaaaaacggtttcttgacctgcccatttcgcagaaatttgtcagcatcttttcggtgatgacgctgttcagctgcgccctgatggtcgcggcgctgcatatcgggctgtccgtctttgaggaaaagctctacgagaaatcgctgcaggagctggacttctttgtccagcgcgttgatgatgacctgcagcagatggatgtgctgacccgcagcattgcggtggatatcacgatccaaagccaacttgcccagctgacagcggcagacccagagcccggcgatgaccgccgcgcaaagctgaccgatgcactggacagcaccccggcagctttgtactgctgccgccccaaagtaccggcatagaattattcctccgttccccagacttcgatctgcgtcagcgccgggaacggcgacgcatcatcggcctttttcagttcaaacagcttcaggctctgcacggtgcgcggggcaagggcaaacacctgcggcgcggcggttttggtcagctgcaaaacctcgcggctgccgtcatcaaacgccacagtcgcctgcgtccagtagctgtcgtgcgggaagtccgcgcgcagcgtcagccgcagctcgtccaccgtgaccgggcgccaaactcgatggtcagcagatgcgtacatttgtttttgcaaaagatgtggtatcataaagacaacacaaggggccgacaaaacaaagtcccaataggaaggagaaaaatccaaggctgcgcttggtgaacgcctcgccgttttttgatgcacgaggcctgtgcttatgtatccagcccgtagggtaccgggtgcttgccgtagcggttggccgggctgccggtcagggtcagcgtcagggtgttttcgccgggggtcaaaagccccgccagcgggaatttgtgcggcggccagaaggagacgcccgccggctggtcgttgacagtcagctcggccatctcctgcccgggcagggtcagcagcggcgtggcggtctgcagctccgttgctgtgatctgcagtgtggcgcggtaggtcttggtgagatgggccgcgtcctcgtccgcaagggtaaagtctggtgcggccagcgacagataggtgggcggcaggggaagggctcgctttcccgcgcagtgcaggtgaacagcagcaggctgccgcgcgcggcagctccagcggcaggcaggcccccttgcggtacgctcggccgggcaggcgcagggctggccgttccacagatcgtaccggcaaagcggagcatccaccggcagggtcagtcgggtcttgatgggggtgttgccctcgttgaccagcagccagcaggtgcgcccttccttgcccgccaccgagcagcccgccacaaaaaccgacccctgcaggttgtacagcacctgcaaaaagacatgcccgatggagtacagcgctgagttcagccccagcggcagaccgatgcgcacaatctggcgcagggctccggcatcaaagccgcagggcaaaacaggcagcgcaagctctgtgcagcggcggcgaatgtaaaaaatgctgcatatccacgacaaaaacagtgcaatcgccgtggctgccgctaccgccgccgccaacaccgcctttggcgctgagcgccgcaaggcccgctatatgtgggtgggcgcaaagcaggacaacgcccaccagcaaaacgccggcgcctgccgcacggcacaggcttttgtgcagcagcttttgcaggataccaccccggcactggatgtgctgcgggcgaatttcaaataaattttgacaaaaaagaaggttttgtttatgaactacaccgaaccgaaggtcatttacacctgcttccccggcggcaagcataaggtgctgacgatgagctatgatgatggccgtttggaggaccgccgccttgtcgagctgttcaaccgctacggcatccggggcacctttaacctgaacggcggcctgccccgccccgagcgcatcccggagagcgagtggtcgagctgtacaagggccatgaggtcgcctgtcacacctaccaccaccccaccatctcccgcagcccgctggatcagaccgcacggcaggtgctggccgaccgtatgcagcttgagggcgtcatgggctaccctgtgcgcggccttgcctaccc

SEQ ID NO: 4074 - DNA, 8635 bp, synthetic construct
  misc_feature 1..8635: note = Synthetic
  source 1..8635: mol_type = other DNA
gcataagtttttggctgccgttgtttacggcgataccctgatgtacctgacgaataaaacacgtccctatgaggttgtacaaggcgctgccgacagactggcgcaaaagtggctggcacgcttaagcgaagccttcaagagcggcaaggcgcaggctttaggtaccatcaagcagcttactaaggctattgcgcacgaatttgcggatttgcctatcaccaacaaggagaaaactaaggtcggtattgtcggtgaaatctacatcaaatatgccgctttaggcaacaacaatctggaagccttcctgcagcgtcagaactgcgaatatatgctgcccggtctgatgaatttcatcatgtactgtgttgatacttatcttacggactacaagctttacggcggcagtctgcttaaatacagtgtcaacaagggcgctatgtggtatttaaaatatatggaaggcatactgcatcaggctctcagtatcgctcccttcagcgcccccgccacctatgaggaaaccaaggctatggccaagggcgttatcggctacggcaacaatatgggcgaaggctggctgctgactgccgaaatgctggagctggtgcacagcggctacaccaatatcatctgcgctcagcccttcggctgcctgcctaaccacatcgccggccgtggcatgattaacaaaatcaaggagattgccgaggaggccaatattctggcactggactacgatgccagcgctgcccgcgttaatcaggaaaaccgcattaagctgatgctggcaacagcaaagtaaaaatttctgaaaatgccaaagttacgaattacctgctgtattttacggtttacagtatattcttgttccggcaggcgattttctttatgaaatatcttaactttttgtttttcattttcgtttaaaatattgtattattttttcataagtatagcaggatttatatagcttcatctagaattataaaaatatattttattttgagatttacaatttgaggcagacgtgttatacttaaatcaatccttataccataccaaggattatcgggttactatgataaggtaacacaccgaaaagctctaacgccctgccatccggcagggcgttatctttttacacgcttaaataagaaaggatgttgagaatgaaatatgcaataggccttgatatcggaattgcatctgtcggctatgccgttttagcattagatcacgaagaaaacccgtggggaattatccgccttggttcgcgtatctttgatgtagcagaaaatcccaaggatggtgcctccttagccttgccacgtcgtgaagcccgcagcgtccgcagacgcctgcgcagacatcatcatcgtttggagcgtataaaaaatcttttgattaacaccgagcttataacaaaagatgagcttttgcatttatatgatggtaatctttctgatgtatactaattacgtgtaaaggcccttgattattctgtagctaatgcagagcttacacgaattttattacatctcgcacaaagacgtggttttaaatccaacagaaaatctgatgccaacgacaaggaaacaggtcagcttttggaagcagtttccgcaaacgcaaaacgcatgcaggaaaaccattatcgtactgtaggcgaaatattttataaagatgatttgttctcaaaatacaaacgcaataaaagcggcacctaccttactactgtgcatagagatatgattgctgccgaagccagaactattcttgaaaagcaatttgctctaggcaacgatatctgtactcaagattttatagacaaatatttatctattctcttaagccaaaggcaatttgatgaaggtcccggcgaaccaagtccctatgcaggcaaccagatagccaatatgatcggcaaatgtacctttgaaccgaatgaatatagagcagccaaagcaagctattcttttgaacgcttcaacttgctgcaaaaagttaatcatttacgcctattacttgaaggaaaatccattgctcttgataacgaacagcgcaaaaaaataatagcattagcgcacgacaaggcagatttaagatattctcatatccgcaaagctttaggcttagatgaaaaggtattgttcaataccataacatacaatgatgatgtaagcgtaatagaaaagaaaacaaaatttaattttctccaagcctatcatcaaatcaaaaaagtcttggcagaagatatgcagaaacttacaacagaacaactagacaatataggtcagatactttctacatataaaagcgacaacaaacgtacagaagaactttctgcactaggcttagaaaagaaaattattgatgcattacttggcattaacggcttatcaaaatttgcccatctttctctcaaagccttacgcaaaataaatccttatcttgaagaaggtaaaatttacaacgaagcatgtgctgctgccggttatgattttaaagctcatgccaacacacaaaaaacagagcttttacctgcatacaaggaagagatggacgatataaccagtcctgtagcaagacgagctattgctcaaagcatcaaggtcattaacgctattatcagagagcaaaaatgttctccggtttatattaatatcgaattagcacgcgaaatggccaaaggatttgatgaacgtactcaaattgacaaagcaaataaagaaaaccaagctaaaaacgagcgtattatggaacgtatccgcactgaattccataaagcaaatccaaccggtatggatttaattaagctaaagctttgggaagaacaggatggcagaagtccctatagccagaaagcaataagtataaaccgtctttttgagcctggttatgtagatattgaccacatcgttccctacagcataagctttgatgacagttttaaaaataaggttctcgttttttctgatgaaaaccgtgacaaaggcaacagacttcctattgcttatctccaaagtaaatttggcgcaaaagcagctgagaattttattatttgggtgcaaagcaatataaaagattataaaaaacgtcagaagctgttgaaacgtgaaattacggaagaggatattaataaatttaaagaacgtaatctgcaagataccaaaactatctctcgttttctttataattacattaatgattatctgctgttcgctccttcagatacaggcaagaaaaaacgagttacagccgtcaacggtaccattaccgcttatctgcgaaaaagatggggcataaataaaatcagagccaacggtgataaacaccattctgtagatgcggttgtaattgcctgcactaccgacaagatgattaaagatctttcttctttttcccaataccatgaattggaatatacgcacacagacaaagaaagtctcatagtcaattctctaaccggcgaaattttaaaacgtttcccctacccatgggaagattttcgccccgaactaatggcgcgtttgtctgataatccagccgatgctttacgcaagcttaatttgattttctatcacggaaccgatttaagtaccattaagccgattttcgtatcacgcatgccacgtcataaggttaccggtgctgcgcacaaggcaaccatcaaaagcgcacgctgcctaaataatggtattgtaatctgcaaaacaagcctgcaaaatctgaagcttgataaagaaggggaaatcgcaaactattacgcacccgaaagcgacaccattctgtacaatgctttaaaggaacgcttgcgtgcctatgataacaaaccggcaaaggcctttgccgaaccgttttacaaaccaaaagctgacggcacaccgggtcctttggtaaaaaaggtcaaggtatacgaaaaatctaccttaaatgtcgctgtacagcagaatactgctgttgccgataatgacagtatggtacgtgtagatgtgttccatatcaaaggtgaaggttattatcttgtgcctatttacatagcagacactctgaaaaaagaactgccaaacaaagctattgtagcttacaagccttatgctgattggcctgtaatggatgatagcaactttattttctcgctgtatcctaatgatttaataaaatttgaacatagaaacggtgttaaattcgccaaagtaaataaagaaagcagccttgctgaaacctatttgacaaaaagcgaattggtatattacaaaggaactaatattactgtaggttcaacttctattattacaaatgataattcgtatactgtaaaaagtttaggcgtaaagacactctctaatcttgaaaaatatcaagtagatgtcctaggcaactataccaaagtaaaaaaagaaatacgcaggccttttcgttaagaggtgattaaaatggcttatcgtaatctgatgattgccagcaatgcgcaattaaaaataaaaaacgagcagcttcttattaaaacagatactactcacagtgttcctattgaggatattaattccgtactcgtcgaaaatcatcagagcacgataaccattgccaccttagccaaattagcgcaagacggcgtaacaatttttgtttgcgacgaaaagcatactccttgcgctattatgatgccttttgcgcaaaatgccagacaatacggtgttgttaaattgcaggaaagcctatctctgcctctacaaaaacagctctggcaacagattgtgaagtacaaaataaacaatcaggccatttgtctggaattcaataggcaggacaatgccgcacagcagcttcgttcattggcaaaaaaggtaaccagcggagatagcaataacacagaagccgttgctgccgctgtttatttcaaagctctatttggcccagactttatcagaagtaatgacgatgacctgcgtaacgcggccttaaattacggatacgctattatacgcggacaaattgcacgattgattgccagctatggctttctgcccatgaaaggcattcatcacaaaagcgaattaaacgcatataatttggcagatgatttcatcgaaccattccgtccggtagttgacctgtttgtagcacaagaagcacaagcctttgaagcattaacaccacagcttaagcaaaagctctataatcttttgaacatggatatcaaaatagcacagcaaaatcattctgtggcatatgcagctgaaaaaatgattcaaagcttcagccgctgttgccaaaaaacatccaaggaactgctgcttcctaccttagtagccttgaggcagcacacatatgaataaatttatgcgaatgctggtattttttgatatccctgtaaaaactaaaagagaaagacgcattgctacagcgtttcgtaattttttgctaaaggacggctaccatatggtacaatattcggtttatgctcgtgtctgcaacggcatggatgcagtacaaaaacatcgcagcagattaaatacagctttaccggaaaacggctctgtccgtttattagtcataacagaaaagcaatatgaaactattgaaatattggttggcaactatcacgaaaatgatacaccatttgtctgcgagcagctttcaattttctaaaaaactaattttactgctcatttaatgctagttacattattttttctcataccaaaaagcccttaaagccaagctttaagggctttttgcagtggtctattataccataccaagaaccaccggggaactacaacgaacctgtatataccttctatgagtttgcaattataccataccaagaaccaccggggaactacaacctcttggcgcaggcgcagaagatggtaagcattataccataccaagaaccaccggggaactacaacaggtcaaactgctactttaaatgttgcttcattataccataccaagaaccaccggggaactacaacgcgaaacatatcgataaaatcaacaacctcattataccataccaagaaccaccggggaactacaacagtgcatcggttgccgtttagagcgttctcattataccataccaagaaccaccggggaactacaacccattaaagtaatcggcgttaatacgatcaattataccataccaagaaccaccggggaactacaacgaacaaacactttataagagagatttgcaaattataccataccaagaaccaccggggaactacaaccaacgagagatgctatttgtttttggggcgattataccataccaagaaccaccggggaactacaacagtccttcttcttctttgttccaagtaggcattataccataccaagaaccaccggggaactacaacacggagcatacgcccatgagattctgaatgattataccataccaagaaccaccggggaactacaactgtgcttgataacgtggtatcaacagtaatattataccataccaagaaccaccggggaactacaacaataccgctataagccgtctttgattaccgattataccataccaagaaccatcggggaactacaactacacgctctgtgatatgctcgatggtaacattataccatatgtatctggaaatattacatcatactcaaaaatctcaacatagcaaaagaagctctcataaaaagtatatcttcttgacattcccttcaaatcccattaaacttaaactaagttcttcaaaaccgcaagtaagcctatgcatcaagctcatttacctgtggacaattaaataagcagtatatcctgcagatgcatcttttctgcagaagcttaagcaaggccatttatttttatctggtacattctaagagtagtacaaactgacgattttttatcgtcagggtactgctcttttttgtttttcaggcgctttgcaactgcttatgtattttttactttatctgtgttaaaatgaaaggagaaaaaccatgcaagacctggcaacaaaatttgcaaacctgacgatccaaagcgacttcatcttcaagaaggttatgtcgcgcaagcgcatctgcaagcatctgctggaggagctgctgcagattgagattgcggatatcaactatctggaggcagaaaagacgcttgagcctgagtacaccagccgcggcatacgccttgatatcatcgtagcggatgataaaaacacgcattataatctggagatgcaggtgaaaaacaataaaaatcccgatacggatacctacgtcctgcccaagcgctcacgctattatcaggcgctgcttgacattgatttgctgcagaagggacagccgtatgacctgctgccaccgacatttatcatttttatctgcgtttttgatttctttgaacagggtaattacgtttatacctttaaaaaacgttgtctggagaatttggagctggagcttcccgatgaagcggccaccatgattttgaacacaaaaggtacgcatggcgatatttctaaagacatcaagagcttttatgattatgtaaacaaccacattgtaactactgatttcactaaacagattgacgatgaaatcagctatctcaaattagatacgaaagtgaggcgagaatttatgcttatggaagcacgtttgttagatgaaagacgtgagggcattgccgaaggcaaggagattggccttgctgaaggtgaagctatcggattagtaaaaggtgaagccgaacataaacttaaagtcgctaaactcatgttagctaaaggttgctattccctgcaggaaatcacggaactttccggtttatctctcgctgatgtggagacgctgaaagaagaagcttaaccactctaatactgatttcaccaagcaaattgacgatgaaatcagccatctcaaattagatacaaaagtaaggcgagaatttatgcttatggaagcacgtttattagatgaaaggcgtgaaggcattgctgagggcgaagcaaatgccaacattgctactaagcgtcttttcagcatgggcctttctgtgcaggatatcgccaaggctacttctctcccgtttgaacaagttgaagcgttgcaagctgagcagtaaccataaactaaaattaatattataattaaaggcgttctaccgtacttaagtagaacgcctttactgtttttgccccttaaagacagcccttttaaaagaaaacctccgcaacatcccccacgccaataatttacaatctttttgcttgtagcacacaaatatgctgtgctataatattcagcgcaattttatagaatgaaagtaaggtgctttatatatatggaaaacaaaataactacccgcgaatggctgccgttaatcggcatgaccgtttccgcctttatttttaacacatcggaatttatgcccataggccttttatccgatatcgccgcagatttccgcatgacggaagcgcaggcaggcatgctgattaccatttatgcctacgtcgtaatgctcatgagcctgccgctgatgattgccgcttcccgctatccgctgcgcaagcttttgctggcaaccatcagcctgttcgccgtatcgcatgtagcctctgccttcgccaccggcttttggacg

SEQ ID NO: 4075 - DNA, 6366 bp, synthetic construct
  source 1..6366: mol_type = other DNA
  misc_feature 1..6366: note = Synthetic
tggataaggagtgaaagggatgtattacaaaattggtttggatattggcattacttcggtaggctgggcggctgtagagctgaatacggaggatgagcccatacgcatcatagatttaggtgtcagaattttcgatgcggcggagaatccaaaggacggcgcatctcttgccttgccccgcagggaggcgcgcagtgccaggcgcaggctgagacggcatcggcatcgtttggagcggatcaaatatttgctggagcaggaaaagtgcatgacccgggaagaaattgccgccatttatgacagcggccagcagttggaggatatttaccatattcgtgtacgggcgttggatgaagcgctgaccaaagaagaatgggtgcggctgcttatccatttggcgcagcggcgcggctttaagtccaaccgcaagagcgatatgcaatcggataaggagactggccgcttgacgcaggcggtagcggaaaatcaggcgttgtttgctgagaagggctatcggacgggaggtgagatgctctactatgaaatttgcccgagcgaagcgcaataagaaggatagttatttaaacactgtggatcgggctatgctgacggccgagattgagctgatttttgcacagcagcggcagtggggcaatccctgggccagtgaagagctggagacgcagtatctggatattttcacctcccagcgctcttttgaccaggggcctggcggcaatagcccgtatggcggcgatctcatcgccaagatggtaggcaattgtacctttgagccagaggagaagcgggcagccaaggccacctatacgtatgaatatttcacgctgctgcaaaaactgaatcatctgcggctgggcagcttaggcagctggcggcgcttgtccgatcaagaacgcttctacttggtggatttggccaaggccaagaccaatttgacctatgccagcctgcgcaaggcgctgaagctatccggcagcgaatatttttcggatctttcctatggggacaagccagtggatgaggtggagaaaaaggccaaatttcctgccttcaccagttatcatattttgcgcaaagcgctgagtgtgcggggagaacaccgcattgatgcttatacggtagagcagctcaatgaggtagcgtatggcctgacggtttttaaaagtgatgctaagctgcgggagcattttgctgctaagcagattcccacagaggattgggaggcgcttttggcagtgccttccttcagcaaatttggccatttatcgcttaaggcctgtgaaaaaattctgccctatttggaactgggactcaattacaatgatgcctgtacccaggccggatatgattttcaaggccatagtgctggcgaaaagagcaaatttttgccagctgtggtaccggaatttgaagatatcaccaatcctgtcgtgcggcgggctgtagcgcagagcatcaaggtcatcaatgctttgattcagcgctacgggcaatcaccagcctacgtttctattgagttggctcgggaaatggccaaggattttcaagaacgcagggtactggaaaaagaaatggacaataatcaagcagaaaatgagcgcatcaaggagcgcatccgcacagaattcggcaagaccaatccgacgggactggacatcgtcaagttcaaactctggcaggagcaggacggccgctgtgcctattcgctcaagcccttagaaatccagcggctgtttgatacaggctatgcagaggttgaccatatcattccctacagtcaaagttttgacgaccgctacaccaataaagtgctggtgctgacagcggagaatcggcacaaaggcaaccgcttgcccatggtctatctgaccgcgcaggggcggcaggaggaatttggcgtctgggtcaggcagcagatcaagaacaagcgcaagcaggaggcattgctcaagaccgtcatcacgccagaagaagaagccgcctttaaagaacgcaatctcagcgacaccaagtatatctcccgacttttctacaattttctcaaagatcatctgctgctcacgcccaatctgaccggccgcaaaaagaccatcacagctgtcaatggccaagtgactgcctatatgcgcaagcgctggggcttaaccaagctgcgtgaggacggcgatctgcatcatgcgctggatgcggtggtcatcacctgcataactgatgggatgattaagcgcgtcagtgattacaccaaaggctgccaggagcgttatgtagcggagggcgagcaagtcatcgaccgctatactggcgaagtggcacaccgtttcccactgccctggccggaatttcggcaggaattggatatgcggctttcccgcgatccgcaggcctggctgggggagctgtatctgcccagttatgcagaagttcaggagattgagccggtctttgtctcgcgcatgccgaagcacaaagtcaagggcgcaggtcatatggaaacaatccgcagtccgcgggaattagaggaaggctatgtcatctccaaaaaacccctgaccccgctgaagctggacaaagacggcgagatcgacggttattacaagcccagcagtgatcgcctcctctacgaagctctgcgcaaacaattgcagacctttggcggcaaaggggataaagcttttgctgaacccttctataagcctacagccagcggcgagccaggacccttggtgcgctcggtgaagattcgtgaaaaggccaccttgacggtgcctgtacgccaaggtcaaggcgcagcggccaatggggatatgatccgcattgatgttttctgggtggcaggcgatggctactattttgtgcctatctatacagccgatactctgaaggccgagctgcccaataaagcggtagtagcgcataaggcgtataacgattggaaggaaatgcgcgaggaggacttcatcttctctgtgtaccccaatgatctgttgaaggtcacagccaaaaagccgctgacctggacccgctgcaatgagaagagcacgctgcccaagacacgtcaggagaaggaaagcttctgttactatgtatcggcaagcattagtagtggaacattaacggtcataaaccatgacaaaacctataccatcgcaagtatgggcgtcaagacgctggttaagctggaaaaataccaggtggatgtgctggggcgtcggcacttggtcaaacatgaaaagcgtcagggttttaacacgatgaaacgcgacccccatcaacagttaacaaaccgtttagactaagggagatgaggagatggcttatcgcaatttgatgattaccaatccagcccgtctcagtgtaaagcagaggcagttaatgatcgtgaccgatacagagcggagcgttcctatcgaagatatcttgaccatcatgctggaaaaccagcagatcaccatcactggagcggcgctgagtcagctggctgaggcaggcgtcctcatctatgtctgtgacagccagcacctgccgtcagccgtctttacgccggtctatcagcacagccggcgactgtcggtgctggagagccagctggcggtgtccaagccttaccaaaagcagctctggcagcagatcgtctgtcaaaagatcgccaatcaagccaaatgtctggaactgtgcggcaaagaagcccagcccttatacaatatggtacgggaggtgcgctctggtgataccaccaatgtagaggccgctgcggcaagctactattttatcacgctctttggtcagggttttatccgacgggatggccagctgatcaatggcgccctaaactatggctacagtctgctgcggggactggtggcgcgagcgttggctgtctatggttttgagccctccttggggctgcatcaccacaatgcgttgaatgcttttaatttagccgatgatttgctggaacccttccgaccgttggtggatctgtatgtagccgagcaggcagacttctgggctgaagatgtgtacaccttaagccctgctcataagcaggggctgtatcgtttgctgagcatgaccatgttgtctggaggagaatgtcatgctgtctattatgccgtcgagcgtatcgtcaagagtttgtccacctgcataacgcagggacagggtacactgcttctgccagagctgctgcccttgacggtgcatagctatgagtagattcatgcggatgttggtgtttttcgatctgcccgtacagaccaaaagccagcgcaaagctgcggccaagtttcgcagctttctcctcaacgatggttattatatggttcagtactctgtctatgcccgcgtttgcaacagctacgatacagtggagaagcatcatgctcggctgaaaagcgccatacccaatgacggcgctgttcgtttgttggtcatcaccgagaaacaatatcaaaagatggagatccttctgggcaagcctgccccgaatgacgagcctatgaccaccttccagctagagcttttttgaaaaaacgctgccaacttgctgaaatataatgtgcgagcctaaaaatagacataccaaaaagcccttcaatgcgcagattgaagggcttttggcgttccctagtatatcattccaagaaatataagggaactacaacctccaggcacaatataatattaatggcagtagtatatcattccaagaaatataagggaactacaacaatggataatagatagtatttttcatagtgagtatatcattccaagaaatataagggaactacaactatccgctgtcaatgatttgcaatctccgaagtatatcattccaagaaatataagggaactacaaccatccagtggtgctatctctcccctgctgcagtatatcattccaagaaatataagggaactacaaccccaagcacccaatgactttgtttatccaagagtatatcattccaagaaatataagggaactacaaccatccagtagtcgccatctctcccctgctgagtatatcattccaagaaatataagggaactacaaccccatttgccaaaacaagagaggccacataagtatatcattccaagaaatataagggaactacaacattaattaagatgagggtatcattcgcattagtatatcattccaagaaatataagggaactacaacactgctaatagcagtctttttttatagtttaagtatatcattccaagaaatataagggaactacaacctctattgatagcttcttttcatcgattgcagtatatcattccaagaaatataagggaactacaactgcgctgatatgtatcttaaaatatcgcatagtatatcattccaagaaatataagggaactacaacaataagggcgaggatggccaatatcgtactagtatatcattccaagaaatataagggaactacaaccctgcaaactaatcataatggctgccattgagtatatcattccaagaaatataagagtgctgccgatggatgaagatattgttgaggttagcgtatcatcaggtggtgcggttgtcaagtatcaagaccgataaccttgcgcaaaaatcattgacattctgctggggatggtgtattcttgctttaattaaagagtgcagaacacgatgaaagggagcagtacctttggcgtttttgaagagagccggcggttggtgagagcgggtaaagcgtgaggggaatttccgccttggagtggggtatgacgaataccatcggtcaggagaccgttataaatgtcgagttggcgatttgcaatcgcaatttgggtggcaacgcggagcacttcgtcccatgcggaaggagcgctccttttattttggcgtgcaatctccggggagaaatccccgcaaggaagaaaggaagaactgtcgtgattgatatcaatttgatccgcaagacgccggacgtcgtgcgcgaaaacatcaggaaaaagtttcaggacagcaagctccccctcgtggacgaggtgatcgagctggatcgcaagaaccgcgaggccatgcagcaggccgacagcctgcgcaatcagcgcaaggtgctctccaaggagatcggcggcctgatgaagcagggcaagaaggacgaagccgaggcgaccaaggcgaaggtcaacgagatggccgaggagctggcgcgtctggagcagttggaggaagaatacgccgctgagatcaagaagcgcatgcaggtcatcccgcagatcatcgacccgagcgtgccgatcggcaaggacgacagcgagaacgtagagatcgagcgcttcggcgagccggttgtaccggatt

SEQ ID NO: 4076 - DNA, 6340 bp, synthetic construct
  misc_feature 1..6340: note = Synthetic
  source 1..6340: mol_type = other DNA
ttctcgcgctcgactacgatgccagcgcctcccgcgtcaatcaggagaaccgcatcaagcttatgctggcaacagcaaaatagtgggattaaaaaatcaccaccctatcttttaaatcctttctttgttaattgcaatattttttgtttttacaagcgcttttctttataaaaactcttgattttttatcattttcttttttcttgaaatatttcattgttttacataagtatagcaggatttatatagcctcatctagaattataaaaatatatagtttttgtgatttacaagttgaggcagacgtgttatacttaaatcagtccttataccataccaaggatcatcgggttactatgataaggtaacacaccgaaaagcactaacgccctgccttttggcagggcgttatctttttatccgccctaaacagaaaggatgttgaaaatgaactacgcaatcggtcttgatataggaattgcatctgttggctatgcagttttagctttagatcacgatgaaaatccttggggaatattacgccttggttcacgtatttttgatgttgcagaaaatccaaaggacggagcatcattagcattgccgcgccgagaagcacgcagtgtccgcagacgcctacgtagacaccatcatcgtctagaacgcattaaaaatcttttggttagcagcaaacttataaccaaagacgaacttctacatttattcgatggtaatctgtctgacatatatgctttacgtgttaaagcacttgattattctgtaaccaatactgaactcgcaagaattctattgcatctggcacaaagacgaggtttcaaatctaatagaaaatctgatgccagcgacaaagagtcaggccaacttttagcagcagtttcagcaaatgtaaaacgtatgcaagaaaaccattatcgtactgttggtgaaatgttttataaagatgatttgttttcaaaatacaaacgcaataaaggcggcacatatctcactacagtacatagagatatgattgccgacgaagcaaaagctattattgaaaaacaatttaatctaggcaacagtatttgtactcctacctttatcaaagaatatttatccattctcttaagccaaaggcaatttgatgaaggtcccggtgagcccagtccatatgcaggcaatcaaatagcacgaatgattggcaaatgcacttttgagccaaatgaatatagagcagccaaagcctgctattcttttgaacgttttaacatgttacagaagattaatcatttacgtttgcttattgagggtaagtccatcgcccttgataatgaacaacgcaaaaaaataatagccttagcacacgaaaaagcagatttacgctattcacacatccgtaaagcattaggcttagacgagaaagtattgtttaacaccataacgtataacgaagatgtaaacacaatagaaaagaaaacaaaacttaattttctacaagcatatcatcaaataaaaaaagttttaattaacgatattcagaatcttaccatagaacagcttgataatatcggtcagttactttccacctataaaagtgataacaaacgcatagaggaattaacggcacttggcttagacaagaaaattattgatgctttgcttagcattaatggcttatcaaaatttgcccatctctctcttaaagcgttgcgtaaaataaatccatatctagaagaaggtaaaatttacaacgaagcctgcgccgctgctggctatgattttaaagctcattccaacactcaaaaaactgagcttttacctgcatacaaagaagaaatggatgatataactagtcctgtagcgagaagagccatcgctcaatctataaaggttataaatgctattattcgagaacaaaaagcatctcccatttatataaacatcgaattagcacgtgaaatggcaaaaggctttgatgaacgcacccagattgataaggccaataaagaaaatcatgctaaaaacgatcgtctcatggatcgcatacgcacagaatttcataaagcaaatccaagcggtatggatttaattaaattaaagctatgggaagaacaggatggcagaagtccttatagtcaaaaaccaataagtataaatcgtctttttgaaccaggctatgtagacatagaccacatcgttccttacagcataagctttgatgatagctttaaaaataaagtcctcgttttttcagatgaaaatcgcgacaaaggcaacagactacctataatttacctacaaagtaaatttggtcccaaagcagctgagaagtttatgatttgggttcaaaacaatataaaagattataagaaacgccagaagttattaaaacgagagattacagaagatgatattaataaatttaaagaacgtaatctgcaagatacaaaaactatctcacgttttctttacaattacattaatgattatttgctattcgctccttctgatacaggcaagaaaaaacgagttacagccgtaaacggtactattactgcttatctgcgcaaaagatggggattaaataaaaccagagctaatggcgacaaacatcatgctatagacgcagttgtaattgcctgtacaactgataagatgattaaagacctctcggctttttctcaatatcatgaattggaatatacccatacagccaaggaaagtcttttagttaattccctcactggtgaaatcatcaaacgtttcccttatccctgggaagattttcgtcctgaactaatggcacgcttatctgataatccttctgaagccttacgtaagctaaatttaatattctatcacggaaccgatttaagcaatataaagccaatttttgtttcacgtatgcctcatcataaggttaccggtgcagcacacaaagcaactataaaaagtgcccgttgtttaaataatggtattgtaatttgcaaaactagcctgcaaaatctaaaactagacaaagacggtgaaattgctaattattatgccccagaaagcgatactcttctttataatgctttaaaagaacgcttacgtgctcacgataacaaaccagctaaagcctttgctgaaccattttacaaaccaaaatctgatggtacaccaggtcctttggtaaaaaaagttaaggtttatgaaaaatctaccttaaatgttccagttcagcaaaaaactgccgttgccgataatgacagcatggttcgcgtagatgttttttatgttaagggagatggttattatcttgtgcctatttacatagcagacactctaaaaaaacaacttccaaacaaagcaattgtagcttataagccttacgctgattggcctgtaatgaatgatgataattttattttttcgctatatccttacgatttaataaaatttgaacataaaaacagtgttaaatttgctaaattaaataaagacagcactcttgctgaaacatactcttcgaatagtgaagttgtttactacaaaacaacgaacataacgacaggtgctattggaataattacgaacgataatacttatatagtaaaaagtttaggcgtaaaaacgctctctaagcttgaaaaataccaagtagacgtcctaggtaactatacaaaagtaaaaaaggaagtacgcaagccttttcgttaagaggtgattaaaatggcttatcgtaatttgatgattgccagcaacgcacaattaaaaataaaaaatgagcaacttcttattacaacaaatactactcatagcatacctatagaagatattaattccgttctaatcgaaaaccatcaaagtacgataaccatcgccaccttagccaaattagttcagaacggtgtagcaattttcgtctgtgacgaaaagcatacaccttgtgctataatgatgccttttgcacaaaactccaggcagtacggtgtcactaaattgcaagaaagcctgtctcttccattacaaaaacagctttggcaacaaattgtaaagtgcaaaataaacaatcaagctatttgtttggaattaaataagcaagattcggcagcacagaacttgcgatcattaataaaaaaggtaaacagcggagatagcaataacactgaagccttcgctgccgctgcttattttaaagctctatttggctcaaactttgtcagaagtaatgataatgatccgcttaatgtagccctaaattatggatattcaattataagaggacatatcgcgcgtctaatcgctagctatggatttttacctatgaagggaattcatcacaaaagtgaattgaacgcatataatttagcagatgatttcattgaaccattccgtcctttagttgacctttatgtagcacaagaagcacaaaccattgaagtgttaacacctcaactaaaaaaaatgctctataatcttttaaacatggatatcaagatagctcagcaacatcattccgtggcatatgctgctgaaaaaatgattcaaagcttcagccgctgctgtcaaaaaacaaccaaggaactgcttcttcctactctagtagctttgaggcagcacaaatatgaataaatatatgagaatgctggtttttttcgatatccctgtaaagactaaaagagaaagacgcattgccacagcgtttcgtaattttttgcttaaggatggttaccacatggttcaatattctgtttatgcgcgtgtttgcaacggcatggacgcagtacaaaaacatcgtagcaggctaaattcagctttacctgaaaatggttctgtacgcctattagttataacagaaaagcagtatgaaactattgaaattttagttggcaattatcatgaagatgatacaccatttgtttgtgaacagctttcaattttctaaaaagctaaatttgttgctcgtattgcgctatttacagcattttttctccataataaaaagcccgtgaaactagccttcacgggctttttgtggtggtcgattataccataccaagaaccacaggggaactacaacttgtcggttcaccgattattcttcctgataattataccataccaagaaccacaggggaactacaactcgatgaggttctgcccggcgatactttcaattataccataccaagaaccacaggggaactacaaccgatacttttacgctaaatcctgtggaatttattataccataccaagaaccacaggggaactacaacacttacaatgatgataatttaccaaaagatattataccataccaagaaccacaggggaactacaacttgtcggttcaccgattattcttcctgataattataccataccaagaaccacaggggaactacaactgaacgtctctcttcagcatgttcttcgaattataccataccaagaaccacaggggaactacaactaccgcaagcttttggaaagtgttaaatgcaattataccataccaagaaccacaggggaactacaactggcgatagttatacaagcaatttttgaaaattataccataccaagaaccacaggggaactacaactggcggtaccgctcctgtttattcttacggattataccataccaagaaccacaggggaactacaacctaaattactaacttgatagcgtccctcaaattataccataccaagaaccaccggggaactacaacttgtagctaatgttaccgccgaatttggcgattataccataccaagaaccaccggggaactacaactcaacgccttttgctttgcggtagattttaattataccataccaagaaccaccggggaactacaaccgggctagtgtcattagtgctggatgtctgattataccataccaagaaccacaggggaactacaacgctatcggcaatatcaattgccagatgctgaattataccataccaagaaccaccggggaactacaacgactgatgaaacaggcctgcgtaaaatccaattataccataccaagaaccaccggagaactacaacgtagcccacaaatcacaagccccatagagtattataccataccaagaaccaccgaggaactacaatcctgtatcagttactatcaaatagaataacattataccatatcaagaaacactagggaactaaaactttcaaaaattagcgactctaagccaatacttatgtgacagcaatcccaaaatcagaatcaacagcaaaggagctgtacgccataaggctgcagttcctttttcttttgcggaaagacttgccatatcgcttaattttatttataataaaa

SEQ ID NO: 4077 - DNA, 6016 bp, synthetic construct
  misc_feature 1..6016: note = Synthetic
  source 1..6016: mol_type = other DNA
taagctgatgctggcgacagcaaagtaaaaatttctgaaaatgccaaagttacgaattacctgctgtattttacggtttacagtatattcttgttccggcaggcgattttctttatgaaatatcttaactttttgtttttcattttcgtttaaaatattgtattattttttcataagtatagcaggatttatatagcttcatctagaattataaaaatatattttattttgagatttacaatttgaggcagacgtgttatacttaaatcaatccttataccataccaaggattatcgggttactatgataaggtaacacaccgaaaagctctaacgccctgccatccggcagggcgttatctttttacacgcttaaataagaaaggatgttgagaatgaaatatgcaataggccttgatatcggaattgcatctgtcggctatgccgttttagcattagatcacgaagaaaacccgtggggaattatccgccttggttcgcgtatctttgatgtagcagaaaatcccaaggatggtgcctccttagccttgccacgtcgtgaagcccgcagcgtccgcagacgcctgcgcagacatcatcatcgtttggagcgtataaaaaatcttttgattaacaccgagcttataacaaaagatgagcttttgcatttatatgatggtaatctttctgatgtatacgaattacgtgtaaaggcccttgattattctgtagctaatgcagagcttacacgaattttattacatctcgcacaaagacgtggttttaaatccaacagaaaatctgatgccaacgacaaggaaacaggtcagcttttggaagcagtttccgcaaacgcaaaacgcatgcaggaaaaccattatcgtactgtaggcgaaatgttttataaagatgatttgttctcaaaatacaaacgcaataaaagcggcacctaccttactactgtgcatagagatatgattgctgccgaagccagaactattcttgaaaagcaatttgctctaggcaacgatatctgtactcaagattttatagacaaatatttatctattctcttaagccaaaggcaatttgatgaaggtcccggcgaaccaagtccctatgcaggcaaccagatagccaatatgatcggcaaatgtacctttgaaccgaatgaatatagagcagccaaagcaagctattcttttgaacgcttcaacttgctgcaaaaagttaatcatttacgcctattacttgaaggaaaatccattgctcttgataacgaacagcgcaaaaaaataatagcattagcgcacgacaaggcagatttaagatattctcatatccgcaaagctttaggcttagatgaaaaggtattgttcaataccataacatacaatgatgatgtaagcgtaatagaaaagaaaacaaaatttaattttctccaagcctatcatcaaatcaaaaaagtcttggcagaagatatgcagaaacttacaacagaacaactagacaatataggtcagatactttctacatataaaagcgacaacaaacgtacagaagaactttctgcactaggcttagaaaagaaaattattgatgcattacttggcattaacggcttatcaaaatttgcccatctttctctcaaagccttacgcaaaataaattcttatcttgaagaaggtaaaatttacaacgaagcatgtgctgctgccggttatgattttaaagctcatgccaacacacaaaaaacagagcttttacctgcatacaaggaagagatggacgatataaccagtcctgtagcaagacgagctattgctcaaagcatcaaggtcattaacgctattatcagagagcaaaaatgttctccggtttatattaatatcgaattagcacgcgaaatggccaaaggatttgatgaacgtactcaaattgacaaagcaaataaagaaaaccaagctaaaaacgagcgtattatggaacgtatccgcactgaattccataaagcaaatccaaccggtatggatttaattaagctaaagctttgggaagaacaggatggcagaagtccctatagccagaaagcaataagtataaaccgtctttttgagcctggttatgtagatattgaccacatcgttccctacagcataagctttgatgacagttttaaaaataaggttctcgttttttctgatgaaaaccgtgacaaaggcaacagacttcctattgcttatctccaaagtaaatttggcgcaaaagcagctgagaattttattatttgggtgcaaagcaatataaaagattataaaaaacgtcagaagctgttgaaacgtgaaattacggaagaggatattaataaatttaaagaacgtaatctgcaagataccaaaactatctctcgttttctttataattacattaatgattatctgctgttcgctccttcagatacaggcaagaaaaaacgagttacagccgtcaacggtaccattaccgcttatctgcgaaaaagatggggcataaataaaatcagagccaacggtgataaacaccattctgtagatgcggttgtaattgcctgcactaccgacaagatgattaaagatatttcttctttttcccaataccatgaattggaatatacgcacacagacaaaaaagtctcatagtcaattctctaaccggcgaaattttaaaacgtttcccctacccatgggaagattttcgccccgaactaatggcgcgtttgtctgataatccagccgatgctttacgcaagcttaatttgattttctatcacggaaccgatttaagtaccattaagccgattttcgtatcacgcatgccacgtcataaggttaccggtgctgcgcacaaggcaaccatcaaaagcgcacgctgcctaaataatggtattgtaatctgcaaaacaagcctgcaaaatctgaagcttgataaagaaggggaaatcgcaaactattacgcacccgaaagcgacaccattctgtacaatgctttaaaggaacgcttgcgtgcctatgataacaaaccggcaaaggcctttgccgaaccgttttacaaaccaaaagctgacggcacaccgggtcctttggtaaaaaaggtcaaggtatacgaaaaatctaccttaaatgtcgctgtacagcagaatactgctgttgccgataatgacagtatggtacgtgtagatgtgttccatatcaaaggtgaaggttattatcttgtgcctatttacatagcagacactctgaaaaaagaactgccaaacaaagctattgtagcttacaagccttatgctgattggcctgtaatggatgatagcaactttattttctcgctgtatcctaatgatttaataaaatttgaacatagaaacggtgttaaattcgccaaagtaaataaagaaagcagccttgctgaaacctatttgacaaaaagcgaattggtatattacaaaggaactaatattactgtaggttcaacttctattattacaaatgataattcgtatactgtaaaaagtttaggcgtaaagacactctctaatcttgaaaaatatcaagtagatgtcctaggcaactataccaaagtaaaaaaagaaatacgcaggccttttcgttaagaggtgattaaaatggcttatcgtaatctgatgattgccagcaatgcgcaattaaaaataaaaaacgagcagcttctgattaaaacagatactactcacagtgttcctattgaggatattaattccgtactcgtcgaaaatcatcagagcacgataaccattgccaccttagccaaattagcgcaagacggcgtaacaatttttgtttgcgacgaaaagcatactccttgcgctattatgatgccttttgcgcaaaatgccagacaatacggtgttgttaaattgcaggaaagcctatctctgcctctacaaaaacagctctggcaacagattgtgaagtacaaaataaacaatcaggccatttgtctggaattcaataggcaggacaatgccgcacagcagcttcgttcattggcaaaaaaggtaaccagcggagatagcaataacacagaagccgttgctgccgctgtttatttcaaagctctatttggcccagactttatcagaagtaatgacgatgacctgcgtaacgcggccttaaattacggatacgctattatacgcggacaaattgcacgattgattgccagctatggctttctgcccatgaaaggcattcatcacaaaagcgaattaaacgcatataatttggcagatgatttcatcgaaccattccgtccggtagttgacctgtttgtagcacaagaagcacaagcctttgaagcattaacaccacagcttaagcaaaagctctataatcttttgaacatggatatcaaaatagcacagcaaaatcattctgtggcatatgcagctgaaaaaatgattcaaagcttcagccgctgttgccaaaaaacatccaaggaactgctgcttcctaccttagtagccttgaggcagcacacatatgaataaatttatgcgaatgctggtattttttgatatccctgtaaaaactaaaagagaaagacgcattgctacagcgtttcgtaattttttgctaaaggacggctaccatatggtacaatattcggtttatgctcgtgtctgcaacggcatggatgcagtacaaaaacatcgcagcagattaaatacagctttaccggaaaacggctctgtccgtttattagtcataacagaaaagcaatatgaaactattgaaatattggttggcaactatcacgaaaatgatacaccatttgtctgcgagcagctttcaattttctaaaaaactaattttactgctcatttaatgctagttacattattttttctcataccaaaaagcccttaaagccaagctttaagggctttttgcagtggtctattataccataccaagaaccaccggggaactacaacccaagtttaaaaatgtcctcagaataacggattataccataccaagaaccaccggggaactacaacgaaacagcctacacagagattgactacccgattataccataccaagaaccaccggggaactacaacttaacgtgagctagccagacgctgctttatattataccataccaagaaccaccggggaactacaacctcctttcattttcatgtatgcacgcaagcattataccataccaagaaccaccggggaactacaacgccacgtacaaaaggaaggagaaaatcatgattataccataccaagaaccaccggggaactacaacatcgagttgtttcctgtgttgctctctggcattataccataccaagaaccaccggggaactacaacatgacgaggatatagcaaaactgcttctttattataccataccaagaaccaccggggaactacaaccgcaggtaatcagcttaaccgagaacctttattataccataccaagaaccaccggggaactacaacaatttcggcagccttagcattttcagttttattataccataccaagaaccaccggggaactacaactttagtcaatgcatagtcaataccgtaataattataccataccaagaaccaccggggaactagaaccaacgagagatgctatttgtttttggggcgattataccataccaagaaccaccggggaactacaacgatgaaaaggcgcgtgtatgccgtccacctattataccataccaagaaccaccggggaactacaacatgcacatgtgccttggtcaagtattaccgattataccataccaagaaccaccggggaactacaactcttttctcggatctgctgctggagctgttattataccataccaagaaccaccggggaactacaactggcctgtgtaaccttgtttaatcggcaacattataccataccaagaaccaccggggaactacaactattaatcctcaatt

SEQ ID NO: 4078 - DNA, 4211 bp, synthetic construct
  source 1..4211: mol_type = other DNA
  misc_feature 1..4211: note = Synthetic
aaccgcccgggcgctttttgtggataaattttgcggagtttgtgggtaaaaataggagcggtcaacctgctttgacgagtaccaacacgctgttggttggcactacgatttggtcttgtttggtgggaatgggtgagttcttgtactggcgcagggctttttgagaaagaatttcattgaaaagtgcttgccttttttgcttggctatgctatattgtaaatagttcttataccataccaagaactattatggttactatgataaggtcataggaccgtaaagctctgacgccctgccgtttggcagggcgtcatcttttttgtctgttttttgtcgggttcgtcaattgtcttttgcctcgtcacgcggtatcataggagcaaaaagaagggatgtgtatgtatgaacactgcatatggaattgggcttgacatcggcattgcctccgtaggctgggcagttgtagccttaaacgaggatgccgagccttatggcttgattcgctgcggctcccgcgtgtttgataaggcggagcagcccaaaaccggtgacagccttgctgcctcacgcagagaggcacgcagcacacgccgcaggctgcgtcggcgcagcttacggaaggcggatctatatgccctgatggaaaaaagcggtttacccggcagggcggctgtcgaggaagccgtgctggcagggcatctgcccgatatttacgcgctgcgtgcacaggctttggacggtccggtaaccgccatggattttgccagaatcctgctgcacctgatgcagcgtcggggatttcgcagcaaccgcaaggcggacgatgcccaaaaagacggaaagctgctgcaagccattgacgccaacacgcagcgcatgaaagacaaccattaccgaactgtgggggaaatgatgtaccgtgacccggcatttgccacccacaagcgcaacaaaaccgaaaactatctttccaccgtcaggcgggatcaaattgcatccgaggctgcacagctttttgctgcacagcgccaatacggtgcagcgtgggcatccccggaaacagaggctgaatacctgaccatactgacgcgccagcgctcttttgacgaaggaccgggcggcaacagcccctatggcggcaatatgattgaaaagatggtcggcacctgcacattggagggcacagccgagccgcgcgctgccaaagcaacctggtcctttgaatattttgcgttgctgcaaaaactcaaccatattcgcatagaggaaggcggcaacagtcatcccctgacccatgcacaacggcaggaacttctcgccctgtgctaccaaaccgacaaactggattttgcgcggattcgcaaggtgctggatttgccgccgcaggcgcggttcaatatggtgcgctaccgggccgaccaaccggcggatgcctgtgagaaaaaagagaaaatcaccgccctgccctgctatcacaaaatgcgcaaggcgctgaacactctgcgaaaggattatatcctcacggtgggtcatgaccggctggacgccgccgcaaccgcactgaccctatataaaagcgaggatttgctgcgggaaaagctgcggcaggcggattttgagccgctggagatcaacgcgctgctgaccctgcccagcttttcaaaattcggtcatatttcggtcaaggcgtgccgcaagcttatcccgtatctggagcagggagaaaattacaatgatgcctgccgcgatgccgggtatgattttcaaggcagcggtcacggcgaaaaatccatacttttacctgctgaagcggaggaattttctgacattaccagtccggttgtccgccgggcggtggcacagaccatcaaggttgtgaacgccatcattcgggagcagggcgaaagtcccgtcagcattcatctggaactggcgcgggagatgagcaaaagcttccaggagcgtgcagacctggaaaacgccatgaaggaaaacaatgcagacaacgagcgcttgatgcgtgatctgcacgagcgtttccccgggcgcaacatttccgggcaggatcttgtaaagtaccgcctgtggaaagagcaggacggacgttgcgcctactctttgcagccgttggagttgcaaagcgttatcacggtttccggctatgctgaagtggatcacattgtgccgtacagcatcagctttgacgaccgccgcaccaacaaggtactggtgcttgcctcagaaaatcgtcaaaagggcaaccgcctgccgctgcaatatctgcagggtacaaggcgggacaactttatcgtttacacaaaaaacaacgtaaagaactaccgcaaacgccaaaatctgctgaaagaaaaccttagcgccgaggacagcagcgggtttatgcagcgcaatttgcaggatacccagtatatcgccagctttatgctgaactatatccgcggtcatctggctttttctgcgcatcctatggcaggcaaaaagcgggttgtcgccgtaaatggtgctgtcacttcgtttctgcgcaagcgctggggcattgccaaggtgcgcgcagacggcgatttacaccacgcggtggatgcagcggtcatcgcctgcacgacggacggtatgatccaacgggtgtcgcggttttatcagcggacggaactctcccacgcacggggagagcgcttccccgaaccgtggccgcgttttcgggatgaattgatgcagcgcctgtcgtcctgcccgcaggaaaacctgctgacgatcaatccggtttattataccaccgcggacatagcgggtatcaagccggtgtttgtttcccgtatgccgcgtcacaaggcaaccggacccgcccacaaggaaaccatcaaggggcgcttggacgacacctatgtgacccagcgccgcagcatcaccgacttaaagctgaacaaggacggcgaaattgacggttactttaatcccagcagtgacaccctgctctacaatgccctgaaagagcggctaatcgcctttggcggaaacgggaaaaaggcatttgccgagccattcttcaagccccgcgcagacggcacgccgggtgcgcaggtacgcaaggtcaagctttacagcaaggtcaccagcacggttccggttcacggcggaaacggcgtggctgacaacgataccatggtgcgggtcgatgtgtattatatccccggggacggctactattgggtgccgatttatgtggcagataccgtaaagccgattttgccgagccgtgctgttgttgcttataaaagctgttcggagtggaaggaaatgtccgaggaaaatttcctgttttctctgtgcaaaaacgatctggtttgtatagaaagcaatcatcccataaagctaaaggcagccaacaaggacagcacgctggaaaaagagctgaccgtccgccgggtgcttgcctattttgagggcggcaacatctccaccggcgccgtttccgtaaccacacacgataacgcttatattgccggaagtctgggcttcaagaccctgcaaaaggttgaaaaatatcaggtcgatgttctgggcaattatacccgtgtaaaaaaagaaaaacgccagcttttccccgcccaacggaggtgacgtatgccctaccgctgccttatggttgtcaacccggtctgcatccgatgccaaaaggaacaactgcaattttctgtttatgcgcgggtgtgcaacggaaacgacgccgtgaaaaagcacgagggacggctgcgggcttccctgccgccgaacggttctatacgtctgcttgtcgttaccgaaaagcaataccagtccattcaaattcttttgggaaattatcaaccggaggacgctccctttgcctgtgagcagctgagttttttctaaacaaaaagcgcatcggaccgcaatccgatgcgctttttgcatagcctattataccataccaagagctattaggaaactatgactgtgtgggtggttgtggggggcggtcagcgcattgatatttttgcagctgcaatgcagcggcgcagaaaacggccccatcaccatcggtgcttatggtgatggctgtgcccccatcgacaacgacggacagggcatctggtatcaggattatgggtgcgcgccggactcgcccacccatgtgtatcacggctggggtttccccgccgtgccgccgtgctgc

SEQ ID NO: 4079 - DNA, 3255 bp, synthetic construct
  source 1..3255: mol_type = other DNA
  misc_feature 1..3255: note = Synthetic
cgattttctttatgaaacatcttaactttttgttttgcatttttgcttaaaatattgtattatttttcataagtatagcaggatttatatagcttcatctagaattataaaaatatattttattttgagatttacaatttgaggcagacgtgttatacttaaatcaatccttataccataccaaggattatcgggttactatgataaggtaacacaccgaaaagctctaacgccctgccatccggcagggcgttatctttttatacgcccaaataagaaaggatgttgagaatgaaatatgcaataggtcttgatatcggaattgcatctgtcggctatgccgttttagcgttagatcacgaagaaaatccttggggaattattcgtcttggttcacgtatctttgacgtagcagaaaatcccaaggatggtgcctccttagccttgccacgtcgtgaagcccgcagcatccgcagacgcctgcgcagacatcatcatcgtttggagcgtataaaaaatcttttgattagcaccgagcttataacaaaagatgagcttttgcatttatatgatggtaatctttctgatgtatacgaattacgtgtaaaggcccttgattattctgtaactaatgcagagcttacacgaattttattacatctcgcacaaagacgtggttttaaatccaacagaaaatctgatgccaacgacaaggaagcaggtcagcttttggaagcagtttccgcaaacgcaaaacgcatgcaggaaaaccattatcgtactgtaggcgaaatgttttattctcaaaatacaaacgcaataaaggcggcacctaccttactactgtgcatagagatatgattgttgccgaagccagaactattcttgaaaagcaatttgctctaggcaacgacatctgtactcaagattttatagacaaatatttatctattctcttaagccaaaggcaatttgacgaaggtcccggtgaaccaagtccctatgcaggcaaccagatagccaatatgattggcaaatgtacctttgaaccgaatgaatatagagcagccaaagcaagctattcttttgaacgcttcaacttgctacaaaaagttaatcatttacgcctattacttgaaggaaaatccattgctcttgataacgaacagcgcaaaaaaataatagcattagcgcacgacaaggcagatttaagatattctcatatccgcaaagctttaggcttagatgaaaaggtattgttcaataccataacatacaatgatgatgtaaacgtaatagaaaagaaaacaaaatttaattttctccaagcctatcatcaaatcaaaaaagtcttggcagaagatatacagaaacttacaacagaacaactagacaatataggtcagatactttctacatataaaagcgacaacaaacgtacagaagaactttctgcactaggcttagaaaagaaaattattgatgcattacttggcattaacggcttatcaaaatttgcccatctttctctcaaagccttacgcaaaataaatccttatcttgaagaaggtaaaatttacaacgaagcatgtgctgctgccggttatgattttaaagctcatgccaacacacaaaaaacagagcttttacctgcatacaaggaagagatggacgatataaccagtcctgtagcaagacgagctattgctcaaagcatcaaggtcattaacgctattatcagagagcaaaaatgttctccggtttatattaatatcgaattagcacgcgaaatggccaaaggatttgatgaacgtactcagattgataaagcaaataaagaaaaccaagctaaaaacgagcgtattatggaacgtatccgtacagaatttcataagtcaaatccaagcggcatggatttgattaagctaaaactttgggaagaacaggatggcagaagcccctacagccagaaagcaataagtataaaccgcctttttgagcctggttatgtagatatcgaccacatcgttccctatagcataagctttgatgacagcttcaaaaataaggttctcgttttttcggatgaaaaccgcgacaaaggcaacagacttcctattgcttatctccaaagtaaatttggcgcaaaagcagctgaaaattttatgatttgggtacaaagcaatataaaagattataaaaaacgtcagaagctattgaaacgagaaattacggaagaagatattaataaatttaaagaacgtaatctgcaggatacaaaaaccatctctcggtttctttataattacattaatgattatctgttgttcgctccttcagatacaggcaagaaaaaacgagttacagccgtcaacggtactattaccgcttatctgcgaaaaagatggggtataaataaaatcagaactaacggcgataagcaccatgctgtagatgctgttgtaattgcctgcactaccgacaagatgattaaagatctttcttctttttcccaataccatgaattggaatatacgcacacagacaaagaaagtctcttagtcaattctctaaccggcgaaatcttaaaacgcttcccttatccatgggaagattttcgccccgaactaatggcgcgtttgtctgataatccagccgatgctttacgcaagcttaatttgattttctatcacggaactgatttaaataccattaagccgattttcgtatcacgcatgccacgtcataaggtcaccggtgctgcgcacaaggcaaccatcaaaagtgcacgctgccttaataatggtattgtaatctgcaaaacaagcctgcaaaatctgaagcttgataaagaaggggaaatagcaaactattacgcacctgaaagcgacactattctgtacaatgctttaaaggaacgcttacgcgcctatgacaacaagccggcaaaggcctttgccgaaccgttttacaagccaaaagcagatggtacaccgggtccttaaatgtcgcagtacaacaaaataccgctgttgccgataacgacagtatggtgcgtgtagatgtgttccatgtcaagggtgacggttattatcttgttcctatttacatagcagatacgctgaaaaaagagctgccaaacaaagctattgttgcttacaaaccctatgctgattggcctataatggatgacagcaactttattttctcgttgtatcctaatgatttaataaaatttgaacacaaaaatagcgt

SEQ ID NO: 4080 - DNA, 2899 bp, synthetic construct
  source 1..2899: mol_type = other DNA
  misc_feature 1..2899: note = Synthetic
cactcccctgctaccacaagatgcataaggcactgaataccctgcggaaggatcatatccgcaatatcagccgcgagcagctggatgccgccggagctgcgctgacgaacccggaaaacgaggataagctgcgggaggcattgaaacaggcggagtttgaaccgctggaaatagaagcactgctgacgctgcccagctttgcgggatatggacacatttcggtcaaggcgtgccgcaagctgatcccctatctggaacagggcatgaactataacgatgcctgccaggcagccggatatgattttcagggaaggcaaaacggcgaaaaagcgcagttcctgccggcctcaacggaggaaatggaggatattacaagcccggtggtgcgccgtgcagtggcacagacgatcaaggtcgtcaatgcgatcatccgcgagcagggcgaaagtccggtcagtatccatctggagctggcaagagagatgaataagaacttccagcagcgcagcgagttggacaaggcgatgcgggataacagtgcggaaaatgaacgcctgatgaaagagctgaatgagctttttccgggacgcaccgttacaggaccttgtaaaatatcgtctgtggaaagagcaggacgggcgctgtgcgtattcgatacagccgttggagttggacaaggttattacagtctccggctatgccgaggtagaccacattgtcccctatagcataagctttgatgaccgccgcacaaataaggtgctggtgctggcatcggagaaccgtcagaagggaaaccgtctgccgctgcaatacctgcagggaaaacgacgggacgactttattgtgtacaccaaagcaaacgtaaagaatttccgcaagcgccagaacctattgaaggaaaggctcagcgaggaggacggcaagggctatatccagcgcaacctgcaggatacgcagtatattgcggcttttatgctgaactatatccgcaatcatcttgcgtttgcagactgttccggggcgggcaaacggcgggtcgttgcggtaaatggcgccgttacggcgtttttgcgcaagcgctggagccttggcaaggtgcgtgccgacggcgatctgcaccatgcagtggacgcggcggtgattgcctgtacgacacaggggatgataaagcgggtatctgacttttgcaagcgtgcagagacgacggcggtgcgtaatgagcacttccccgaaccttggccgcacttccgtgatgagctgacgcagcgattgtcagcatgcccgcaggaagacctgatgaagatcaacccggtctattatgcgacggtggatatttcgtctattcagcctgtgtttgtatcgcggatgccgcgccataaggtgacaggtgcggcacacaaggaaacaataaaaagtcgcctggacgatactcatgttgtacagcgtaggaatatcaccgaactgaaattggataaggacggtgaaattgcgggctactttaaccgcagcagcgatacattgctgtacaatgcactgaaggccagattgcttgcctttggcggggatgggaagaaagcgtttgcagaaccgttttacaagccgcgcgcggatggcacacccggggcacgagttcaaaaagtgaagatttgcgataaagtgaccagtacagttccggttcatggtggaaagggtgtggctgataacaacacgatggtacgcatggatgtctattttgtgccgggcgacggctattactgggtgccgatctatgtggcagatacggtgaaattggaattgcccaataaagcggttgtacagggaaaaagctatgcagagtggaaggaaatggacgaagaaaacttcttgttctcactttgccagcatgaccttgtacgcattgaaagcaaacgccttatgaaattcaaggtgcaaaacagagatagtacactggaaaaggaaatgccggtgaacaaaatactggcatactttgaaggcggggatattgcaacgggagctgttacgctgactacacatgatgatgcatatattgcaactggtcttggctttaagaccttgcaaaaggttcagaaatatcaggtcgatgtccttggcaattatacccctgtgaaaaaagaaaaacggcaaaccttccctgcccaacggaggtgaattatgtcctaccgctgtctgatgatcgtgaaccctgcgcgcatccgctgcaaaaatgagcagctgttgattgaaacggaagaagttcactctgtgcccatcgaggacatcagtgccattgtactggaaagccgccaaagcacgatcacaacagcggctatggcggcgctggcacaaaacggtgtggtgactttctggtgcgatgaaatacatctgccgtgcggcatctcgctgccgtttgcacagcacagccgtcagctgggagtactgcgctggcagatggaattgaccctgccggcaaaaaagcggatgtggcagcaggtagtgacagcaaaaattcaaaaccaagcggagtgccttgcactttgcggcaaaacacaggaggcggcgtttctattcgggcgtgccaaggctgtgacgagcggcgacaaagataacgtagaggcaagcgccgcagcgtactactttccggctttatttggtgagggctacacccgccgcaatgaagatacgcgaaatgctgcactgaattatgcctacgcgattttgcggggctatatggcgcgctgcctgacggtgtatggttttcagccatgcctggggctgcaccatgacagcgagctgaaccagtttaatctggcggatgacctgatggagccgttccgtcccgtggcggatttgtacgtggcagcaaatgtggccggggatgcagcattgacacccatac

SEQ ID NO: 4081 - DNA, 23519 bp, synthetic construct
  misc_feature 1..23519: note = Synthetic
  source 1..23519: mol_type = other DNA
gccacgtgcccactcctgatgccattgtcatcgattcgatcagtacccgaacccggcacgcccacgtccagtgggagcattatgcggatgcggatttgaaccgtagcttccatgtcgaagacggcaaagttctcggtaacaaaaacgatagcgggaatttcagcgacgtcttcaaagacggcgattacaggaaagacggcaaggctgcacgcgcctcaattgatgaggtagtcggcaatgcgagggattcagtaggcgacacgaagtttgatgctggacacagcttgcctggcccgctggcacccaatattgggccggaaaactttactccgcagaacccaaacctcaaccgcggttcgctcaaccagttcgagaagttcgtacaaagttttgtcgaaagtcctcaaggtggccatgttcggtatgagtctgcggcacatctcgacgagtttggcattcctacagactacgacgttcacgtgctggcgaaggcgaacgctacgggtgaaaccattgtcgacttcgcgaaatcatttgaaaacactgctggtcgacagttcagtctcaaccccgaaaccttgggtgccactgatcagccagatctgcgtccgagcaatatcgatgaactttttgacgctgctactggtggcaaggacaactgaccgagcaaccacccagctgttgcggcgctgagataccgtggctccgcttcggcaatgttgtctcttccgctttggggcatcaaagcgacgctgtgagaactcgcttctcgcctaggcgatggtcgctagctatcgtcccccgtggcgacttggagaaggtgcctgtaatagcgcaagttcaatgagtgagggaggcgcccgacggatcatttccgccgggcgcctcccctatgcatcaacagtgatgagctcacgccttgagcagcgcgaactcccatccgccaagcttctgctcacctgcacgctcgccttcggcgacgttcgagagaacaacctcggcgcccgccggccatacgtcggaactaagctcaacggcctcgcgcgagaaattggcaacggcgatgagcgaggaggcgtcggacccctcccctgccgtgccagacctgcgcacggcccacacacgcgacaggccggactggcccggcaacccctcgcccatgctttcgaccgggccgagcagctcgaggccgcccgagacgaggagtggctcgctcttgcgcagcgcgatgagggcgcggtagaactcgaaaacggagccgtcgacgcccacctggtcggcggcgttgacgccctcggcggcggaggggttcacggcgatccacggttcgctctcgccgaagccggcaccggaatcaaccgcggcagtccacggcatgggtgtgcgggcgttgtcgcggttcatgtcgctgatgccggggaggagttccgcgaagctgccgtgaccgaactgctcggattcgcgcacgtagttgagcacctcgatgtcgcggaactgctcgaggcgctcccacgggaagttgacctgcccgagttcctggccctggtacacgtacggggtgccgcggtgcgcgtggagcatgcccgcgagcgccttcgcgctgcgcacacgccacgcggggtcatcgtcgccccagcgggacaccgagcggggctggtcgtggttttcgaagtagagggagttccagccgccttcttcggcaacttcgcgatcccagcgggcgaggttgccggcgagctcgtgaagcggcagcgggcgcgacgggttgaacttgtgcccttcgtgctcgagacccacgtgctcgaactggaacaccatttccagttcgccgcgcgaaggtgtggaggtgagcagtgcgtcgtgggcggtgatcccgggggtttcaccgacattgacgaacgtcttggggtagcggtcgaagacctcgcggcgcatttcctgcatgaattcgtggaagcgcgggccggtcatgaccatttcgaaggcggagccgaggccatcctgcgtaggcgggccgtcagggaggccttcgggcttcgagatgaggttgatgacgtccatgcggaagccgtcaacgccgcggtcgagccaccagcgcatcatgtcgtatacggcttcgcggacctcggggttttcccagttgaggtcgggctgcttgcgggagaacatgtgcaggtagaactgctcggtcttctcgtcccactgccagccggggccgctgaaggcggagtcccagttgttggcttcggtgccgcgttcgccgggcttgaggccttcgacttcgcgggcgtcacgccagatgtaccagtcgcgcttcgggttcgtgcgcgaggagcgggattcgaggaaccattcgtgttcgtcgctcgagtggttgacgacgaggtccatgacgagacggatgccgttcgcgtggagcttttcgatgagttcgtcgaagtcgccgagggtgccgaacatgggctcgatgtcgcggtagttggcgatgtcgtagccgttgtcgtcttgcggcgaggggtagatgggcgagagccacacggtctggatgccgagtgcggcgaggtggtcaacatggttgatgatgccgcggaggtcaccgatgccgtcgccattcgcgtcggcaaaggagcgcgggtagatctgatacacgacgccgttcttccaccaatcgggctgatcggcaccgggggcgtgggcaagcgggggcatggagcgaagattgtcgttcatgtctccacggtagtcgagaatttttcttcgcaaaagaaagtcggctggaaagttcgcttttccggtggggctttgagtccgacgcttgcttcgcctcatcgctcccccatcgtgcaccggccaggaccgtcaaaggcccgattgttaccgtgaggccaccagcgcacatcaaccacaggaggtttcccgtgccggcgttttattcagattccgcatccccatcgttctacgcgcttaccgcgattgccgctgctggcgacaccgtcgccctttcgcgcgacccgtacttcgtgagcgcgacgaaccccgctccggagcgcacagtcgcgctcgtgagcggcggcggcgctggccacgagcccatgcacgcgggattcgtggggcgcggaggcctcgatgcggcggtgccgggcgaagtgttcacctccccgcattcgcgccagattttcgaggcgagtcgcgccgtggcgaagagcggcggcgtgctccacatcgtcaagaactacacgggcgattgcatcaacttcaatatcgcggcggagcgcctttcggccgaagggatcgagagcgcgcaggtcctcgtggacgacgatcttggcaccgattcgggcgccgtaggccgccgcggcattgccggcacgaccctcgtggagaaggttcttggcgccgccgccgataagggtcttgggctcgcggaactcaaggaactcggtgacgcgctcgtcgccgcgacacgttcgctctcggtcgctcgccgtgcccacacctcccccggcgctgatcacctcgcgttcgatgtcgaggagggcacgctcgagtacggcgtgggcattcacggcgagagcgcgaaggaaacaatcgcgcagccgacgcttgaagagctcacgcagcgcatgatttccgagttgcgcgaggccctcgccgagaagctcgaggcgagcgcgggcgcgctgctcttcgtcaacggcctcggcggtctcgccccgcttgagctgctgcacatccaaaccgcggcccacgaagcactcgtggaggctggcctcaacgtgcgcgttgccttctcgggcaattacacgacggcgctcgatatggccgggttctcgatcacgctcacggcactcgaggaggagtggctcgagtacgtgtgtgctccacatgagacgtccgcactgcccacgccgcgcctcgtgccggaaggcttcgacgtgcgcgcgggccgcgaggtcgaaaacgggggcgaagacgctgctgaagatgaagcctcggctggggcgaagcaggcgtcggactggctttcggcgttcgtggaaacgtttgagagttcccgcgcggcgctcgatgagatcgaccagaaggccggcgatggcgatgtgggcacgaatctcgcgaacgcggcgaaggcgactctcacgcgcgcgagtgggaaagatgcggatcttgcggccgacctcaattcgattgcggagggtttcctcaacgacacgggaggctcttccggcccgctgtttggcctcgcattccaggaaattgcggcggcggcgaagaacggcacctcacttgtggagggtgtgaaggaggcccgcgcggcggtcacgcgcgtgggtggtgccgagccgggtgatcgcacgatcgtggatgtgcttgaggctgttgcaacgtcgggtgctgagaagctggatgccgcggcgatcggcgccggcatcgacggtgcggagtcaacgaaggagatgtcgagcggtcgcgggcgttcgagctatctcggcgatcgcgtgctcggcacgcctgacccgggcgcactcggcatggcgctcgcgctcgcgctcgtcgcggaggcggcgggtgccgatgtgaaggccgagcgcgaacggctcgcctcgctcatcggttagagccacctgccgttccacttcatcaagaaagtcgctccctccccgcatagcgcgggtggggagcgactttttcttcatcgagagcgacgcgcatcgcgcatgcacgcgccgatctacttggtcgagcctcgcatgacgcccgagatgatccacttctgcgcgaacacgtacacgagcatcatgggcgcgatcgccatgaggtagctcgcgaaggaaaccgggtagttcgtgttgaactggccctggaacacgtactgcgcaagcggcagcgtctgcgagtcggggtcggagaggatcacgagcggcagcatgaagtcgttccaagaccacaggcacgtgaggatgccgaccgtcgcgttcatggggcccatgagcgggaacacgatcttccagaacacggtccacgtcgaggcgccttcgaggcgtgcggcctcttcgagttcctccggcagtgacttcaggaagctcacgtagagcaggatgttcatggcgagcccgtacacggtgtacaggaggatcaggccggcttcattgtcgatgccgagtgcggccgtctgcttcaccacgggcagcatgatgatcgggaacggcacgaagagcgccgccacgaagaagtagtagaggaactggaagctcttgcggtggaggttacgcgcgatcgcgtaggccaccatcgagttcgtgagcagcgtgacgatcacggcgccaaccgtgatgatcgcgctcgtcatgaggcgtttcgggaactcggtgaggcgccaggcctccacgaagttgtcgaggttccactggttcggcaggccgaagccgctctcggcgagctcgggcgccgttttgaacgcggtcaccaccgcgaagtacagcggcacgaggatcgtgagggaaagaacggccacgagggcggtcgcccaccagttggtgcggtggaggcggtagcggcgcttgttgcgctgggattttccgacgcttgccccgcccttctcgatgctttcgttcgtgggtgtttctgcggcacccggggtgggaatcgactgggtactcatgtcagttgacctccttcgactggaggaatcgcagctgcgcaaacgacagcacaatgaggatgatgaagtagatgacgccgttcgccgtctggtaggcgaattcgccgccctggaagccgttcttgaagatcaaaaatgagatcgactgggtggcggtgccggggccgcccttggtgagggcaacgacctggtcgaagacgccgagggagttcttgaagctcagcacgacgttgatcgtgaagaacggcatgatgagcgggaaggtgattttccagaactgcttccacttgttcgcgccgtcgagcgaggcggcttcgtagacctcttcgggcacggtttgcaggcccgagatgtagatgagggtcgtgaaggcgacgccttgccacacgcccacgaacacgatcgcgagccacgcgaggctctcattggcaagcagcgaggaggagagccattcccaaccgagccactggccaatcagcggaatgttgttcgtgaacaggtagctgaagatgtacgagacgatcagcacgggaagcatgtacgggaggaagaagattccgcggaagaggttcttcgccttgatcgccgagttcagtaggagcgcgagaaccatcgcgatgacgttcgtcgcgagtgtcgaggagatcgcgaagaggaacgtgaagccgtagcttccccagatcacgtcgtcctggaacaggaacttgtagttgtcgaggcccacgaagcgccagtcgccgtagccctggtagttcgtgaacgtgtagaagatgccctggatgaggggccatacgagcagggccacgaagatgatgatcgcgggaatgaccatccacacgtgggcgggatcgattcgcttcttttttgagcgaagtaccggcgcggagccggattttgtgtgcgttgcagacacggtggcttctccttacgccgtcgcggccatgcgcttcgtgaccttgtcccactgcgtgtcgagcgtcttgatgaacgcgtcgatgttgtggtcgatcaggaactgctgcatgtagttgttgaggttcactccctgggggaagttgtggtcggagtaggtcgcgacgaggttgttcgcgaagtagtcctggagcccttggagcgcggggtcatccggctcggtgcccttgagggtcgggtaggccacctgctccttgcagtaggcgagcatgttctcttcccgcatgacgtagcggatgaagtcgagggcttcttcctcgtgctcgggttcgacgcccatcgtgagggccacgtccacgccggaaaccacgcgtgtgtcggcggggtcatcggcgggggtcgcgaaggtgccgaggttgatgtcggggttgtaggagcggatcgcggggatcgcgtaggtgccgtgcacgtagatcgcggctttgccctgggcgaagccctggttaccgccgttgtagtcgacctcgtacttgttcttattgcccatcttggcgatctggttcatcttctcgagcacggggcggaggtcgtcgaaggtcgtgtcgccctcgaggcgcttctggtaccactcggcaacgttcggaaggaagttaccggagatcgacgagaacatgggcgcgccggtccagttgtcgcggaagccccagtagaacgggtccacgccgcccgcggcgaactcttcggccgcggcgatgaggtcgtcccatgttttgggcggctcgatgccgaagtcgtcgaaaatatccttgttgtagatcatgcccgagccgttcgtggagagcggcaggccgttgacctcgccttccgcaccggcgccgaggcttgggaggatctcgccaacggcttcctggacgtcgccgagaaggtcggtcttcgcgaagtcgtagaacacgcccgagcgggcgatcgagccgaagttgtagtcgccgttgatcgaaacgatatcgggcatgttgtttttcacgagtcgcacgcgcagcgccgtgacgttgtcggcctggaagttttggcgcacgtgaacgttgttcgcttgcgcgttgaagttctcgcaaatcgagttgaacaggtcgatggcctcggacttgaactggaagtattcgagcgaggtgccgcccgagttcgagccgccgcatcccgcgagcgcgccgagggtcccgagacccgccatgcccgcgaggaagccgcgacgggtggtggtcgccatggtttctccttgaggtgcgtcttcaatgacccacttattttcgttataaaataaatctccgtcaagcgcattccccgaagtgggaggcaagtcgcgctacaccccgcagcatctggcaaagttgagtaccgtgaacaccccaaccgttcccgagcgcctcacgctcgacacgctcccgccgtcggcgcgccgcgtgtaccttgagctgctccgctacgggccgcttccgcgcacgcagctcgccgagcgcctcggcctgagcgctgcctccctcacgcgcgtcacgaccccgctcgttgaagcggagctcatgctgcagggcgcccccgttccgagcgaggtgggccggcccgcaatccccctctcggtgaacctcacgagcttcgccctcatcggggtatccatcacccacgaaagcctcgtggcgatcgccacggacgcgcgggcgaccgtgctcgactcgcgcacactcaacctcaccgacctgcagccgaacgcggttcttcgcgaagcaggcgccctcatcgctcagctgcgcgcatcgctggccgcctcccaccccgcgctacccgtcgccggaatcggcgtgaacatcggtgcacagatcgacggcgggcgcatcgtccgcgaagccccgttcctcgagtggacaaacgtgcgcgccgcggatcggctcgaagagctcaccggtctccccgttctcatcgtgcatgatctgacctcccttgctgaagcggaaaactggttcggcgcgggccttgaggcctcgaggttcatcgtggtgaccgtcggaattggcacgggctttgccctcgtgatggacgggcgggtgatcacggacgagaacacgggtttcggcacggtcaccgaggccatccggggggccgactggcccgatttgagcggcgctcgccccctcagtgccgaggagtcggcgcgcgcggcccgcaaggttgggcggctcgtgggcacggccgcagcgttcacgatgccgcaggccgtcgtgatttccggcgagggcgcgcggttcctcgcggggaacgaggaggagctcgacgcgggcatcgccgaagtgaggcacgtgagcgcgagcggcctcgacatccagcttcgcgagcacgatttcgccttctgggcgcgcggcgcagcgaccgccgcgatccagtggatcctcggcgtgggcgaggtggccgctcgctagactcgaagcatggctacaaagcgcatggacagcacgcaaagcaacccgagctccctcacctcggaactgatcgtcatcacgggcgcctccgccggcatcggcgcggctctcgctcgacggctcagcgatagcgagtgccgcctgatcctgctcgcccggcgcgaggagaagctcaagccgctcgcgaaggagaccggcgcggcgtactactccgttgacctttcggatgccgacgccgtcgcggaagtgtgcgagaggatcctcgccgagcacggcacgcccgacatcctcatcaacaacgccggctcgggccgcttcctcagcatcgaggagacgagccccaaggaagcgcgcgagcagatggcgctgccgtacttcgcggcattcgacatgacgcgcggactcatcgaaccgatgctcgcccgcggcaccggcacgattttccaaatcaactcccccgtcgcccagatcgcgtggcccggcgccgtggggtatgccgccgcccgctacgccgttcgcggcttcaccgaggctttgcgccaggaccttcacggcactgggatcaacgtgggttcgctgacccccacgcgcgtgcactccgactacttcaaagccaaccccaattccgaaaaacgcgtgcccaaagtcgagctgctcgtgggcacgatgacccccgatgaggttgccgaagccgccgtccacgccctcgaacaccgccccagcaaggactcgaacgccccgtggcgctgggcgctcagcgccccgatcgcgcgcgcaatccccgcgccattcctgtggctttttcgggccacggggcacaagcgcccgcgcggccggatcgggggcaggcttctcgggcggggccgacgcctgccgcgcggctaatcgaacctcacgacaaaagtggcacgcgagcagcacgacacaatgatgatgcagagtcttcgagagttcacctgttatgctcgagccatgtcttgggagagacattgaaataagcggtttcgtatcgcgaattctccagcccctcggttttaccggggggcttcgtttttggctttcgtgcctcatctgcgttgatattcttgagacacactgcagtgctaaacgcaaaggggccatcgtggctgaatgcatttatcgaattggtatcgatgttggcgatcgctacgtcggcctcgtcgccatcgaatttgatgaaaatggcgttcctcttcgttttctcgagaggctcgttgttcaccacgatggcggtctctatcccgttacgggaacgaccccccggtcccgtaaggcagaagcgggcgctgcacgccgcacgcgccgtatgcgcaaacggaagcgccagcgcctgaaggccctcgaccgccaccttgccaaacacggctacccggatgtgcagccacagatcacgccatacgatgcgtggcatgcccgggctcgcctcgtgagcacaaagattgatgatgaggaccagctcaagaacgatctcgctctggcccttcggcacatcgcgcgacaccgcggctggcgcaacccctggaagactctcgcctctacacggaagttgcccgtcccctcggaaactctgctcgcgaaccaggcgcgtgcacgcgaacacttcggtgacgaggtcaatgatttgaccacgatcggccagatcggcgctctcgccgcatctcgtgattacctgctgcgccctcgcaacatcaccgtcaccaagggtgtcaaccagaagaagaacatcaaaagtctcaagaaacagagcgaaaagctactggaaggcaagcatccaactgccccgatcctcggctggcaggtgcgacaagaagaccagatcaacgaggtcgagcgcatttgggcacgacaggagcttccccccgaagagctgtcaacgatcttgacgcttcttttcgcacaagccaagcctcagccccccgaggccggtcgtgacgcgcttcagccggagttgttccgtgcccctattgcctcactggaattccaggatttccgcatcctttccgctatcgccaacctgcgagtgcgcacggagggcggtagacgcctcacgaaagatgaacgtttcacggcctttcagttcatgtcgggctggagggcaaaagagccactttcctgggcggatgtcgctgaagagcttggcctctcgccccatgcactggccgctcccactaccgaaacgaaccagaggctggccttcgccccaacgaaccgcacgctggcagccctcggcacgttcttcaaaagaagaaagatcgatgctcaggcccgcgagtggtggcaaagcgcgagttacgccgaacgcagtctcctcgcccagctcattgcaagcgctacgcctgaaactgaagaacaggcagatgcatcgggactctcggacgttcttctccaatgggatgaagacactgtggagggcctgatggagctcgatctgcagagcggccgcgcggcgtactccactgatacgctcctgcgcttgaacgcgcgcatggaaaacgacggcaccgatttgttcgaatccattcaggcagagttcaacatcgatccgtctcgcctcccccgacctgattgggacgaccaaaccggccaacccactgtggaccgtgttctcacgatcgttcgtcgcttcgtgggcggttgtgaacgcaagtacggaaggccagaatctgtcacggttgagcatgttcgcacgggcctcatgggtgcaaaacagcgctccgagagcattgctgaaaacaaccgcaaccgccaaaataacgatgaaatccgtgaggagctcaaggacgccgggatacgcgaaccttcgcgtctagacgttcgccgccatcgccaagtgaaacggcaaaaagacgcctgcctctactgcggaaccccaatttcccccacgacgtgcgagctagaccatattgttcctcgtcgtggcggtggttcctcgcaaggcagcaacctcgtagctgtgtgccgcgaatgtaacgcttcaaaggcgcaccgcatcttcgccgagtgggcagaggattctcaacgcgagggtgtatccgttaaggaggcaaccaagcgcgtgcggcaatggagcaaggtctctgcctcaatgaagcgtgaggtcacgaggcgcctcaagcaaaagcgcaccgatcctccgatcgacgagcgagacttggcctcaacttcctacgctgccaccgagattacccgccgcattctcggccatttccacgacgaggttccggtcgtggcattcggcggctcgggtacccgtgaagctcgccgcgcaggaagagtcgatcacatcattcgcctgcgcggctcgctggataagtcacgcctggatacgcgccaccacgcgatcgacgccgcggttctcaccctgcagtcgcctgcaatttaccgcgtccttctcacgcgcgtgaacctcaagcgcgaacacgaagttaccggcgaagctcccgagtggcgtgactacgagggagcggatcaggccgaaaaggtgctctaccgccggtggcaaaagaacattgccaccctcgcggaactcatgcgtcaggagatcgaggacaaccgcgttcctgtaacccgcccgatccgtttgcgcaagtctcgtggtgcggttcacaaggacgagattcaaaagccagagaaatacccacccatgctttggggcgagtggaattcaaccgcaattgaccgcgtaatcgatcccgaactccaccttgcgctccgcaaggtttttacctcaacgaaaagcaagaccatcacggttgacgccaccacccccggcttacccgaacggtatcgttccaactctctcattccgctcttcgcgcaagatgcccccgccatgatgtcgccgcgcggcattatcctgattggaaaagcgagacatcacgcccggatactgacgtgggacgaccccaagaagggacctcagctcggcatccaacgcgtattcgcagccgagcttgaggagatgctcaaagacgcgagcagcaacgatctcttcgaagccccaatccccttccacaccatgtcgcaccgcgacctgcagccccaggtccgcgcggctgtggaacaaggcctcaccaggcaaattggttggatcactctcggcgacgaaatcgagatcgacccatcggacttcgcagaagacaccaccaagttcgggaagtttctgcgggagttcccagagaagaactggtcaatcaccggcctaaagaagacccgtacgctggttttgcgcccgctaatgttgagtgcggaaggagtatcccctaccgatagccaactcgcagcagaagtcctcgatcgcggagtggagattcatccgtctatacttctggcagccccgggcacgaatgtcatccgtcgcacgagtctcggcaggccacgttgggattcggggcccgcgcatctacccgaaagcttcaacgtttatgctcgcatgactcagcagtccgtacgggactgaagttggggattctggcatgtcatcaaagtggcgggccttagacctcctcgagttcaaggggttcgtggggcatgaacgtggcgcgctccttgccggcgacacgcccgtcccgcttgacgcagtcgcaacagtacttacttctaggtcaaagggcatcgtggggctacggtctcgttgcggctaccgagcgcttcgacgcgcaggtgatcgtgtgcgattggcggaaccttcccgtcgggatccttcagcatttctcaccggcctcgcgtgtcggagcacgacagcgggcccaagctgctttgaagcagcgcacgaaatacgcggcctgacgccggatcgtgcgagcaaaggtgctaggtcaatcggtcatgctttcagacgtgggcaacattcacgattcccgtcaccttaaagagctctctactctcgttcagccgggcgatagcaccaatatcgagggggccgcagccaagtactactggtcgcgggtgcttccagggtttctcgccgccaagagtccagcgacttcgctaatgttgccttgaactatggatacaccattctgcgcgggtgggttttgagttcgatttgcgcggcaggtcttctcccggggctggggattcaccacggcaatgctgtcaacccttttccgctcgcagatgactttattgaaccgtttaggccagcggtggatagcgccgttgtggggctcgtgaaaaccggggtcgacgagctcaatcgcgatgcgaaaaaacacttgcgggagttctagaactccagtccggtggcatcggtcctcggcttcgcacgcgagtggctgatctatgccaggcctacggtcagttcgcagaacgtgaaaattcgtccttgcgggttccggtctggtctgggaactgagggatggctgatcctgtgtggatgctcgtgatgtttgatttgccaacgaacacgaagagtgagcgccggcatgccaatacgtaccggaaccttctgaaggaccacgggttcgagcgggtgcagtggagcgtgtacgtcaagtactacctcaaccggacttcctcggagttcgacgtgaaggttctatccgccaacatccagcccggcggtaacgttcggattctccaggtagctgactcgcagtgggccaacacgctctactatgagggcgccgagaagaaagctccggagcctgttccggaacagctctcacttttcttctgagcacagaaccttcgcgaatggtgcacggaagggcaaagcgaccttccgtgcaccacatctgagcaagtttcgccacccttgttttccaaccctggccagcggttttaccagttgggaaagtctacaggggttctcgggagagagattgaaactcgtcgcggtacgcacggatggcttcgcaaagtctacaggggttctcgggagagagattgaaactgtgttacgcacaatcacaccttgcatcaaagcctacaggggttcccaggagagagattgaaactcataggcgggaaggtcaccacgcccccaaagtctacaagggttctcgggagagagattgaaaccaagacttagtcaccctcgcatccacggaaagtctacaggggttctcgggagagagattgaaaccctcgaaccgtggctcgcagcagacctcaaagtctgcaggggttctcgggagagagattgaaaccttagtcgcgcttactgtcgaggtgcggaaagtctacaggggttctcgggagagagattgaaactcttcggtgaggtgacgccagccgcgataaagtctacaggggttctcgggagagagattgaaactcgttcttgtagcgaaggtccggggtctaaagtctacaggggttctcgggagagagattgaaacgaaacaaccgacttcacgcccatcaggcaaagtctacaggggttctcgggagagagattgaaaccacacgacagtggttgtttcctccgtctaaagtctacaggggttctcgggagagagattgaaactgtattcgcgttgcgtgatcgtggtgaaaaagtctacaggggttctcgggagagagattgaaacgtgtagagggcgaagtgggtggcggcacaaagtctacaggggttctcgggagcgagtttgaaccgagctaaccattgaaagaatagaaacacaaagtctacatagcttctccggcggggccgacgcttgccgcgcgcgtaagtgttcccctgagtgagcatcgagcacatcgccccgagaaaaagaaaccaacgaagcaggctcactgcactaggttgcggcgcgggcaccaggagactgatcggttgcttcgctacttcagtcgatcggtcgtcctacatgcgaaaagtagtaccggaaacgcgagacaccagatgctcctccgctctagacttcacttatgtcacggctcacattttggagatttggcggccttcccgcagcactggcgctcgccctaggcgctctggcgggatgcacaccaacagcagagcaagctactcctgcgagcactacggacgcgacaccccgcccctccgtcgaaaacgcgactccagagaaggatagcgatcctgccgatcagaaaaaggatccaaacaatcaagctcctccaaaaacagagtccaggaacgtcaccccgggggatccgcactttgcgctagagatactccttggcactcctggcgcaatagaagaccacccaacactgccaagtggggggactgcggagagttatgtttcttccactacgccgttcaaggtcgaatctgtgctagatagcagcggcccccgaacatttcatttttactgcacagaagaagctgctcagttcactttcacaacccaaacaagcgaccttgtgcgctccgggccttgcaccgccagtagggtcgtaagcttcacgcttcccgcaagcgcctataaagacggacaactgatcctcaacatagattcaagcattgctggcacaccggtagaggtgctcacggaaagaaaaagccaataacactcaagattttcctacagccagccctaagcggaattgcagccgtcgctctctcctcatcacatctcgcgactaccacatgaataaacggcattggatttcgttgacgccggggccgagcctcaacgtggacctcgtgcgtaaactcgtgacggagtcctatctcctggttgttgagaaactgcctcgggctcagaggccgatcgccccgagcgtaaaattttcttccataaactagggattgcccgtaccatggttccacgcgcagcgttgcgcacctcctggtaagcggcgccgcacagtgatccctcgaccgcgactatgcacgccctaggagtttttatgcaggtcatcgacatcgtggtggtgatcgcgtacctcatcgcgaccgcctggctcggtttgaagctcagcggaaaacaatcggacgccaaggactacttcctcggcgggcgcgacattccgtggtgggcggtgtgcctgagcgtcgtcgcaacggaaacgagtgcgctgacggtcatcggcattccggtcatgagtttcgtgggcgacatcagttacttgcagctcggctttggctacatcgtgggccgcgtgatcgtcgcctacctccttctcccccggtattacgacggcgagatggtcacggcctacgcctacctcggcaagcgcttcggttcggccacccagaccacggcgggcgtcacgttcctgttcacgcgccttcttgccgacggtgtccgcgttctcgctgctgccattcctctcaagatcattctcgacggcctcggggtgcacacgaactacttcgtcatcatcgtcgtgctcgcggtcgtcacgatcctctatacgttcattgggggcattcgcgcggtcgtgtgggtcgacgtggtgcaaatgtgcctctatgtcgcgggcggcctgctcgcgattatcgtcgtgagctcctcgctcggcttttcgtggttcaccgatgcggtcgaggcaggaaaaacgaacctatttatcctcggcgagaacccgatcagcggcgcatcgggcctcattccgtcgctgcttggcggcaccgtgttcgcgatggcctcgcacggctcggatcagctgatcgtgcagcgcctcctcgcgtgccgtacgaaagcggaagcgcaaaaggcgctcatcgcctcgggcttcgtggtggtcgtgcagttcgcgatcttcctcgtggtggggctcgccctatggggttggtacaaccacgccacacccgccgagcttgggctcacgcgcgacgacgagatcttcccgaagttcatcatcgagggcctgcccgcgggtgtttcgggcctgctcctcgcgggtatccttgcggccgcgatgtcgaccctgtcctcgtcgctgtcggcgctcagctcctcgaccgtcacggatgtcgtcgcgaaactgcgtcgcacgcccatgacgaaggacgacgagctcacaacggggcgcatcgccacgatcgtgtggggtcttttgttcattctccccgcgacgttcttccgcagcgacgaaggcagcatcgtggtgctcgctcttggcatcgcgggcatcacctacggcgggctactcggcgcgttcgtgcttggcatcgtcaacaagcgggcacgcacgctcgatgcgaacatcgcgttcctgtgcgcggtcgccacgaacgcgttcttctttgtgatggagaaatacgtcgtgggcgaggtgtggatagcgtggcagtggtacccgctactcggcgttctcgtgaccctcgcggtcggcggcctgctctctctcaggcattcgagcccggccgaagttgaacccctcgaccgggctgtgtaagtcgccgagcaaagcctcgtttactcgtgagcgccgggcaggtgtgcctgccaggcgagcgcgacctccacgagcgtgaggatcgcaatcacggcgccgccaatgagcatcgccgtgtagctgaagatcgtgctgagcgccgcgaggagcatcggcacgaagaagccaaggtaggcaatcgagtagaacacggcggtgaggccggcaaggtcgtcgggcccggcgaggcgctgaacctcgctgaggccggccacgagcgcgaggccgtagccgcagccgagggtcgcggcggcgatgaggccgatcgtgaggctcgtcgtggaagcggcaccagcagcgaacaccgcgccggtcgccacgatcgccatcgcgatcacggaggcgcgtgcactgcggtgagtgtcgatcctcttgccaacggtttgaatccccacaccgaagccgagggtcacggcggtcatgatgcccgcgaacgcgatcgggtagtcaccggcgcgatccttgagcagagcgggaaggacggcgtaggcggtgccacatgcaccgaaaacccacggggcaacggggagcaccacgcgcaggaagcgtttgtgcgcggccttcggaacgatgagcttcgacatgagcgtctcggcacccgaggcgggttcattctcggcaggaaggtgacctggtttgcgcgtttcgggcgcggtgaagagccacaggccggtcacgaccgtgatgaggatgtgcagcgcatacgaggtgcgggttggccacgggccccactgcgcgaggatcgcggccacgagggcaccggcgaggaagccggtggtgagggcgagcgacgccctgcgggcgcctgcggcggggttggctccggaggcgtcggaaatttccttgatccacgcggtgccgatcgccatcacgagaccgagcgcaaggccgcacaggatgcggccgatgccgatcatgaggggcgagccgggagcaagcatcaacataaggctgccgaggaggctgagcggtgcggcgggcagcagaatcgggcggcgaccgtacacgtcggagaggggcccaccgatcatgagagccgggacgataccgagaacgtaggcaccaagcagaccatcgacgacgaggtcggagaagtgcgagacctcgcgatacatcacgagaagcggggtgaattcgttaccgccccacgcgatcgcgaagatcgacgccgccaccggccaccacgcgccggccgggagatccggcagggggcgcgagtcttcggggagggtttcgggaatcgcttcgagtacgtgggcgtggtccgacgccgggacggccggcatcgaggccgtgtcagtggcgctcactggcttaagtctccttggggtacgagaaatgtggatgggatgcgacttcgctggcgccagctcccctatcttgacgtgagcgccgtacgaaacgctaacctttccccccgttttgtatgtcatttcataactaccaagcgttgcggaatcgccactcccccatcacacggtcccatgccactcgggctaggcttaaggcgtcgtctacgcctaaccggcgcgcccatggaggatctcgtgaacaccgcccccgcattcgtcaccgctgccgtgcgcgacgaaagccgcatccagactcgactgatcgacagggtggccgccgcaagcgacgcctcccactacctcttcacccccgaagcggtcgtgctcgccgatacggcacgcgaggtcgccacgctcctcaaaggcgcgaacgccgccaagagccccgtcgctttccgctcgggcggcacgagcctctgcggccaatccgcgagcccacacatccagatcgacgtgcgccaaaacttccgccacatcgaggttctcgacgagggtacacgcgtgcgcgccggatcgggcgccacagtcgcccaggtcaacgcccgccttcgccgcttcaagcgccgcctcgggcccgacccggcaagcgaggccgcgtgcacgatcggcggcgtcgtctcgaacaactcgagcggcatggcctgcggcaccgaagagaacacctacaaaactctcgaatcaatggtcatggtgctgccgtcgggcctcaccctcgacacgagcgaccgcgagggggccgacgctcgcctgcgcaccgaggcgcccgagattcacgaggggctcttgcgccttcgcgaaagggtcgtgtcgaatcccgaaagcgtgcggatcatccgcgaacgcttcgccctcaagaacacgatgggctacggcatcaacgcgttcctcgatgccgagcgccccatcgacatcctcgaaaagctcgtgatcggaagcgagggcacgctcgcgttcatcgccgaggcgacgttccgcacggtcccgatcccggccctcacgacgaccgcgctcgccgttttctcctcgctcgatgcggccacccgcatcctgcccgagctcgtggactcgggtgcggcgacgctcgaggtcatggactcgacctcgatcgcggtgggccagaaactcgcgcgcgtgcccgagcaaatccagggcttcgcgccgagcacggaagcggcgctcctcatcgagtaccgcgacgatgagcacgaaaaactcgccgcggctcagcgcgccggcgaggagatcctgcgcgcccacgagctgcgctcccccgccgttttctccgaggatccggtcatgcgcggggccgcatgggccctgcgcaagggcctctacgcctccgtcgccggcgcgcgcgaaagtggcacgaccgcgcttctcgaggatgtcgtggtgccgcccgcgaacctcgccgacacgtgcggtgacctgcacgagctgttcgacgagcacggctacgagaactccgtgatcttcggccatgcgaaagacggcaacatccacttcatgctcacggatcgcttcgagagcgacgcggcccgcgagcgcctcggcgccttcaccgagtcgatggtggacgtggtgctcgctcgcggcggcaacctcaaggccgagcacggcacgggccgcgcgatggcgccgttcgtgcatcgccagtacggcgacgaactctacgccgtgatgaaagagatcaagcacctcgtggatcccgcggggatcctcaacccgggcgtgctcatcgagagcgacccgaaggcacacctcgagaacttcaagctcaatcccacgatcgaggtcgaggccgatcgctgcgtcgaatgcggctattgcgagccggtgtgcccgagcaaggacctcacgctcacaccacgccagcgcattgttgtgcgccgcgccgaggagcgtgcgcgccaggccggcgatgaggcaacggccaaggagctcgcaaaggactacgactacgaaggcatcgacacgtgcgccgtggacggcatgtgcgtcacggcgtgccccgtggggatcaacacgggtctgctcgtgaagcgactgcgccgcgaaaacacgaacgcggtcgaatcgggggcgtggaaggccgcggcagcgtcgtggggtgcgatcacgcgcggcgccgcggttgggctctcggtcgcggataaagttccggcgcctgccgtgggggcggcaacgagcgttggccgacgcttgctgggcgaggacaccgtgccgaaatacacgaaggatctgccggccggcgggaaggctcgtggcgccctcggtgagcgcgcagagaatcgggctgtcggctcgaacttgcccggtcgcctgttcggcgcgcccgatggtgaggtcgcgggcatctacgttcccgcgtgcgtcaacacgatgttcggcggggccgcgccgggtggaaacgtcgtctccgcgttcgaaaaactccttgagaaggcgggcctcgcgcttctcatcccgaagggcatcgactcgacgtgctgcggcactccgtggacgtcgaaaggcaaagccaagggacacgaggtcatttcagcgaaaacccgaaaggtcgttgacgccgttcgcgagctcgacctgccgatcgtgagcgacgccgtgagctgcaccgaaggcttcgcggcgatccttgagcgcgacggcgccaaagtcatcgatgccgtgcagttcaccgccgatcatcttcttgagcgcctcgacatcgaccggtcaagcgaacacgtgattctccaccccacgtgctcctcgactcagatggggctcaaccccgctctcacgaaggtcgctgaggctgccttcgcgaaggtcaccgtgcccgacgcgtggggttgctgcgccttcgcgggcgatcgcggcatgctccaccccgagctcaccgcctcggcaacggcagccgaagcagccgaagtgagagccctcggcgccgatcagcacgcctccctcaaccgcacgtgcgaaatcggcatgacccgcgcaacgggaaagacctaccgccacgtgctcgagctgctcgccgagcgcgcgcggtaggccttcgaaagagttgatttaggcggcgccgcgctcgagaaggaacgcgcgcagctcggcgagattatcggcgcccacgacgtcgatgcccgcatcgagctgcatctgccacaggatctcgcgacgcttgggcagaagctcgggaacaccccacaggcgcgagcgcgcgccgatcgcgtgggcaccgtcggaaaactccttgagcgaacggaactgttcctccgggcgctcgccgaagccctgccagccccacgttgcccaatcctccgagatgagtggcatgtcaagcgggctgatctcgcccccgaggtcgcccttgtggccgtcggccgaaccgaaccgctcggggttgtccttgatgagatcgtacggacggccacccgtgtagacgacgcgcacgggattctcgacaacctcaccgcagcggttcacgtgccagaacacgtcgctgtagggagcaagcagcttctcgatcgcgggcagctgcttctccccctggtctttgatgtcgatgaggagctggaacgggccgtcgtagccggggaacacgtgaccgccgttggagcgcacgagcgccgcgagcggcttcacgtaatactcctcgagggagcggccgctcagcacaccgaggcgggtgtggccaaggaggatctgcccgccctcgaaccacacgtccgcctcgacagagcaaaagccctgttcaagcgcatc

SEQ ID NO: 4082 - DNA, 23426 bp, synthetic construct
  misc_feature 1..23426: note = Synthetic
  source 1..23426: mol_type = other DNA
tcctaacgtttcgaacgctctcgaccaaccggacgtgcgaaagcgtgcaattgatgctttgtttgacgcgattgtgaacgatggaaagagttagcagggggcacttgcaactttcttttacacattcacccttcatggagctatagcgcaggtcacgcacgagtgacaaatcagctgcaaataaagccagtctctcaccaagatcatgcttcgatagcgcacaattagcgcctttgatccagttagatattcgctttaagctgattctctcagcgcctagcggaagcatcttcatcgcagcgagaccaaatagcttttgatatagcaaacggaggcgcccgacggatcatttccgccgggcgcctccgttcttcatcaacgatgagaagctcacgccttgagcagcgcgaactcccatccaccgagcttctgctcaccggcgcgttcgccttcggcgacgttcgacagcacgacctcggcgccttcgggccacacgtcggaactaagctcgacggcctcgcgcgagaaattggcaacggcgatgagcgaggaggcgtcggacccctcccccgcgctgaacctgcgcacggcccacacacgcgacgggccggactggcccggcaggccctcccccatgctttcgaccgggccgagcagctcgaagccgcccgagacgaggagtggctcgctcttgcgcagcgcgatgagggcgcggtagaactcgaaaaccgagccctcgaccccaacctggtcggcggcgttgacgccgtcagcggcagaggggttcacggcgatccacggttcaccctcaccgaagccggcaccagaatcaaccgcggcagtccagggcatgggtgtgcgggcgttgtcgcggttcatgtcgctgatgccgggcaggagttcctcgaagctgccgtgaccgaactgctcggattcgcgcacgtagttgaggacctcgatgtcgcggaactgctcgaggcgctcccacgggaagttcacttggccgagttcctggccctggtacacgtacggggtgccgcgatgcgcgtggagcatgcccgcgagcgccttcgcgctgcgcacacgccacgcggggtcgtcgtcgccccagcgggacacggagcggggctggtcgtggttttcgaagtagagggagttccagccgccttcttcggcgacttcgcgatcccagcgggcgaggttgccggcgagttcgtgaagcggcagcgggcgcgacgggttgaacttgtgcccctcgtgctcgaggccgacgtgctcgaactggaacaccatttcgagttcgcgacgctcgggattcgaggtcaagagcgcgtcgtgggcggtgatgcccggggtttcaccgacgttcacgaacgtcttggggtatcggtcaaacacctcgcggcgcatctcctgcatgaattcgtggaagcgcgggccggtcatgaccatcgcgaaggcggagccgaggccgtcctgcgtgggcgggccgtcggggaggccttcgggcttcgagatgaggttgatgacgtccatgcggaagccgtccacgccgcggtcgagccaccagcgcatcatgtcgtacacggcctcgcggacttcggggttttcccagttgaggtcgggctgtttgcgggaaaacatgtgcaggtagaactgctcggtcttctcgtcccactgccagccggggccgctgaaggcggagtcccagttgttgggttcggtgccgcgctcgcctggcttcaaaccttccacttcgcgagcatcacgccagatgtaccagtcgcgcttcgggttcgtgcgcgaggagcgggattcgaggaaccattcgtgttcgtcgctcgagtggttgacgacgagatccatgacgaggcggatgccgttcgcgtggagcttttcgatgagttcgtcgaagtcatcgagggtgccgaacatcggttcgatatcgcggtagttggcgatgtcgtagccgttgtcgtcctgcggcgaggggtagatcggcgagagccacacggtctggatgccgagtgcggccagatagtcaacatggttgatgatgccgcggaggtcaccgatgccgtcgccgttcgcgtcggcgaacgaacgggggtagatctgatacacgacgccgttcttccaccagtcgggttggtcggcgccgggggcgtgggcaagcgggggcatggggcgaagattgtcgttcatgtctccacggtagtcgagattttttctccgcaaaagaaagcctgtgggaaaacgggatttttatcggcggggttgtgtcggctggggttttccggccgggctttccggctgggttttgcggtggggttttcggtccgacgcttggcgctcctcagcgcaccaccgttcctcacggtgagccctcgcgccagttgagctcctcgacgccatcagcagcgatcaatcgccgattgttaccgtgaggccaccagcgcacatcaaccacaggaggtttcccgtgccggcgttttactcagattctgcgtccccatcgttctatgcgcttaccgcgattgccgcagcggcaggtgacaccgtcaccctttcgcgcgacccgtacttcgtgagcgcggcgaagcctgctccggaacggaccgtcgcgctcgtgagcggcggcggcgctggccacgaccccatgcacgcgggattcgtggggcgcggaggcctcgatgcagcggtgccgggcgaagtgttcacctccccgcattcgcgccagattttcgaggcgagccgcgccgtagcaaaggacggcggcgtgctccacatcgtcaagaactacacgggcgattgcatcaacttcaatattgcggcggagcgcctttcggccgaagggatcgagagcgcgcaggtcctcgtcgatgacgatcttggcaccgatgcgggcgccgtgggccgccgcggtatcgccgggacgaccctcgtcgagaagatcctcggcgctgcggcagactcaggcctgagcctcggcgaactcaaagagctcggcgatgcgctcgtggcagccactcgctcgctctcggtcgcgcgccgcgcccacacctcccccggcgctgatcagctcgcattcgacgtgaacgcgggcgagctcgaatacggcgtgggcatccacggggaaagcgcgaaggaaacaatcgcgcagccgacgcttgaaaagctcgcgcagcgcatggtttccgagctgcgcgaggccctcgccgaaaagctcgaggcaagcgcgggcgcgctgctcttcgtcaacggcctcggtgggctcgccccactcgagctgctgcacatccaaaccgcggcccacgaggcactcgccgatgcgggtgtgaatgtgcgcatcgccttctccggcaactacacgacggcgctcgacatggccggcttctcgctcacgctcaacgcgctcaacgaggagtggctcgagtacgtgtgcgcgccgcacgacacggtagccctgccctcgccgcgtctcctcccggacgacttcgacgtgcacgcaggacgcgaggccgaaaacgcgggcgaaggcgatggtgaacatgaggcgtcggaatggctgacccggtttgtggagacgctcgcacactcgcgcgcggcgcttgacgagatcgaccagaaggctggcgatggcgacgtgggcacgaatctcgcgaatgcggcgaaggcgacgcttgcgcacgcgggcggggcggatgccgatctcgcgtcggatctcaattcgatcgcggaggggttcctcaacgacacgggcggctcctccggcccgctgtttggcctcgccttccaggagattgcggcggcggcgaaggatggccgcacgctcgtcgagggtgtgaggcaggcccgcgccgcggtgacgcgcgtgggtggcgcggagccgggcgatcgcacaatcgtggatgttctcgaggcggttgcgggctcgggagctgaggaccttgacgccgcggccattgcggcgggcatcgatggagcggagtcgacgaaggacatgtccagtggccgtggccgctcgagctacctcggcgatcgcgtgctcggcacgcccgacccgggggcgctcggcatggcgcttgctctcgccctgattgcggaaggcgcgggcgcgaatgtcgaggctgagcgcgagaggctcgccgctctcatcggctgatcccgccccgccgccggggcttcggtcgtcatccgcggcgcggcggcgcggcgcggcacacggtaccgcccgatggttcaccggccaaaccgttccacttcataaagaaagtcgctccctccccgcacagcgcgggtggggagcggctttttcttcatagagagtgacgcccacgaacaagaacagggcccacgagcaggaccagcgccgcacgttcgaacgtgcggcgggcggcactgcggggcgacggggcggcggggcggtgcggcggaaccgggtgcggcggcgcggcggctaacccgttccacttcataaagaaagtcgctccctgcccgcacggcgcgggtggggagcgactttttcttcatcgagagtgacgggctccaatgagcgcgagcctcctcgaacccgaactacttggtcgagcctcgcatcacgcccgagatgatccacttctgcgcgaacacgtacacgagcatcatgggcgcgattgccatgaggtagctcgcgaaggagaccgggtagttcgtgttgaactggccctggaacacgtattgcgcgagcggcagcgtctgcgaatcgggatcggagaggatcacgaggggcagcatgaagtcgttccacgaccacaggcacgtgaggatgcctaccgtcgcgttcatgggggccatgagcgggaacacgatcttccagaatacggtccacgtggaggcgccttcgaggcgtgcggcctcttcgagctcttcgggaagcgacttcaagaagctcacgtagagcaggatgttcatcgcgagcccgtacacggtgtacaggaggatcaggccggcctcgttgtcgatgccgagggcagccgtctgcttcacgacgggcagcatgatgatcggaaacggcacgaagagcgccgccacgaagaagtagtagaggaacttaaagctcttgcggtggaggttccgtgcgatcgcgtacgccaccatcgagttcgtgagcagcgtgacgatcactgcgccgaccgtgatgatcgcgctcgtcatgaggcgtttcgggaactcggtgaggcgccaggcctccacgaagttgtcgaggttccactggttcggcaggccgaagccgctttcggcgagctcgggtgctgtcttgaacgcggtcaccaccgcgaagtacagcggcacgaggatcgtcagggaaagaacggccacgagggcggtcgcccaccagttggtgcggtggaggcggtagcggcgcttgtggcgcgggggttttccgacgcttgctccgcccttctcgatgctttcgttcgcgggtgtttctgcggcacccggggtgggaatcgactgggtactcatgtcagttgacctccttcgactggaggaatcgcagctgtgcgaacgacagcacgatgaggatgatgaagtagatgacgccgttcgccgtctggtaggcgaattcgccgccctggaagccgttcttgaagatcaagaacgagatggattgggtggcggtgccggggccaccctcggtgagggcaacgacctggtcgaatacgccaagggagttcttgaagctcaacacgacgttgatcgtgaagaacggcatgatgagcgggaaggtgattttccagaactgcttccacttgttcgcgccgtcaagcgaggcggcttcgtagacctcttcgggcacggtttgcaggcccgaaatgtagatgagggtcgtgaaggcgacgccctgccacacgcccacgaacacgatcgcgagccaggcgaggctctcgttggcaagcaacgaggaggagagccattcccaaccgagccactggccgatcagcggaatgttgttcgtgaagaggtagctgaagatgtacgagacgatcagcacggggagcatgtacgggaggaagaagatcccgcgaaagaggttcttcgccttgattgccgagttcagcaagagcgcgaggaccatcgcgatgacgttcgtcgcgagcgtcgaggagatcgcgaagaggaacgtgaagccgtagcttccccagatcacgtcgtcctggaacaggaacttgtagttgtcgaggcccacgaagcgccagtcgccgtagccctggtagttcgtgaacgtgtagaagatgccctggatgaggggccacacgagcagggccacgaagatgatgatggcgggaatgaccatccacacgtgggcgggatcgattcgcttctttttcgagcgtagtgccggcgcggagccgggctttgtgtgcgttgtagacacggtggcttctccttacgccgtcgcggccatgcgctttgcgaccttgtcccactgcgtatcgagcgtcttaatgaacgcgtcgatgttgtggtcgatcaggaactgctgcatgtagttgttgaggttgactccctgcgggaagttgtggtcggagtaggtcgcgatgaggtcgttcgcgaagtactcctggaggccctggagggccgggtcgtcggtctcggtgcccttgagggtcgggaaggcgacctgctccttgcagtaggcgagcacgttttcttccttcatgaggtagcgcatgaaatcgagggcttcttcttcgtgctcgggctcaacgcccatcgtgagggccacgtccacgccagaaaccacgcgcgtgtcagcggggtcgtcggcgggggtcgcgaacgtgccgaggttgatgtcggggttgtaggagcggatcgcggggatcgcgtacgtgccgtgcacgtagatcgcggctttgccttgggcaaaaccctggttcccgccgttgtagtcgacctcgtacttgttcttattgcccatcttggcaatctggttcatcttctcgagcacggggcgaagatcctcgaaggtcgtgtcgccctcgaggcgcttttggtaccactcggcaacatccggcaggaagttgccggagatcgacgagaacatgggggcgccggtccagttgtcgcggaagccccagtagaacgggtcgacgccgcccgcggcgaactcttcggccgcggcgatgaggtcgtcccacgtcttcggcggctcgatgccgaagtcgtcgaaaatgtctttgttgtagatcattcccgagccgttggtggaaagcggcagaccgttaacttcgccgtcggcacccgcgccgaggctcgggaggattgcgccgacgccctcttgcaccttgtcgaggaggtcggttttcgcgaagtcgtagaacacgcccgagcgggcgatcgagccgaagttgtagtcgccgttgatcgagacgatgtcgggcatgttgttcttcacgaggcgcacgcgcaacgcggtcacgttgtcggcctggaagttttgtcgcacgcggacgttcttcgcttgcgcgttgtactcctcgcaaatcgagttgaacaggtcgatcgcctcggatttgaactggaagtattcgagcgaggtgccgcccgaggttgagccgccgcatcccgcgagcgcgccgagggtcccgagacccgccattcccgcgaggaagccgcgacgggtggtggtcgccatggtttctccttgaggtgcgtctgcaatgaccctattattttcgttatacaataaactcgcgtcaagcacagaccgaatcgaggcgatcacaccaacgacccctcgcgcgcccccagcgcggatcaaggagtccatcaacgcccccgattccgcaccccgccccacccctcccatctggcaaagttgagtaccgtgaacaccccaaccgttcccgagcgcctcgcgctcgacacgctcccgccgtccgcgcgccgcgtgtacctcgagctgctccgctacgggccgcttccgcgtacgcagctcgccgagcgcctcgggctgagcgccgcctccctcacgcgcgtgaccgcgccgctcgtcgacgccaagctcatgctccagggcgcccccgttccgagcgaggtgggccggcccgcaatccccctctcggtgaacctcacgagcttcgccctcatcggggtatccatcacccacgaaagcctcgtggcgatcgccacggacgcgcgggcgaccgtgctcgactcgcgcacgctccgcctcaccgacctgcggccgaacacggttcttcgcgaagcaggcaccctcatcgctcagctgcgcgcatcgctggccgcctcccaccccgcgctgcccgtcgccgccatcggcgtcaacatcggagcgcaaatcgacggcggccgcatcgtccgcgaagccccgttcctcgagtggacgaacgtgcgcgccgcggatcggctcgaagaactcacgggccttcccgtcctcatcgtgcatgacctgacctcccttgccgaagcggaaaactggttcggcgcggggcttgaggcctcgaggttcatcgtggtgaccgtcggaattggcacggggtttgccctcgtgatggacgggcgggtgatcacggacgagaacacgggtttcggcacgatcacgggcgccatccggggcgccgactggcccgatttgagcggcgcccgccccctcaccgccgaggagtcggcgcgcgcggcccgcaaggtgggccggctcgtgggcacggccgctgcattcacgatgccgcaggccgtcgtgatttctggcgagggcgcgcggttcctcgccggcaacgaggaggagctcgacgcgggcatcgccgaagtgaggcacgtgagcgcgagcggcctcgacatccagcttcgcgagcatgatttcgccttctgggcgcgcggcgcagcgaccgccgcgatccagtggatcctcggcgtgggcgaggttgccgctcgctagactcgaagcatggctacaaagcgcatggacagcacgcaaagcaacccgagccccctcacctcagaactgatcgtcatcacgggcgcctccgccggcatcggcgcggctctcgctcgacggctcagcgatagcgaatgccgcctgatcctgctcgcccggcgcgaggagaagctcaagccgctcgccgctgcgaccggcgcggcgtactaccccgttgacctttcggatgccgacgccgtcgcggaggtgtgcgagaggatcctctccgagcacggcacgcccgacatcctcattaacaacgccggatcaggccgcttcctcagcatcgaggagacgagccccaaggaggcgcgcgagcagatggcgctgccctatttcgcggccttcgacatgacgcgcggcctcatcgaaccgatgctcgcccgcggcagcggcacaattttccagatcaactcccccgtcgcccagatcgcgtggcccggcgccgttggctacgccgccgctcgctacgccgttcgcggcttcaccgaggctctgcgccaggaccttcacggcaccggaatcaacgtcggttcgctgacccccacgcgcgtgcactccgactacttcaaagccaaccccaattccgaaaaacgcgtgcccaaagtcgagctgctcgtgggcacgatgacccccgacgaggttgccgaagccgccgtccacgccctcgagcaccgccccaacaaggactcgaacgccccgtggcgctgggcgctcagcgccccgatcgcgcgcgcaatccccgcgccattcctgtggcttttccgggccacgggccacaagcgcccgcgcggccggatcgggggcaggcttcttgggcggggccgacgcttgccgcgcgcctaacggctcccctcggtgagcatcgcggtacgcggcattcgaaacgcgcgcattccggaccattcgaatcccaacctgctatgctcgaaccatgtcttgggagagacattgaaataagcggtttcgtaccgcgaattctccagcccctcggtttaccgaggggcttcgtttttgctttcgtccctcacctgcgttgatattcttagatcacactgtcgtgcaaaacgcaaaggggccatcgtggctgaatgtatttatcgagttggtattgacgttggtgatcggtccgtcggcctcgtcgccgtagagttcgatgaaaatggcgttcctctgcgttttctcgagaagctcgtcgttcgccatgatggcggtctcgatccagatacgggcaaaacccctcaatcccgcaaggcaacagcgggcgttgcacgccgcacgcgccgtatgcgcaaacggaagcgccagcgcctgaaggccctcgaccgctaccttgccgaacacggctacccggatgtgcagccacagatcacgccatacgatgcgtggcatgcccgggctcgcctcgtgagcacgaaagttgatgatccggcccagctcaagaacgatctcgctcttgcccttcggcacatcgcgcgacaccgcggctggcgcaatccctggaagactctcgcctccacaaggaaattgcccgtcccctcggaaactctgctcgcgaaccaggcgcgtgcacgcgaacacttcggagacgaggtcaatgattcgaccacggtcggacagatcggcgcgctcgccgcatctcgtgattacctgctgcgccctcgcaacatcaccgtcaccaaaggcgtcaaccagaaaaagaatgtccatgatctggagcgaagtagcgaagaggctctcgctgctggacaccccactgctcccattctgggttggcaggtgcgtcaagaagaccagatcaacgaggtcgaacgcatttgggaacgccagggactcccatctgaggaactcccacaaatcctcacgcttctgtttgcccaaacgaagccacacgtgccgagcgaacgagttggtcgcgatgctcttcaaccgaagctctaccgtgctcccatcgccgcattggaattccaggatttccgcatcctggctgctatagctaacttgcgtgtgcgcacggacggtggccgtcgcctcacgaaggatgaacgcttcacggcctttcagttcatgtcaggctggagagaaaaagaaccactttcctgggccgatgtcgctgaagagcttgccctctcgccccatgcattggccgctcccaccaccgaaacgaaccagaggctggccttcgccccaacgaaccgcacactgacaaccctcggcacgttcttcaaaggtaagaagatcgatgctggagcccgcgagtggtggcaaagcgcgagttacaccgaacgcagtctcctcgcacagctcattgcggacgcgacacctgacactcaagaacaggcggatgcatcgggactcgctgacgttcttctgcaatgggatgaggacaccgtggccgacctcatggagctcgatctacagagcggtcgcgcagcgtactccaccgacacgctcctgcgcttgaacgcgcgcatggaaaacgacggcaccgatctattcgagtcgatccaagctgagttcaacatcgatccgtctcgcctcccccgacctgattgggacgaccagaccggccaacccaccgttgaccgggttctcacgatcgttcgtcgcttcgtcggcggttgtgaacgcaagtacggaaaaccagaatctgtgaccgtcgagcatgttcgcacgggtctcatgggtgcagaacaacgttctagcatcattgctgaaaacaaccgcaaccgccgagatagcgaccgcatccgcgcggagctccaggcggacggggtaagcgaaccttcgcgcctagacgttcgccgccatcgccaagttcaacggcaaaattgcacctgcctctactgtggaactccgattaccaccacgacgtgcgagcttgaccatatcgttccccgtcgtggcggtggttcctcgcaaggcagcaacctcgtggcggtatgccgcgaatgtaatgcctcgaaggcacaccgaattttcgcggagtgggctgaagaaactcaacgcgagggtgtatccgttaaggaggcaagcaagcgcgtgcggcactggctcaacgcctctgcctcaatgaagcgcgaagtcacgaggcgcctccagcaaaagcgcaccgatcctccgattgacgagcgtgacttggcctcaacttcctacgctgccaccgagattacgcgccgcattctcggccatttccatgacgaagttccggttgttgccttcggcggctcgggtacccgtgaagctcgccgcgccgggagggtcgatcacatcattcgtctgcgcggctcgctggataagtctcgtctcgatacgcgccaccacgcgatcgacgccgctgttttgaccctgcagtcaccggcgatctatcgagtgcttctcacgcgcgtaaacctcaagcgcgaacacgaaatcaccggcgaggcgccagagtggcgcgactacgagggggcggaccaagccgaaaaggtcctctatcgccggtggcaaaagaacattgccaccctcgcggaactaatgcgtcaagagatcgagaacaatcgcgtcccggtgactcgaccaatacggttgcgcaagtctcgcggtgcggtgcacgatgcgaccgtcatgaaagctcttgaacgtgacctgtggggcgagtgggacgcaaaagcgatcgatcgcgtcgtagaccccgaacttcatctcgcgctccgcaagctctttacctcaacgaagaacaaaaagatcaacgttgacgctacctcgcaagaactgccggaacgctacctcgcgaatcagaccgtgcagctcttcgatgctgacgcaccatcagtgatgtcaccacgtggcattcttcgtatcggagcaggaacgcatcatgcccggctcctgacatgggacgaccccaagaagggacctcagctcggcattcagcgcgtattcgcagccgagttcggtgagattctcaaagacgcaagcggcaacgatctcttcgaagcgtccatcccctttcacaccatgtcgcaccgcgacctgcagccccaggtccgcaaggctgtggaacacggccttaccaggcaaattggatggatcactcagggcgacgagcttgagattgatcccgctgatttcgtaggtgaagctaacgcttttggaaattttctccgcgagttcccagaacgtagctggtctatcgcaggactaaaaaagagcaacacgatcgtgatacgcccgcttcttcttagtcaagagggagtgacagcggcgattagtccacatgctgccaaaattgtcgagaatggaatagaacttagcaactctacgctctttaccgcacccgggacaggaatcatccgccgcacaggtctcggccggccacgttgggattcgggacccgcacatctgcccgagagcttcaatgttcgggcccgcatgactcagcactctgcccgggactaacgttggagattcgggcatgtcgtcgaagtggcgggtcgtagacctcctcgagttcaagggtttcgtggggtatgagcgtggcgcgctccttgttggcgacacgccggtcccgcttgacgcagtcgcaacagtacttttaggtcaaaaggcatcgtggggctacggtctcgttgccgctgccgagcgcttcgacgtgcaggtcatcgtgtgcgactggcggaaccttcccgtcggtatccttcagcatttctcgcctgcttcacgcgtaggtgcacgacagcgagcgcaagccgctttgaagcagcgcacgaaagacgcggcctggcgccggatcgtgcgagcgaaggtgctagggcaatcagccttgctttcggaagtgggcaacattcacgattcccggcaccttaaggagctctctacgctggttcagtcaggggacagcaccaatatcgagggggcggcagcaaagtactactggtcgcggctactccctggcttcaggcgccggcaggactccggagatttcacaaatgtcgcacttaattacggttacacgattcttcgcggctgcgttctgagttcgatttgcgcggccggtcttttgccggggctcgggatccatcacggcaatgctgtcaacccatttccgttggctgacgatctcatcgaaccgttcaggccagcggtggatagcgccgttgtggagcttgtgagagttggattcgatgagctcaatcgcgatgcgaagaaagcactagctggggttctggagcttcaggtcggtggcaacggtcctcggcttcgcacacaagtggctgatctttgcctggcctacggtaagttcgtagaacgtgagagttcgtccctgcgagttccgatctggtctgggagctgagggatggctgatcctgtgtggatgctcgtgatgtttgatttgccgacgaacacgaagagtgagcgccggcaggccaatacgtaccggaaccttctgaaggaccacgggtttgagcgtgttcagtggagcgtgtacgtcaagtactacctgaaccggacctcgtcggagttcgacgtgaaggtgttatccgccaacatccagcctggcggtaatgttcggatcctccaggtggccgactcgcagtgggccaacactctttactatgagggtgccgagaagaaggctccagaacctgttccggagcagctctcacttttcttctgagctgcatgagtgggcgaatgatgcacgggaggcccgactggccttccgtgcaccacagttgagcatgtttcactacccttgaattccgtctctgaacagcggttttgcctgttgagaaagtctacaggggttctcgggagagagattgaaacatcacctgctcgcacaccaccggagcggaaagtctacaggggttctcgggagagagattgaaacatctctcaagtcggtcgttcatgcgttcaaagtctacaggggttctcgggagagagattgaaacctacgagatcgagttcaccacacacgaaaaagtctacaggggttctcgggagagagattgaaaccgggtgatgttcggtcgtgggagcgtgcaaagtctacaggggttctcgggagagagattgaaacgaggggaggtccactgacgttccaagagaaagtctacaggggttctcgggagagagattgaaacgtagtggccgctgttagcggtttcgcgaaaagtctacaggggttctcgggagagagattgaaacaagaaatcggtgtggtactcacccaatgaaagtctacaggggttctcgggagagagattgaaacgtcgattatcggcgggtacaagccgttcaaagtctacaggggttctcgggagagagattgaaactcgcgttatgttccaagtgtttcacgctaaagtctacaggggttctcgggagagagattgaaacaatcatgccttggatcatgttgcggcctaaagtctacaggggttctcgggagagagattgaaacggggttgtcgttttccgttagcccgcagaaagtctacaggggttctcgggagagagattgaaacgcggcttcgagtgcttcgcgtgcggtggaaagtctacaggggttctcgggagagagattgaaactcaccttgatgcagccccctccaccaacaaagtctacaggggttctcgggagagagattgaaactgtcttttgaaccaatcttctagcgccgaaagtctacaggggttctcgggagagagattgaaactagttggtacggcggtatctcgagcgggaaagtctacaggggttctcgggagagagattgaaacagagcctcgacgttcgaccgatcgaccgaaagtctacaggggttctcgggagcgagtttgaaccgagctaaccattgaaagaatagaaacacaaagtctacatagcttctcgggcggggccgacgcctgccgcgcgcgtaagtgttcccctgagtgggcatcgagcatatcgccccgagaaaaagaaaccaacgaagcaggctcactgcactaggttgcggcgcgggcaataggagactgatcggttgcttcgctacttcagtcgatcggtcgccctacatgcaaaaagtagtactggaagcgcgagacaccaggcgctcctccgctctagacttcacctatgtcacggctcacattttggagatttggcggccttcccgcagctttgacgctcgcgctaggcgctctggcggggtgcacaccaacagcagagcaagctactcctgcgagcactaccgacgcgacaccccgcccctccgtcgaaaacgcgactccagagaaagaaagcgatcctgccggtcagaaaaaggatccacagagccaagcccctccgaaaacagagtccaggaacgtcaccccgggggatccgcactttgcgctagagatactccttggcgctcccggcgcaatagaagatcacccaacactgccaagcggggggactgcggagagttatgtttcttccactacgccgttcaaggtcgaatctgtgctagatagcagcggtccgcgaacgtttcatttttactgcacagaagaagctgctcagttcactttcacaacccagacaagtgaccttgtgcgctccgggccttgctccgccaatagggtcgtaagcttcacgcttcccgcaagcgcctatagagacggaaaattggtcctcaacatcgattcaagtattgctggcacgcccgtggaggtactcacggagaggaaaaaccaataacactcacgaatgtcatacagccagcctaagcggaattgcagtcgtcgccctatcctcatcatatctcgcaactaccacatgaataagcggcattggatttcgttgacggcggggccgagcctcaacgagaaccttgtgcgtgaactcgtgacggagtcctatctcctggttgttgagaaactgcctcgggctcagagaccgatagatccgagcgtaaaattttcttccaaattttagggtttgcccgtacgatggtttcacgcgcagcgttgcgcacctcctggtgagcggcgcacagctgtttctcttgaccacgactatgcacgccctaggagtttttatgcaggtcatcgacatcgtggtggtgatcgcgtacctcatcgcgaccgcctggctcggtttgaagctcagcggaaaacaatcggacgccaaggactacttcctcggcggtcgggacatcccgtggtgggcggtgtgcttgagcgttgtcgcgacggagacgagtgcgctcacggtcattggtatcccggtcatgagtttcgtgggcgacatcagctacctgcagctcggcttcggctacatcgtgggccgcgtgatcgtcgcctacctccttctcccccggtattacgacggcgagatggtcacggcctacgcgtacctcggcaagcgtttcggttcggccacccagaccacggcgggcgtcacgttcctgttcacgcgccttcttgccgacggtgtccgcgttctcgctgcggccattcctctcaagatcattctcgacggcctaggggtgcacacgaactacttcgtcatcatcgtcgtgctcgcggtcgtcacgatcctctatacgtttatcggcggtattcgcgctgtcgtgtgggtcgacgttgtgcagatgctgctgtatgtcgcgggcggcctgctcgcgatcatcgtcgtgagttcgtcgctcggcttctcgtggttcagcgatgcggtcgaggccggaaaaacgaaccttttcatccttggcgagaaccccatcagtggcgcgtcgggcctcattccgtccttgctcggtggcaccgtgttcgcgatggcctcgcacggttcggatcagctgatcgtgcagcgcttgctcgcgtgccgaacgaaggcggaggcacagaaggcgctcatcgcgtcgggcttcgtcgtggtcgtgcagttcgcgatcttcctcgtggtggggctcgcgctgtggggctggtatgaccacgcgacgccggcagcgctcggccttactcgcgatgacgagattttcccgaagttcatcatcgagggcctgcctgcgggtgtttcgggcctgctccttgcgggcattcttgcggcggcgatgtcgaccctgtcgtcatcgctttcggcgctcagctcgtcgaccgtcacggacgtcgtggcgaagctgcgtcgcacgcccatgacgaaggacgacgagctcacaacggggcgcatcgccacgatcgtgtggggtcttttgttcattctccccgcgacgttcttccgcagcgacgagggcagcatcgtggtgcttgctcttggcatcgcgggcattacctacggtgggctgctcggcgcgttcgtgctcggcatcgtcaacaagcgggcacgcactctcgatgccaacatcgcgttcctgtgcgcgatcgccacgaacgcgttcttcttcgtgatggagaagtacgtcgtgggcgaggtgtggatcgcgtggcagtggtacccgctgctcggcgtgctcgtgacgctcgccgtcggcggtctgctctcgctcaggcattcgagcccggccgaggttgaacccatcggccgggaggcgtagcccgccgggcgcagcgtcgcttactcgtgcgcgccggggaggtgtgcctgccaggcgagcgcgacctccacgagcgtgaggatcgcgatcacggcgccgccgatcagcatcgtcgtgtagctgaagatcgtgctgagcgccgcgaggagcatcggcacgaagaagccgaggtaggcgattgagtagaacacggcggtgaggccggcgaggtcgtcgggcccggcgaggcgctgaacctcgctgaggccggccacgagcgcgaggccgtagccgcagccgagggtcgcggcggcgatcaggccgatcgtgaggctcgtcgtggaagcggcgccggcggcgaacaccgcgccggtcgccacgatcgccatcgcgatcacggaggcacgcgcgcttcgatgcgtgtcgatcttcttgccaacggtttgaatacccacgccgaagccgagggtcacggcggtcatgatgcccgcgaacgcgatcgggtagtcaccggcgcggtctttgagcagtgcgggaagaacggcgtaggcggtgccgcaggcgccaaacacccacggcgcaacgggaaggacgacgcgcaggaagcgcttgtgtgcagccttcggcacgagaagcttcgacatgagcgtctcggcacccgaggcgggctcgttctcggcaggaaggtggccgggtttgcgcgtctcgggcgcagtgaagagccacaggccggacacgatcgtaatgaggatgtgcagcgcgtacgaagtgcgggtcggccacgggccccactgcgcgaggatcgcggccacgagggcgccggcgaggaagccggtggtgagggcgagcgacgccctgcgcgcgcctgcggcggggttggctccggaggcgtcggaaatttccttgatccacgcggtgccgatcgccatcacgagaccaagcgcgagcccgcagaggatgcgaccgatgccgatcatgaggggcgagcccgggccaagcatcagcataaggctgccgaggaggctgagcggtgcggcgggcagcagaatcgggcggcggccgtagacgtcggagagggggccaccgatcatgagagccgggacgatgccgaggacgtaggcgccgaggaggccgtcgacgacgaggtcggagaattgcgagacctcgcggtacatgacgagaagcggcgtgaactcgttgccaccccacgcgatcgcgaaaatcgacgcggcgaccggccaccaggcacccgcgggaaggtccggcagggggcgcgagtcggcggggagggtttcgggggtcgcttcgaggacgtgggcgtggtccgacgccgggacggccggcatcgaggccgtgtcagtggcgctcactggcgtgggtctccttggtgtgtacgacagatgtgggtgggggtgcgacttcgccggcgccagctcacctatcttgacgtgctcgccgtgcgaggcgctagcctttcgacccaatttgtatgtcatttcataactaccgagcgttgcggaatcccctgtggagccaccccaccgcacgatcccgccccacccgggctagggttaaaacgttgtctacgcccgccgggcgcgcctatggaggatctcgtgaacaccgcccccgcattcgttaccgctgccgtgcgcgacgaaagccgcatccagactcgactgatcgacagggtggccgcagcaagcgacgcctcccactatctcttcacccccgaagcggtcgtgctcgccgatacggcacgcgaagtcgccgcgatcctcaagggcgcaaacgccgccaaaagccccgtcgccttccgctcgggcggcacgagcctctccggccaatccgcaagcccgcacgtccagatcgacgtgcgccaaaacttccgccacatcgaagtcctcgacgagggcgcgcgcgtgcgagccggatcgggcgccacaatcgcgcaggtcaacgcgcgccttcgccgcttcaagcgccgcctcggccccgaccccgcaagcgaggccgcgtgcacgatcggcggcgtcgtctcgaacaactcgagcggcatggcctgcggcacggagtacaacacctacaaaaccctcgaatcgatggtcatggtgctaccgtcgggcctcaccctcgacacgagcgaccgcgagggggccgacgctcgcctgcgctccaacgcgcccgacatccacgagggcctcttgcgccttcgcgaaagagtcgtatcgaaccccgagagtgtgcgcatcattcgcgagcgctttgccctcaagaacacgatgggctacggcatcaacgcgttcctcgatgccgaacgaccgatcgacatcctcgaaaagctcgtgatcggaagcgaggggacgctcgcgttcatcgccgaggcgacgttccgcacggtgccgatcccggcgctcacgacgaccgcgctcgccgtgttccccacgctcgatgcggccacccgaatcctgcccgagctcgtggactcgggggcggcgacgctcgaggtcatggactcgacctcgatcgcggtgggccagaggctcgcccgcgtgcccgagcaaatccagggcttcgcgccgagcacggaggcagcgctcctcatcgagtaccgcgacgatgagcacgaaaaactcgccgcggctcagcacgccggcgaaaacatcctgcgcgcccacgagctgcgctcccccgccatcttttccgaggatcctcgcatgcgcgcgaccgcatgggcgctgcgcaagggcctgtacgcctccgtcgcgggcgcgcgcgaaagtggcacgacagcgctcctcgaggacgtcgtggtcccgcccgcgaacctcgccgacacgtgcggtgacctgcacgagctgttcgacgaacacgggtatgagaactccgtgatcttcggccacgcgaaagacggcaacatccacttcatgctcaccgaccgcttcgagagtgacgcggcccgcgagcgccttggcgccttcaccgagtcgatggtggacgtggtgctcgctcgcggcggcaacctcaaggccgagcacggcacgggccgcgcgatggcgccgttcgtgcatcgccaatacggcgacgagctctacgccgtgatgaaggaaattaagcgcctcatcgaccccgcggggatcctcaacccgggcgtgctcatcgaggacgacccgaaggcccacctcgaaaacttcaagctcaaccccacgatcgaggtcgaggccgatcgctgcgtcgagtgcggctactgcgagccagtatgcccgagcaaggacctcacgctcacgccgcgccagcgcatcgttgtgcgccgcgccgaggagcgtgcccgcaacgcgggcgatgcggccacggcggatgagctcgccaaggactacgactacgaaggcatcgacacgtgcgccgtggacggcatgtgcgtcacggcgtgccccgtggggatcaatacgggacttctcgtcaagcgactgcgccgcgagaacacgaacgctgtcgaatccggcgcgtggaaggccgcggcagcgtcgtggggtgcgatcacgcgcggcgccgcggttgggctctcggttgcggataaagttccggcacctgccgtgggggcggcaacaagcgtgggccgacgcttgctgggcgaggacaccgtgccgaaatacacgaaggacctgccggccggagggaaggctcgcggcaacctcggcgagcgcgcagagcatcgggctgtcggctcgaacctgcccggccgcctgttcggcgcgcccaatggcgaggtcgcgggcatctatgttcccgcgtgcgtcaacacgatgttcggtggggccgcgccgggtgggaacgtcgtctccgcgttcgagacgctcctcgcgaaagcgggccttgcgcttctcatcccgaagggcatcgattccacgtgctgcggcaccccgtggacgtcgaaaggcaaagccaaggggcacgaggtcatctcagggaagacccgaaaggtggtggacgcggtgcgagagctcgacctgccaatcgtgagcgatgccgtcagctgcaccgagggcttcgcggcgatccttgagcgcgacggcgccgacgtgatcgacgccgtgcagttcaccgccgatcatctccttgatcgtctcgacatcgaccggtcaagcgaacacgtggttctccaccccacgtgctcctccacgcagatgggcctcaaccctgcactcctgcaggtcgccgaggccgcctacgcgaaggtcaccgtgcccgatgcgtggggttgctgcgccttcgcgggcgatcgcggcatgctgcaccccgagctcaccgcctcagcgacggcagccgaagcggccgaggtcaaggctcttgacgccgaccaccacgcctccctcaaccgcacgtgcgaaatcggcatgacccgcgcgacgggaaagacctaccgccacgtgctcgagctactcgccgagcgcgcgcggtaggccttcgaggttattccttaggcggcgccgcgctcgagtaggaacgcgcgcagctcagcgaggtcatcggcgcccacgacgtcgatgcccgcatcgagctgcatctgccacaggatctcgcgacgcttgggcaggagctcgggaacaccccacaggcgcgagcgcgcgccgatcgcgtgggcaccgtcggaaaactccttgagtgaacggaactgatcctccgggcgctcaccgaagccctgccagccccacgtctcccaatcctccgagatgagtggcatgtcgagcgagctgatctcaccgccgagatcacccttgtggccgtcggccgagccgaaccgcaccgggttgtccttgatgagatcgtacgggcgacctcccgtgtaaacgacgcgcacgggattctcgacgacggtgccgcagcgatccacgtgccagaacacgtcgctg

SEQ ID NO: 4083 - DNA, 23156 bp, synthetic construct
  source 1..23156: mol_type = other DNA
  misc_feature 1..23156: note = Synthetic
ctcagacccgccgccgacgatgttgtctgcgagattggttgcggcaccgcccgtaacctgatcaaactagcccagcattacccgtataattatttttgcggcatagatgcctcagatgaaatgttaaaaacagcccagagcgcgctggataaaaacaaccttcaggatagcgtgacagttaaacaaggatttgcacaatcctttgaccctgtagccttattttcattgaaaaaacccgtcgataaatttgttttttcttatgcattatccatcatccccccttggaaagaatcatttgaccatgctttggatctattagaaagcggcggggaaatacacattatagatttcggatcacaatccggcctcccccgtccatttcgtgcactcctgttctggtggctaaagatgttccacgtgtattacaaaccagaaattgaagcgcaccttcacgcgttaaaagattcaggcaaaggcaccttaaaactgcaccacctttttggcggttatgcctattacgccattttcaagaaacattaaaagcctcttttttcatattgccgtattctccgccttatggtaatacgtacccatgaaatctccattacgcaccatattcaaagcactggccaggcccggtatacatatgccccatgatgggcgcacaccgcaactgttgctgtgcggagcaaaaccaattggtttcctggagaatcacgaagaacaatataaagaaactcttgaaaaagccgtcgcaaaaggacaattgctgcgccatgaattttcacgtcaatctatggcttctgtctgcatttatcaaaagcccggtattagccctgagctcccaactattgaaaacttacaaacagacgctcccatatttgccctccccttaaccgataaagccaaagaggatatgcaaaattcctacatcgactactcatccattctcgcccgtttagcaagaaacgagattgacagcgttgccatcaatcaaaaatggatcgaacacggttggtctgctgatttcattcaagcaatcaaacaaaaggcaatggaaggcgccctcataaaatttcagcacgaatttatgcaaacgtggccttcattaacaatatacggccaacttgaccagcttgagaatataaaacgtctcgtagaagaaattagaaaatatgacaaggccccggatgccccgcaagatagagaattagaagggcgcttgcctggatacagcgataacgatatatcactgaatgcacgagacaatagctgggtcatgaacaaaaccgaaccgttacgcagatactgcaggcaccagcttatgcttgatgcaggcccgcaatgggatcgaaacttttaatacggcctggttatagattcacgagcacaaatctatactttataaagcacgaaacctgccatattctatagactctggtatttatatttatgcccaactatttttggaaacatagaatatccagccacagcctcaggcggggtttcctgttccgtgatccagttatagagatccggatcattttcttccagcagcgcctcatattcccgcaattcctgttcattgaattccggcacatgttttttggcaaaacttccaagcagcaaatccatctctttggttccgcggtgttcagaacggaaaatcaaacgtttgcgcatattatcaatggtatcattcatagacgtcattttaatcacaaaacaacgtagcacaatgagtaattgctatatttgaaaaaactctgttcctgccagcatgcaacgtttatattttgtgcatgtcacaacgcccttttatattggatccgctttttcgttcactgaccgccctgcccggtgttggcccaaaaaatgccaagttatttgaaaaattactcggcggccccaaggttctggacctactatttcaccttccgattgactttattgaccgccggttttcgccaaaaatcaaagatgcgcccaatggccgtatcgcgacaatggaaataacagtcggcaaacacttccccaatgcacgccgttcggcgccataccgcgtacaatgcagcgatgaaaccggaacactcaacgtcacctttttccatgccaataaagactggatcaaaaaacaactgcccgagggcgcgcaacgcatcatcagcgggaaagttgaatattatcaggggcaagcacaaatggttcaccctgatatagcgccaccagaagaaagagcctcccttgaagccgtggagcccgtttatccgctcacacaaggcgtaaccaataagaccttacgtaaagccatggacggcgccataggctttgtgcagcccctgccagaatggtgcgacaacgaatacaaaaagcgcaacaactggccggactggcacagcgccgttcatgatgtccaccacccgccgggcgcaaacggcatggaccccaaccacccggcacgcgcccggctagcctatgatgaattgttgtcaaaccagctgacgctggcgcttgtacgagaccgccagcgcaagaaggcaggccgcacctttaacgggacaggggagctccgctcaaaagttacagccgccctgccctttgaacttactggcgcgcaaaaacgcagcctagatgaaatcgatagcgatatgtccgcaccatataaaatgttaaggctgttgcaaggtgatgtcggtagcggaaagaccatcgttgcggcttttgccatgctgcgtgccatcgaaagcggggcgcaagccgcattaatggcgccaaccgaaattctagcgcggcaacattacgaggggctaaagccctatctggagacagcaggcgtgcgggccattattcttacgggccgcgacaaaggcaaagcccgcgataccatgctggcacaaatccgtaacggcgcagcgcaagttataattggcacccatgccatattccaggacgccgtcacgttcaaggatttaggtctggccgtcattgatgaacagcaccggtttggcgttcaccaacgccttgccctgtcggaaaagggaaaaggaacagacgtactggtcatgacagcgacccccatcccgcgtacgcttaccctgacagcttatggcgatatggatgtcagccgtttggacgaaaaaccgcccggacgcaagcctgtagatacacggctaattccttcggaaaaaatcgaaaacatgattgccggtttaaagcggcaaattaataatggagcccgcgtatactgggtttgccccctggtggaggaatcggaaaaaattgaccttgccgcggcggaagagcgctatgacattttaaaacatttctttggcgccgataacatcggtcttatacacggccgcatgaaaggcgaagaaaaagatgctgccatggcaaaatttataacaggggagacatctatccttgtggcaacaaccgtgattgaggttggtgtaaatgttcccgaggctaccatcatggtgatcgagcatgcggaacgttttggcctatcccaattgcatcagcttagagggcgtgttggtcgcggcgccgacaaatcctactgttttttactatatcacggcccgctaggcgagacagcaaaagaacgccttgccactatgcgagaaacagaagacggcttcgtcattgcggaaaaagacctacaactgcgcggcgccggcgatattcttggaacgcgacaaagcggtattattgaattcaaattagccatcccttccgaacatgcagaattaattgcggccgcccgtgatgatgcacgtctgattattgataaagaccccaagctggaaagtaagcgggggcaagccttaaagacgctactttatttattcgaacgcgatcaagccattaaatatttaggcagcggatgactaacactgcaaatgaatatcagccctcgtaagggactaaaaataaggcttcggcctcacacatcatataaccggaatcgtagttttgatgatcatcggatatatggcagatatagctttgcagtccaattatcgcatgaacactattgttggttggcgccactaatgcgcaagactgggcggaggatttcacgctgccaccgtcagtatccttaaatatacaatatttttttccagcaactgggcgcgccgagtgcccttctggcctaaaacgaaccaaacgcccccggccaatattgccctcttcaaaatcatattcaaaaatctgcatcaacgcatcacgtgcgctttgctctggtgtatcaccgacgccgcgcactggccgtaactcaacgaccgtttgattcaggctcacctgaaataaatctttaaatattttaaagaatggcatgcattcatacgtcacataatgatccgcaatcaaacatacgctgcgaccataaacgctctgaaaatctacgtcaggaaagttttttcttacaaaggcctctgccgtgcctccacataagactttttccaaattccaaccggttgccatgattatattctagcatagcgatagttaatggggcgtgaattaaatcacccaatcttcaaccgatggcataccataagctccagcaccccggccatccttgcaaatcaccttggccggaataccaatggccgtacaaccgttgggtatatcctgcaccaccacagaatttgaccccactttagcattggccccaatcgtaatatcaccaagtatttgtgcgccggagccaaccataaccccatcttccaaagtgggatggcgtttaattttatgaccgtttttccccacaccgccaagtgtaacaccgtgatatagcgtaacatcatcgccaataatagccgtttgcccaattacacaaccagtgccatgatcaatgaaaagacgttttccgatctgtgcttgcggatgaatttcaacgcctgtgaagatgcgggccagatttgaactaaaccgcgccaacgcacgtaaaccgagccgccataaaatatggctcaggcgatgccagcatacggcgtgaaaaccattataccccagaaacacttccataaagcccggctctatcgggtctcgcgattgtatggaacggatatggtcaaacatacttatcgtcttatttcttatcttgtttgacgcgcgctgccttttctggcttttcctttttggaaggtttggcaactttagcagccttggccgttttcgcagcctcaacagccttgcgttttgccgccacctccacagggtcaggcggcgtaataataccggcagacacaaccagcttaatggcttcttcgacgctcatttccaggtattttagttcactcctcggaacaaacaataaataaccagaggtgggatttggcgtcgttggcacaaaaacattgatggtttcattttccgttatgcgctggacctccccttctgtgcggccagttacaaacccgatggaccagacgccctttcgtggatattccagcataaccggctcccgaaaggcctgcgatttactggccataacggtttcaaatatttgtttggtcgcattatatagcgttcgaataatcggcatacgattaacgataaattcagaggcccgaataaacaggcgcccaaagaaatttgtggcaaaccagcccacaaaaataaaaaacaatatggcgataagaagacccagccccggcatggtcgtcccgccatagaccccttcatatgattccttcggcagaacccttgcaaccgtgctatcgataaaattcagaaaaatgtaagtcaggtagattgttatactgatgggcgcagccaccaaaatacctgccaggaaatatccgcgcaaacgctggccaaatgtgcgtccaccattcacatgatcttcaaccacgctttcagtggttgttctgttttccgcagctttaatatcctgtttatccatatccgcatcatgtgacgcatagcaaaaaaaagcaagagcgtatcaaaggcacttgcccaatattatggcttttagcaccggttactaacgctgcaatgccggacgggctagtgttttcacatccatttcaaattcatcaacggcaactatgcgagcctgcgctttacgggcttgcgtcacaatctcttgctcttcggccgtataatcgcgcttttgctgtgtaacatctcgaataataacggccgcctttgtccatttttccaatgcgtcatcgaacgccgccaaggtctccgcagccgggtctgtcggacgatacacatcttttgtcagggttgcccttatatcacatggacgcgttattgtattggctacgcgatgctccagatagtcatttggtttccagcgtcgtgaacggaattgataaaacggaaagatagaagcgcgcataatttcgcccaatattctatttggagtggtcaccttgtcttctgccccatccgctagtttgaactttttcgttttacggttaggataatttctgagaaagtcatcaaaggcctcctcagccttataaagacaaaaccgcacagaccattgcagtaaatcatgttcatccttctggcgtccattggcttcatattcacttaaagtgcaggcagcaatatacatatagctcatgacatctcccaagcgcccggctgtacgcccccttgccatcaggcctttctgtaaatgcataatcgacatattggtcgccatctgcatggatttactcatgcggttaatgtgacgataaaaatgtctggtttgcgggtcaacatccgaaaaaccgccacaatgaaaccagcttggtagcatagctttaagccagctataccccgtttcagccaccatcggaacagcatgccccgccatggcggccatatttttttcttccagcgccgtaaaaatgtgccgcgcatgcttatgagaccgcatcaaaccttgtacaccaataatcaaatgcttggttaggtaataagcgccctcaacggcatgggcgacaggtatggcacgtatggaacggtttattggatttgaaggcccatccataacccccttaccacataaaacgcgctccgcatcattcacaccttcttccatcatcgcaaccagatgatttttggcaatcgccgaagacactgttggcataccaccatcatccactgtttttgcagcaatggaactgacggcctgcgccatgtaggtaaaaccagccagctttgccagcggctcctccaagccttccatatccttcaaagtgcgattaaattgcgtacgggccccgacaaaagcaccagcagcaagtgaggaaacctctaacgccgcagtcgcggagcttggcaaggaaatgccccggcctacagccagacattcctgtaaatatctttggtgttgcccagctgtttcgagaccaccgataacaccatccggcgacaacttaacatccccctgaataacaccgttggggaatggtacgccgtttggacgcaaacgtttatttacgatcaaacctttagtatcgcgtggcacgagtgagaaagtcataccaacatccacctgattacggccaagataattatccggatccttcagcatatacgcaacgcccagcaagttagcaattggcgccaaagtaatataacgcttatccagattatcaatgtgaatatataaagcaccatcattgtctttttttagcgttcccgtcgatgccattccgccaaacaaatccgatccggcatttggctctgttgcgccgaaacaggtcaaatactcaccgctcgcaatttttggcaaaatatcatctttttgcttttgcgtcccatattcataaaccagttttccagggcccagcgaattgataaccattggaataatcccggctgcaaaactccggctcgcgatttttttaataattgcggcatgcgcttgttcggaaaaccctttgccaccatactctttcggcacaccaagaccaaacaaaccaattgatttcatgtgatcaataaccttcggtggtgccattttttcatcactttcccaaatggcccaatcatcaatcatggcgcaaaggttttctatgtcttggtccagatatacccgctcctcctctgacaagccttggattccggcaatgcggcgcaaatccttatgatcaggcctgccgttaataaaagaggcttcccaaccaactgtaccgacctcaagggcggtgcgttcttcttctgaaactgaactttgttctgacatgcgtaataatctcccactaatgaccactgtcgcttaaagtaaaattttaccgcactgcattaaagtcaatttgcagtgcaacataaataaaaacccggccgctttataaaaacaacggcaacggcaataaatataacatgagaatagagcgatacggtagtcagaatacgcaggcacgcaatagagccttctcttcccaaataccatagaaacatgatttgctagtgtttttggattgtatcggattgtatgggaaaagaaaagtggtgatcgctcggggattcgaaccccggacctactgattaaaagttaaatcttacaattactcacaaatatcacaaaaccctacaagctaacactatacttgactttcaataagttgaatgtgaaaagagttacacaaattactccatttttctctgcaatttggtcacttattggtcactttttaaatgaataaaaaactaacaaaacgcgatattgatagcttttcttactccggtggctgggatgtaaggtgggacagtgccatatccggctttggtgttcgcgtttatccatccggcaaaaaatcctatgtcttatcataccgtaatgataagaaacaaaagcgccttttaaccattgggcaaaccaacaaaattccattagatatagccagaaacaaagccatacaacatctttccagcatcacaaataatatagaccctgctgaaaatagaaaactaacgtctgccggacgcaacgtgactaatattttcaaagactatctggaacgctatgccaaaacccataataaaacatggcgcgaaaccgaacggatatttaataaagagatattgcctgttataggctctagtctcattcatgaggttgagaaaaaggacattgtaaaattaatagatgcaattacagaccgtggatcacatacaatggccaaccgcgtattggccaatttaaaacgttttttcaactggtgcattgaacgtggctacattgaattatcacccgctgataaattgaaaaagcctacacgcgaaaaatcaagagatcgcgtattatcgctcgatgaaatcaaaagcatttggcaagtttgtgagaacaaaagctatccttatggacgattggtgcaattactcattctaacaggacagcgtaaaatggaggtcaccaacatgcaatggcatgagattgactggaataatgccgaatggttattgcccaaagaaaaaacaaaatcaaaccgatcacataccataccactttccgcgcaagctattattctacttaaacaagcaaaacaacacgccccagaaaattgcgactttgtattttccaccaacggaaaaacaccattttcaggcttttctaaatgtaaaaagcgtcttgataatgctttaaaagagattgaaggcatagaaaatgaatggcgcttacatgatttgcgccgaagtgtcgccagccacttggccgcactagaaacgccgcctcatgtgattgaaaaaattctaaatcattccactggcacaattagtggcgttgccgccgtctacaacagatatgattatttcaaagaaacaagaaaagccctggatatatgggcgcaatcaatagaaacgctagtcaaataaaaaacggtaggccggagcccaccgtttcattttgtgataattctacgtcttgttaacggaaagacgccaattaccaatctgctatagacttgcatttataccatagattgcgctaagtcaacatatagatttattaaaaacatacgaacaaggatttttaatgacttaccgtttagcgattgatatgggcgcaacgtctttgggatggtgcattctagatttaaatgacaaagggcaagtttgcgatgttctggatatgggcgtgcgtatttttcctgatgggcgcaatgccaaaagcagagaaccattggccgtatcacgcagaggaacaagaggcagcagccgccgtcatgaccgctataaaaatcggcgcaaacgtttaatggctttcatgatcgaaaacgggcttatgcctcgtgatgaagccgaacgcaaagcgttagaattagaaaacccttatgaattgcgatcccgcgccgccgctgaaaaaatttctcttcacgaactaggacgcgccttgtttcatatcaaccaaagacgcggatttaaaagcaaccgtaaagcagacagtaaaagcaatgaaagcggcgctataaaaacgggtattgccgaactggaacacgctatgctggccagcgacagcaaaacactagggcaattcctctatgaaaagcacaaaaacaaggaaagcgtgcttgcacgaccagaaacaaagggaagtaaaaacgaatatgattactaccctgcccgtgacatgtatgagcaagaagttgattttatcctgaacaagcaaaaagaatttcatccagaattgacagaggacatttgcgaaaaacttaaagaaattattttttatcagcgtcctttaaaaccccaacctgtgggatggtgtacgtttgagagcgaagaaaacagggctcgtcttgcaagcccgatcgtgcaaaagtttcgcatattacaagaggtgaataatcttgaaattgatggcctcacagaaacagaccccaagctaaaaccagaagacagacaaaaaatcattgcagaattacaaaataaaaaagaagtaaaatttaatcgcatacgcaaaatgcttgggcttggtgatgatatcacatttaatcttgaagcattggaaagcagagccggacttgatggcaatacgacaaacttcatattaagcaagcctgaatgctttggcgatcgctggggcgaatttgcgtccgaacaacaggaatctattatagagttattgatgaccgaacccgatccggaaaaagtgattgaatcattaatccgcgattatgatgtttctgtagagcaagcacaaaaaatctcgaataatccgttaaaagaaggtcatggacgcctttccatgaaagccattcataatatcatgccacatctggaacaaggataccgttatcacgatgcctgtaaattggccggatatcatcattccgatttccgaacaggggaaatattcgaccaacttccatattatggcgaagccctgcaaaccgccgttattggaggaagttacgcggaggaagataaaaacaaccccgaaaaattctacggcaaaattaacaacccgaccgttcatattgcattaaatcagcttagaaaactggtcaatgcgctgatagaaatttacggaaagccacaggaagtcgcgattgaattggcgcgggaacttaaatacggccagaaacgactgcaagagcataataaaaaccaaaatgaaaaccgcgctcgcaatgaaaaaattaatgcagagcttgaaaagctcggtaaaacaccgaactacaaaaaccgcctacaatataagacgtgggaagaactggccactgacccgacaaaacgctgctgtccttttactggaaagcaaattggcgcaaatgatattttttccggcgaatttgaaattgaacaccttttgcccttctcacggacatttaatgacagtcctgcaaacaaggttttatcacaccgcagcgcaaacaggataaaaggcaataaaagcccgtatgaagcctttggccatacagcgcaatggagtgaaattcttgcgcgcgccgaaaaccttccgtttaataaacgctggcgttttaaagaagaagcgtgggatatcgcaaagggtaataatgaagatatgattgcccgtcaattaacagacacccaatacatgacccgtattgccaaaaaatatttatcgttcgtagtggaagaacaaaaggggcagagccgtgtttacggtattccggggcaacttaccgccctgcttcgccgcaaatggggattgaacaacgtgtttgatgactcactggataaaaaagaccgcagcaatcaccgccaccatgccattgatgcatttgtcgttggctgcacaacacgcagtatgttgcaggccatatcccgcaccaatgaaaacgaacgtgaaaaaattgaaattcccgagccgtttccaaattaccgcgagatcgtgaaggaaaaggccgaaaatatggttatttcctacaagccggatcacggcaacgcccgcaatgcgattaaacatggaaaaacagtttcgggactgcataaagccactgcctatggctttgtcaaagataccgatgcaaagaagggcaaagcgctcttcgtaacgcgcaaacccattaacggctttaaaaaacgcacagacattgaaaacgtgattgatcccgtctggaaacaaaaacttttgaacgctgtagaagaaagcaaagacggctccaccgaatttaaagccgctcttgatgtgttttctgaatcaaacaatgtgcgccgtatgcgtgtgtatgatgagagctccttaaacacaatgatcccagtttatcatcctgatgaaaaaggaaaagacggggcgaaggcttataaatattattcactgggtgggaattactgcgcggagatttattgccctaataagggtaagaacgctgggaaatggggcatcgagattatttccaattaccatgctcaccagaaagactttataccgcaatggcaaaaagataacccaacggcgaaattggtcatgcgcctgcaaatcaacgatatggtggcttatgaagacgaaggagaaacaaaaattagccgtgttaaaaagatggataatactggacgagtctgcctaagagatcatcgtgttgctaaagaagatggcgataaattaagttggacagcttatattggcagcctacaaaagaaaaacgctcgcaaaatatcggttgatatcacaggccgcgttaaagacccgaaaaaattaacggaaaatcaagatattgctgcctaaacttcaactatgagtgttgaacgcatagttgagatagcatccgataatcgccatttggccgccttacgcggctttatgacggtatcggaaggcaaagaagaattgggacggataccgctggatgatattagcgcagtgattgccaatgcccatggcctgacttattcgaataaccttcttacgtctttggcacagcgcggcgcaccatttgtaatatgcggggcaaatcatgcccctgctgcctttttatgggctgtggatggccaccacatgcaatcggcacgcatagacgcccaacttagggcaacggcgccacaagccaagcagctttggaaacagattatacaatcaaagattaaaggccaggccagcgtacttgaatcgctgcaaaagccgaaagctccggttgaggcacttttaaataaagtcaaatccggtgatcctgagaatatagaagctcaggccgcgcggcgatactggccgatattattcggatcagatttccgtaggaatagaactttgcccggcaaaaacggcttgcttaattacggctatacaattatacgctccggcgtagcacgtgcaattctggcttgcggtctgcatccgggcatcggcattcatcaccgcaacgcctataatcccatgcggcttgtcgatgatatgatggaaccttatcgcccgtatactgattttgtggtctggcatctactgaatgaaggctgtgaggatgtaacctctgatgcaaaaagattattggctagcatggcagaaatggccgtaccgatgaatgatggaatttaccccatgcgccgtgccattcagaaaaccatgcagtctctggccagcgtgtatgaaggaaaaacaacaaaactggacttgccaacgaccagcccgcccttatggcaggcacaggaggaaggctatggcacatttgagcggacacagattgatgtggatgatggttatgtttgatcttcccgtcggcacgaagccggaaagacggaaagcaacgaaatttcgaaaatttcttctggatgaaggttttgagatgtcacaattttctgtatattttcgtttttgtggcgatagaagccgaacagacccatacgcgaaaaaaatcaaaatggccgccccgcccggcggcaaaataagtattcttctttttacagacaaacaattttccgatattattaccatacaaaacagaaatgtagggcgcatgcctgaaaaacccgagcaatttgcattattttaaagcatgaaacttcattttttgacagccctccccaataaaaaaagcccctatttcaggggcttaattcgtaatccgttatagcagattagaaattggcgtcaaaccgcaactgtcagggacgcgggaaaagacccattcggttatagcagattagaaattggcgtcaaaccgcaacaacgctaatgacaggaaagcgaaaaatgacgttatagcagattagaaattggcgtcaaaccgcaacggcacgccgatcatatcggcaaagtcccgcgttatagcagattagaaattggcgtcaaaccgcaaccaccgcgacgtgctttccacgtaccgtcttgttatagcagattagaaattggcgtcaaaccgcaacagcaagggtacggcgtgtttgcgaacatcaagttatagcagattagaaattggcgtcaaaccgcaaccgattcctcttgatacagcgtgatttgtagttatagcagattagaaattggcgtcaaaccgcaactagggctgccgataacttgccaattctggagttatagcagattagaaattggcgtcaaaccgcaactgaacttattcgtatgaccaagaattggaagttatagcagattagaaattggcgtcaaaccgcaacacttgctaatattgaaatggtaaggaaagagttatagcagattagaaattggcgtcaaaccgcaacacaaagggctatcaattgaataccaacacagttatagcagattagaaattggcgtcaaaccgcaactctcacggttattgtcatggtgcgtccgatgttatagcagattagaaattggcgtcaaaccgcaacaaataactgcgcgctgtttaacgtaagcaggttatagcagattagaaattggcgtcaaaccgcaacgcaaaggatacacgcgcccgtataagggctgttatagcagattagaaattggcgtcaaaccgcaacagaatccacaagctcaatcaagtgttgttggttatagcagattagaaattggcgtcaaaccgcaacttatgaccttgataccagacataccaagcgttatagcagattagaaattggcgtcaaaccgcaactgttgacgtttacaagcgatgaacttgttgttatagcagattagaaattggcgtcaaaccgcaacggagcatttcatcatgtgaattacaggcacgttatagcagattagaaattggcgtcaaaccgcaacacaaattgatcaccatagatgaaaagatcagttatagcagattagaaattggcgtcaaaccgcaacctaatgacatgacacctgaacaagtacggggttatagcagattagaaattggcgtcaaaccgcaaccaaatccagaaacagttgcgccgcttcaaggttatagcagattagaaattggcgtcaaaccgcaacggaaaaggctctgtatcagtaattgcatctgttatagcagattagaaattggcgtcaaaccgcaactatgaacgccgtacggtcgttcgttttgaagttatagcagattagaaattggcgtcaaaccgcaacgtgatttgttgaatgtattgtttttgtgtagttatagcagattagaaattggcgtcaaaccgcaacggggggtgactgtatgacactgggggggtggttatagcagattagaaattggcgtcaaaccgcaactcacaagatcaaacatctatgtctgtcttagttatagcagattagaaattggcgtcaaaccgcaaccgtgagttggttgacgatttgaatggactgttatagcagattagaaattggcgtcaaagccctcctattccaaaaaccgcgcccgctcttccaatttttggacttttctatagagttgatctggctcacttatagataattcccttatagagttttctatagaaaaaagcgtatcggcaatttcgctgatatcatgcccttttaaggtgtttaaacctataaggtttcctatagtgcgttccttatatccttctatagcgtctgcttttaaaccacgtagcacatcttcccttatagcatttgagctataaggctccaacgctttaaaggcggtctttaaagaaatctgccatataggatgatccggccagcgcgatctgtttaaatcatcctttaaaggattagtatagcgcatggcctttaaaagagccgctataatatcgcctgctttttcttcaaagtctttaaagcgccgtaaatcccatttgttaagttcatcctttccggcccgcacctctacccgccaaattgctttaaagccgcctttaaagggcttagggtctaccccccataaatcccaccagtattttttaccgctggctatgatctctttggttttgttatagagaaccacttgccgccctggcatttcaccgaggcgcactgtatttactttctcaccatttaaagaatgatatttttctatagagcccccattaccgtaaacatgcttcttgacattcttatgcgccacaaaacggctcggtatcggctcgaaggcgctatctgtaatgaaatcgaagcagtaatcaaggcggctaatgcgctccaagggggcatttaggcgcttattcgtcgcctgatcaattcgcggctcaccttttgcgccccattcttttaaacggcttttaagccgctctttaacgccttcgtagccatatagcgccaaagaaaggcttgaaacagaaacgcgaatattccatttatcaagataattagaatgctttacaaaccacgtttccccttctttgccggtatcgaagcggtaacgatacccgccctttgatcctgtctctgccaccatgataggcgttttattagcgcctatttcgcggtaaacgctattattttcgagtaaggcttggtcttttgcttctgccaactggtttagcaaaggcataggaaaagcgccttggaagctaatgtctaagccatcgaaattgttataaataagtttcatgttattacctttattgtaatcaacttgtatttgtaggggggcgtggtacaaggatgccccccagattgattaggctgcatcattttgattttgctgcgcttggcggcggcgccatgtaatttcatagcgaccatcatctgccttaaatgcggcaacatttaatggattagggaagctagggtcatccatgctcaagctgatgaaatgaacaggcggcgctcctattttgtctttggttttgcgccatgctgcgccgatttgaatatcacccccgttaaagcatagagcgctgataataaagtccggtgcatccttattggttttatttgggttgggcaaaagtttgattttttgttgcagttggagcgtgcgaacttcgccatggagctcttcgccttgtcctgtatctgctggtattaagtatccaatggtcgtcatagttttgtctccttatgagtttgaggttagaattggatagcgcgcttcgcgcagaaaccgcttttgttttggtagcaaaaagacaaagtgatcctgttggcggccagcggttaagctggccacctttgcaggattgctcccaaaatcccctaaagtgcggtcaggcctttagaggcaaaagtcatgaatattctgctgtgcttgaaacaagattattctccacccattccaacaggtctttacggcgatatctgatagaacgctgtgatacgcgcacaaaatccggcccctgccctcgtatacgccagttttgtagtgcacggactgtatagcctagaaattcagcggcctgccgttcatttaaaagtctgtttaaataatcaaaatttttattttccatgatggttttccctctcccttcttaaaataataaaagacatcttttgtctttatatctcaaattttttaaactcttggccttactctttgaaataacctcgttacatttataacaatacaggttgtataattttgatagctaatactcgaagtgccacaagttttaaatttcatttcagtaccttcatgttcaaaaatatacagcgggttacgcaatgttagtgtgcttatataatcttgatcattggcaaaggcttgagcctgcacgaaataaacaactctttccccatttatggccaactcccaaatttcatcatcataaaaatcttcaataatatcttctaattccgctatttgagtaaccgatataccgtgtcgtaccatctcggcaattagaaccgccttatacatttcattctcactgtaaagacgatgcaccccagaaccgccatgcttcttacccaatggcttcaatatattttctgtagtccagtaccgaatttgacgcacagccttctcaatgaccttttcatcctgtgatccggttattgtggttgctaattgtcgtactgtataagtcacttcactcatacaaaacatataaagacattttttgtctttaatcaagcctaaaattatttttattcacaactctatgaaccaaaacaatttttggtcacttattggtcactttgcaatgttgaatttggagaaaagtggtgatcgctcggggattcgaaccccggacctactgattaaaagtcagttgctctaccggctgagctaagcgatcatattgttttttcgtgaataggttctccacgacgaagggcaagatatgtttttacagcgcgtacgtcaagttttcttgacacaaaaaatgattatttttcaaatttttgttttagccgggcggccacgccaggtgtaacaaactgttcaatgtctccgccaaggctacagatttctttcacgaagctggcagaaacgaattgccatttatcggacgccatcaaaaatacagtttctatatcgggatccagcttcgcattcatacctgtcatttgaaattcatattcaaaatctgaaaccgcccgcaacccacgaaatatacatgacgcattcatgtctttggcaaactgtatgagcaatttactaaagggccgcacctcaatctcgcatccagtatcttttaggttttcaatatcactctgcaccaaattgcagcgctcctgcagcccaaataacggtcccttacgggggctatctgctacgcctataatcaaatgatcgaccatcaaagaggcgcgccgaataaggtgcaaatgcccctttgtgatgggatcaaacgtgcctggatagacccctattaaatatttaccagatcgcgcgcccataaccaattactgtatcgttcccggaacgccttgggtttgttcttgctccgctttcattgccgcactaatttcattagcgtatagcatgccctgaaacaaattcaccagcactgcgaatgctaatattgcaaacattcgggtataggttttctttttaatggcaagaatagcctcttctccatcctttttaagtttgctggcaaagatagaataagagacggccatataaacaggcattataagagcaataaaaaacgatccgcctaaggctatcaaattatacagacgacgggtattcacctctttttttccaaatgcaacgcggtgttcgtacataatgtgaaaacaggcgacaaaaaacatgacgattaaaaccagacgagtccagcctatatcccaataaagtgtacttaaggccagaagagcgtagggaaaaacccattccccgtcataaaagttccaatctgctcccattggttttttagccattattcgtcatccttatcgccttgttcatcctgttcatttgttgttgcctcggcatccggcgcggcggcagtctcatcaattgctgcatccgcatcaatcacatcaccatccaggccctcagcatcgttttcatcatcctgatcttcaattaaccacgcaacagaaacaacgcgttcatctgtacccaccttaaagattgttacaccttgagcgcttcgtcctgtaatacggattgtattaacatgcgtgcggatcaatttccccttatccgtcaccagcataatctgatgatcatcggttacagggaacgttccagccacggcatttccattcttttttgttaacgccatattcacaacgccttgtccgccgcgcccggtaacgcggtattcatatgatgatgtacgcttcccaaaaccaccttccgaaatggtcagcaacaattgttccttttccaacaattcactgaaccgctcctcggaaagctccatatccgtttcagggtattcataatcctcatcatcactaccgacaatctggctagcagccttcatataagcgtcgcgttcctcgggggttatgtcaacatgctttaatatagacatagagataacctcatcccccttcgccaatttcacgccgcgcactccggtcgagttgcgtccggcaaatacacgaatatccgtagcccggaaacgtatagctttccccaatctggttgccagaaggatatcatcctcttcgccctcgcataagcggacagatacaaggctctccccttccccaagtttcatggcgatcaaaccgttagaacgaatatttttaaagtcagataatttgttgcgtctaacagaaccatgggaggtcgcaaacattatatccaagccatcccactctgcctcatcttccggcaggcgcatataaacagaaatactttcgtcctgctctaacggaagcaggttaaccagagccttgccccgcgcctgcggtgttcccagcggcagttgataaaccttcatacggtgaacaataccgcggctcgtgaaaaacagtatcggcgtatgcgtgtccgccacaaacagatcagagataaaatcctcatccttcatggtcatgccactacgccctttacctccacggcgttgcgcgcggtatgtggccagaggaacacgtttgatataaccgccgccggtaatggtaacaaccatttcctcgcgggcaattaaatcttccatatcgacctcaaattccgcgtcaatcaattctgtccggcgcggtgtgccgaatttctcttttacctcgatcaattcttcgcagaggacttccagcatcttttcgcgggaagccagaatagccagatactccgcgatccgatcagtaatgtctttaagttcatcaacgattttgtctcgttccagcccagtcagacggtgcaaacgcagatccagaattgctttggcttgcgcttcactcatttgatacgtgttgtcactttcaaccgcgtgatcagggtcatcaatcaattcgattaacggcgcaacatcatgcaccggccaacgttttgacaacaggccttcacgtgcctcaccggggcttccggcgttacggatcagggcaatcacctcatcaatattcgccacggcgacggccaaaccggccaagatatgcgcacgttcgcgggccttacccaaatcataaatcgtacggcgtgtgatcacttcttcacggaatttaataaaggccttaatcatatcgcgaatcaacatgatttgcggcttaccgttatgcagcgcgaccatattacaagggaaattcgtttgcagagcagtatggcggtacagctggttcaaaaccacatccgttaccgcattttgcttaacctcaataacaacacgcacgccatcacggtccgattcatcacgaatttcagcgatatcttcaacaatcttttcgcgggcgatttcacccagacgctccaaaagtttacctttattcacctgatacggaacttcgtgaacaataatggcttcgcgcttaccgatttcttcaacagaagtcttcgcccgcatcactactgagccattacccgtatgataagcactgtgaataccgcgcttacccaatatggatgcaccggtcggaaaatccggtcccggaataatttcattgatttcttctgtggttatgtccgggttatccaccatggccaaacacgcatcaatgacctctacaagattatgcggcggaatattggttgccatcccgacagcaataccgcccgcgccattaaccaataaattcggaatacgcgatggaagcacaaccggttctgtcaggctttcatcataattcgcacgaaaatcaaccgtttccttctcaatatcttgcagaatggtttctgccgctttatccatgcgcgcttcggtgtaacgcatagcggccgggctatcgccgtccatggaaccaaagttcccctgtccgtcaatcagtggcaatcgtaagctccatggctgggccatacgaaccatagaatcataaatcgcggcatccccgtgagggtgatatttacccataacatcaccaaccacgcgggcagattttttataaggcttgtcagaggtgtaaccaccttcacgcatcgcgtacaaaatacggcggtgaacgggcttcagcccatcacgaacatcgggtaaagcgcgactgacgatcacgctcatggcgtaatcgagataggattgcttcatctcctcttcaagcgcaatcgatgggatattctcctctgggcctgttgggtctgaattctctataatatcgttcatgctttacacttctactcttgatcgttcctaaactattgcgcggcacccgtccgcatttgcattactgccgcgtcaatcatacgaatgatctccggctccacttttctctgatattgctccaattttttctgcgcgctaatggcttcgggcatagagtaataatcaaccatcgctttaagttccgccgccgtataagtttccgc

SEQ ID NO: 4084 - DNA, 16830 bp, synthetic construct
  source 1..16830: mol_type = other DNA
  misc_feature 1..16830: note = Synthetic
tcgcagatgtgtgaaagtatcggtaaatcctgtccaactattaacttcagccaaaagatccgtaatgcgcacgcgaggaaccatgtcgtaaagtttcctcgccagaatgtctacatcctccggcactgctcgttttagtggggatagctgcaatttatctccttgtattttggcataggacaaggtgttgtttttcagtgctttcgacacagtttttagtctatcgtgagcagcactgcgttgtccatccagccattgctcggcctgtaaggggacggcgattttggtacaggtcgaaacagccggaacgggtaataattcctgttctatactgcggtaacgacggctttcattgatccagatgtctccggagcgtagggcattccgcaattcgaataaaacgcaaatttcccaatagcgacgatcaattcttccattggaatgcacatgttttcgccatttatcgcgaacaaagcttgttggaattttttccgataagtgacgattggttccggcattcatctcccgtagaacattcacagcttccagcaaggatttggccgcaggagaagcatgaaattcaaaagaagccaaaaacctaggcgcgtaacgtcgcagtcggttataaccgctcggtaagaaatcgacaggtgatgtatccactttgcctatcagattttgtgtgctgtacacagcactttcaaaatcctgccacggcatcatgcgttccagcacggtatagggatcgtcaccatattgacgagcgcggatcaaagccatacccacatccgaaaaacattgtagggagcgcgttacacttgttctttcctcgcgaacaatttcatcctgatgacgtttggcctgattataaagacggcctgtaatccgctcatgtgtttcgatagctgcatcggtaaaaagacagcgccattctgaagcgcatgatacgagaatggataatctgcgatcttccggcaactcctgtagcgtgccggtatatagtcgttccccctctttgcgcaggcgtgtaattcggtgcggcagaatattttttgttatgtcgggcctcagatttatggttttgatcgtatcaagacgatcaagaaccctgttcatcgccgccgaattcatcccaggagcggcctgacggagccatacaaatttgctgataccgttttccattttctcatgcaataaagcctcaagacaatcttttgttttaggatcgagtcgttgcgcaattctccgcgcaatgcggcgttcagcttcaaccaaagcgtcagcacacagtctttcgactgtagaagccgccggaacaataatcttctgccgtcgaagctcttcaagaaatgaagcggccaaaccaaaattatcccgtgcttgttctgctgccccaaccagccactccagcatgtcagcacgaatatcgcctgaaaacgaacggtaggcataagtttcttgcaatcgtgacagatgttgatagcgggtttcttcacgctgtgcgtatccttccagttctgcccctgaaaaaccgagctgggcagcgataaaggccagcatcctctccgggatcaattctcgtggctgcaataatcgaccaggaaaccggaaggcacaaagttgcagagcaaatccgatctgattacgcttccgacgttgccttttgataatggcaacatcttcatcgctcaaagcataaaatcggatcatcgtttcttcgtcatccggcagtccgaacaacaatgttcgttgccgctctgtcaaaactgttctatgtgccatattttgcttcccgttctttcaaaaatgcattactttttattgacaatatgaaacaggtttttgcaagcacaaactgcgcggaagtgcataacagccaaaagccttttttaaacgaccgtttgtgaaagggtaggacgtgattttcggatataaccgcatctcgaaaggcgatgatcaaaatgccagattacagatcaaagcgtttaaagaggtgggcgttgaaaaaacattcgaagaaaatgcttccggcggacgttgggatcgtccggcactacacaccatgctcgatcaacttcgtaaggatgatattgtcgtggtttggaaactggatcgattgtctcgctccttgaaagacctgctcgttatcatggaaaaaattgataatgccggtgcaggctttaaaagcctgacggaatccatagacaccaccaacgccgcaggtcgcatgatgatgcaaatggttggagcttttgctgagtttgaacgtgaaatgatccgtgaacgcacaaaagccggacttgatgccgccagagccgaaggtcgtgttggtggtcgccgccctaaacttcgtgacgaccagaaaaaggacatcatagagaatgttctttcaggtcgtaaaaccggagcgcagatggcaaggctctataatgtaagcgaagctacgatttcccgcatcgttgcaaaacatagggagcctatctcctgaaatgactccagtatcaattgacgcgcactcactttgggtgctatcaatccaatgaatatatagaggatagactatgctgtactttattacaattgtggcaatcattattctgtttttcagggttttttactggttgaccagatataaacaggaatttaacgaacttattaaaaaaaacaatacgttagaacaagaggtaatgaacctgaagttttctcttcaaaaaattgatcccaaagctatagaagaatggacgcaatctgatgtgaatgaagagaaatataaggttagctgggcagcaaaattataccttcttaggaaaaacccctcatttattttttttggaagcgagtaacggattaaggggtatccttttttatcctttgttacgaataaaacacctatagtcttctttcgacatgcctcgctcagatagtaccgtataaaaatagggaatattttcattttctcctattcctaaaagggcattaatatcatttagacatttccattcctgcggcaacataactagatcaagcttccgtttttcagaaaatgtatcaaagccaatactgtggcctaacgcatgaaaattattttgacttaatcgaaaaaattcgatttcagacatgtgattatgccattttcttgctgtgtcctccatattttcaagaagattttttaagatagccctagcgatggattgatcaggatcaggcgaggcaggattcaaaatagttatcgcgctacttcgtatcattttagaaatggtcgttggattttccggagtttgactaccattatcaatttgagccacatagtacataaatatatgtgttttggcatgagcatcttgctccaataacaatcttgtcaagatgtaatctcgcggtgttatccatattggtatgcttttatcaaagatagcccattttgataggaagggaggagcgtgctgtatagcatgaatcgcctcatgaaaatatgtttgcataaatgtatttttatcttcgaatgcggctttaccaaagctaatactgttttttgatggcgagtaatatccctttaatccgtatttttcacaaaactcaaaggtttcatcatcacagacaaggtagcattctgatcttatgaattcttgtaaaaaattttttccaaaaattcctgaattttcaagataatgctcaatgaaccgtatgcaccattcatacacaggcgattccaaagctattgatggctttaaaacaagagactgaatgtctttcgatgtcgttttatatactgacaatctatttctcacagatcaggcatgaagctcgggaaaacttcgtttgttttcagggcaattagattttagttctttttcgaaagcatcaaaatttgcgatcagataaaaatcattcatatcctctacatgctccgcatattcctcaggatcaatgtttctaagcatatcgcgcgcggcatttacaactttctcaattttattaggcgttggcgtgcctccgccaaacgaacgattgtgcttgcgtaaaccgttagagcgttccagcatttccgaaagggctttggcatcacagatatttttagaagggttaaaatcataatagagttgagggtatacagccatcatgcgcccataaatcttgggcgcatttttaacattttcttcaaaaccgtctcttgcccgcaatatttcaaaggcttgacgttgcaagtcatcgtctttgaatgtcacgtagtttccgaaatctgaaacccttttatcttttaaatatgtgcttaaaacgccattgaaatcagcccatggcgatgactgagatatatggtgtaagctctgaacctcatctttttctaattggggtgctatttgtaggcagccttccaacacgctgtctacaaacggttttggaaaatcgtaaaagttagattgtgcgccgccaaaagtcagggcactggaaacaacagcttccctttcattgacaccaaattcatcttttctttcagacaaattttcaaggcgatctgcatagtacagagctatagccgaaacctgagctgaatatatattggaattgggatcaatatcattgctgattgcacaaacaatcggcaataatctggtcgttgttcggtcaagccgttcaatttggctcatccctgccaaattacgatccacccacgtcacatcaataatcgaggcatctatttgcccagtctttgaaacggtaaaaaaagtattccatgcatgaccttgtgaggttttcttagatatagagttaaaatcatctcttttgggtttaaagcttgtgctcccgttcgattttccatcctcaccggaatattgacaataggtgttattaagaaggctaaaacctgtttggttggctttcaaggattcaaaaacgcctttcacagcacatccgaaattgcgacaaacgccatttccgttccacagcggattgtctttctcttttcttccctctttcaaaatttccaaaaccgtcgattgatcggcgtgtgtttcaccctgagcggctttgtcggttgtattataatccgttagttcaagaacaatcctggaggacaaggccgaagcttgtttcggcgttaaggtatcgagtgcctctatgccaagttcatcttttatatgtgcaccttccttgctcaaataatctttgataaagctgtagagcttgcttttccaatctttgtcctcaagcgttttttcgtaagagtgctgactcggctgtagtgtgtcttccccctcatatccaagatattttttaacggcatcagggatatcgtaaatttcctgtgtcggagattctttgggatcaaatgcggaaaaatcagaaaaagccatcgtctctttatctgatacgctgagcgtcaacaaattaccgtcttgagggcgaaaggatttatcgagggattcaaaaaatttggcttttgcggcatcccagctatcaaaacgaacgctatgccgcccgctgagaagaacttcttttccgttaaaagacgtggacaaacccgcatgatcagaaacagtaacgtcatatttcgtcccttgttcagtttcaactgtctctatctttctttcatcactaaaatacttgcctaaagaacgcatttcagatcgcacacgcatctcttcacgtgaagcgataatggcatccttggcatcttgcattgtgggatattctatctcggtcgtcccgaccatatagccggtttgtaaattaatggctcctggcataataacgcttatacctttatccgttttagatatgtcaaacagttgtgccataacgcccctaccaagagcttaaattataaactcaaaacattaaggatagatttatacagtttttcaataatactataaagattcattttacgtattttcaaatgcttggtgcttattttgtgctattaacccccttaaggtaggatttcacactctcctgcaaacgacccctcaatcactgccggggtataagaatttgatctctatcaaaggaattggacctctttctgctgccattatgcttacgcatataggtgaaatcagtgattttaaaaattccggaaaattagccgcgtattttggtattgtccccaaaaccagccaatccaacgaaacacatatatcgggacgtattacaaaaagaggaaataagctggcacggacaatattggtgcaatgtgccctgatcgccaaaagattcagcccatatcttcataacttctatgaaaacatcaaaaaacgacgtggatccggaaaagccattgttgccacagcacgaaaatttttgaacaccattttttacacactaaaaaaggactgggtctttgacgattttcctgcttttcagaaaatttctacttgattttaatcataggagaatttgtcagagtggaatcgacgaaattttatctgtcttttctagcctgtgacgaaaagcaataaaattttgatctattcaacttgataaattcgggcggcacgcccttttaaaaaaccaaacgaacaaaagtacaaaaccagccatagaaaaacgccgattctgagcgttctcaaggtacaatgacacggatttgaatactgagcgaggcgagagaggccgttattttcagttaaaatcacttgtaagggttagatttccgccagtttcgcggctgttggaaacgaccttcccaaaccccgtttttttgctcccgcgcctgattttcagcttcagcataaaatcctttgctgaaataacgataatcaatcgcccaacctgcgcgaaccatttcacggccaacatccagatcaccgataaaacatctggcaacggtgcgcgtttcttttttggccgccggcattctttcacagcgtaagtcagacgaaccgatcagatgaagcaaataggattttgcgtgtttgccgcaaggatagtcccgcccggacttttggcaaaactgcgatagttcaaccgcatccacgccccaaagccggacttcttctccgttcaaaacaaagctatcaccatccttgatatacagatcagaggcgtgagcagaaccgcagaataccgtaaacattgcgataataaccccgattccatccacatttttcgtggatggaatcgggggttattttttgtgtattggaaactacgcattgtgcttttcctctccgcgtttcaacagcccaaacaccgagccttgcaagttcagatcgcctgttttagcgcgggcaaccatttttcgtaaatagccgccggggtttcgcacaggattttcagggtcttgggctttctggtcaataatcatgatacagatcgccgccccttcacggccaagcacatcacaggcatcccaccacgccgttctgtttattccaagggtggggaggagggcatttgctgcttcaacgagatcagcccatgacaaagcccgattatgaagcggtatatgatccttgaaacgctctgaacaagagtttaccatcattttccatgaaatatgccccattccgtaatctttgtttttctgctctgtttcggtctttccactctcaccggactcagcctcttttggctcaggacaatccgctacgttttcctgaaagctaatggccgtaggactacttgtatctaatttattagatttaagggggtttgtactatgtatatggcggcaatctgtttcgcctgtggcggaaatatcctgcgttatttctgagttttccacactgctaacaaccatttcaagagcgtcagataacccttccaaaagcaatttatgatcttctgtcagatccttcaagcgtttcagtgaatgatatgtacgaatggagtaagatatggcgttatagccctgctgaacggtctgaacggtatcgctcatctctttataaagcgcagcttcagccagaagagtacggatacgggcacgataggccgtgatcttacgcttatgctcattccaaagctctttatacgcttctttttctgccaaggcttgttccagggcagggaccaaagaggcgaggggagacagatcaacgccaaaggcatatttaatctcgccagtttcccggtcacgcacaccgtaacgcttgaaattgccggaatcttcccaagtgagggcgccgaggcgattgagggcgttttcacgattacgcacctgacgctcggaaatgcctaaatcctgcgctgttgtaatcacggcctgataacagatcggctggtggccttccgtccagtccacttcatttgtgcggatcaggtaatactccagcatttccaccagctcggatgtaaatccaagctctttaccgacttttttaatgagtttgagggcatggaaacgattaacatcgtcttcaaggccacaaaattcctctgcactggttaaacttgcccgaaatttgggtgagcttaaccgtccgccaaatgcacttggcgaatgattttcttgtatctgcatatcgtcatagcaatttagagcctgaaaaaagggtgcaaaaaaggatagcgcaaatgcacttttttacttgtcacccgattcgttcagtgatattctcttgatattacagtttcaaaaggtcactgatcttacgctagaccaccgcgccaacggtggtttttgcgtatctgggtctaaattttgcttctcctttctctttaagtttataaactgtctaattgtaagtcttagacgacttggaaatggccagaacagaatttagcgaacgccttttctgaccgaactaaagaacagaatacggtgattcttgattctgttataagaaatgtatcatgtagtctagttatccacaagtagacgattttaaacaatttaaaattcatctgcttttatgagcgtatctttttttaattctcgctatataaaggtttcaaacccatgcattacccccattcatatatagatatcacactctctgtcatttttaacttctaactggactgtctaatttattctagttatccacgggtagaataaattagacacctagaaaacatagtgcatatggaaatcatgttttttctgatttaaacatactagagaatccgctactattcagaatagacaatctaagacttgtatgattagacgcacttagacgatgaatggaaaatattgtatgttagtaaaaaaaattgaagctgcaaaaatggtgggtgtttctaaagcgactttttacaaccatatcaagtccaaaaacatttctatcagtgataatggcaaagttgacatttctgaacttcagagagtttacggtcacgataatgtcaaaactctagaacaacgagaacaagaaaaatccaataatgacaataccaagcgaacctcagaaagtgttctcaaagacaaaattatacaattagaaaaagagctggaaaaagaaaaacaagaacggcaaagggaacgcgaacttctaactggacaagtagacaatttgaatgaaaatctaaaggacagcctcaatcaaaataaagagcttacgcgtgcaataacggatcaacgaagcgaagcggagaaaagaacaaatcaaaaagaagaagaacaatcaaaaaaattggatgctgttttggagaaaatacaaaaactcgaacaagaatccgaaagaaagaaaagctggtggccatttggcagcactaaataacacaattcaaaaataatctgatctcacaaaaaacgacgagccggagcccgtcgattcattttgtgattattctacgtcttgttaacggtaaaacgccaatcacttatctgctaagatgagatgatattaacaacaaatatcgtgtcatgcaataagaattaacaaaaaatatcttaactaaacagaatattttattatattgactcacaatatttaagaagataatacgattatagaaaactaaaaagagttcaaatctataactgatctctgtttagttgttgtggtcataacgtttattacttatctgcgaaaacaaaggaaaaactcacatgacatacagactggcatatgatttaggcacaacatccttaggatggtgcgcactggatttggataaaaacgggaatccttgcggcattctggatatgggtgtgcggatatttcccgaagggcgggatgctcagagcaaagagcctctggccgttgcgcgccgtggatcaagaggggcaggccgtcgccgtgatcgttatcttggtcgccgccgccgccttatggattatatgattgaaatcggcttgatgcctaaaaacaaggccgaacgaaaagcgcttgagctaaaagacccttatgaactccgcgcccgcgcagcacatgagaaaattgatattcacgagctaggtcgcgcgttatttcatatcaatcaacgcagaggctttaaaagtaaccgcaaggcggatggcaaagacaatgagggcggagcaatcaaaaaggggattgccgagcttcaacacgcccttatggccagcggtctgaaaacactaggccagtttttatatgaaaagcataaaaatcgggaaggtgtgttggcacgaccggaaaccaagggcagtaaaaatgagtatgatttttatccagcgcgtgaaatgtatgagcgagaatttgattttattctagagacgcagcaggagttccatccagaactaacggatgacgtttgcagaaaactgaaagagattatcttttatcaacgtcctttaaaaccccagcctgtaggctggtgtacattcgaaggcaaagagaaacgagcgcgattggccagccctgccgttcagcgttttcgtattttgcaggaagttaataatctggagattgaccagcttgaagaaactgacccttggctcacgcatgaagaccgggaaaaggttgtcaaagccttagaaaagaagaaggaaatgacatttacggctattcgaaaacttctggggctttcgggcgatgttaaatttaatttggaagccgcagaaaaccgaaaatccctaaacggtaatactactaattttctactgagcaataaggaatgttttggcgaagcatggtatgattttagcgtagaacaacaagaggatatcgttggatttctaatggatgagcctgaccttgagcaggtcattgaaacgctcgttcgtgattatgatgtatcattagagcaggcagaaaaaatatcttacgctccactcaaggatggttatgggcgtttgtctctgaaagccattaacaaaattctccctgagctggagaaaggattcaaatacgctgatgcctgtaaagaagccgaataccatcattccgattttcgcacaggggaggtgtttgacaagctcccctattatgggcaggcgttggaagcggcagtaattggtggctcatatgcggaaagcgacaagggcgatccggaaaaattctatggcaaaatcaataacccgaccgttcatattgcgcttaatcaggtgcgtaaattaaccaatgcaataattgatatatacggaccaccgtatgaagtggtgatcgagttagcgcgtgaaatgaaatatgggcgtgacaggctgattgaacataataaaaatcagaaaaaaaatcgtgagcgtaacgaaaaaataaacgcggaattagaaaaacttggtattacgccaaattataaaaaccggctgcaatttaaattgtgggaggatttatctgctgatccgacaaaacgttgctgtccttttacaggaaagcagatcggcataaacgatattttttctagcgaatttgaaatagagcaccttctgcctttttcccgcagctataacgatagcctggcgaataaggttctatgccacaaaaacacaaatcgtataaagggcaataaaagcccgcatgaagcctttgggtatacgcctgagtggggtgatattctggcacgtgttgagaacatgcccttcaataaacgttggcggttcaaagaagaagcgtgggacattgccaagggtaagaatgaagacatgatcgcgcgtcaattgactgacacgcaatatatgactcgcattgcgcagaaatatctgtctttcgttgtaccacagcaaaaaggcgaatgccgtgtgtacgggattccagggcagcttaccgccctgatgcggcgcaaatggggtttaaataatattttcgatgatgaatcagaaaaaaaagaccgcagcaaccaccgccatcacgccattgatgctttcgttgcaggctgtacaacacgcggtatgttacaggctgtatcgcgcgcaaatgagaatgatcgcgacagagttattatccctgaacctttccatgattttcgcgagcagcttcaggataaagctgaatccatggtgatttcctataaacccgatcatggcaatgcccgtcaggcggtacaaaaaggtaaaaccgttgcgggattgcatctggatacggcctatggtttggccggagtaggtaattcgaaaaaaggaacaatgatctatgtgacccgcaaagccttgagtggctttaccaaacgcaaggatattgaggctgtggccgatcccgtttggcgccaggccttgttgaacgtgatcgcggagtgtaaagatggtagtgcagaatttaaggctgctatagctgacttttcgcagaagagaaaggtaagccgtttgcgtgtccatgttgaacgttcgcccgagacaatgattccggtttaccaggcatatgagaaaggtgaagagggagctaagccctataagtattattcattgggcgggaattactgcgcggagatttatgaaatcaaacacggtaaagatgctggaaaatggggcatagatattatctctaattttcatgcacatcagaaagactttatcccgaaatggcaacgagagcatccgacggccaagaaaatcatgcggctgcaaatcaatgatatggtggcgtatgaagaggacggagaaactaaaatctgccgtgttaagaaaatgacaagtggacttatttatctacgtgatcaccgtattgcagcagaagaggcggataaattaagttgggctgcgtctcctgggcagtttcaaaagaaaaacgcgcgtaaaatttcggttgatattacagggcgcgtcaaagatcccaaggcggcattaactcaaaataaagaaaaagccgcttaaatacactctatgagtgtagagcgtatcattgaaattgcttccgataatcgccatttggctgctttccgcggttttatgaccgtgtctgaaagaggggaggagttaggccgtattccgctggatagtatcagtgcggttatcgccaacgcgcatggcctaacatattctaataacttactgaccgctctggcagagcgcggaacaccccttgtgatttgtggttctaaccatgctccggcggcgttcctatgggcggtggacgggcatcacacacaatctgcgcgtatagactctcaaataaaatcaacacaacccatggccaagcagctttggaaacaaattgtttatgctaagatcaaagggcaggcaaatgtgctagaggctttaggtaaaacaaaagcacctgtagaatttcttgcttccaaagtgaagtccggtgatccagaaaatatagaagcccaagccgcgcgccgttattgggggttattgttcggaacggagtttcgcagagataggcagcaagagggaaaaaattccttattaaattacggttacacgattgttcgctctagtgtagcccgcgctcttcttgcatcgggcttgcatcccggaattggtattcatcatcgtaacatttacaaccatatgcggctcgttgatgatgtgatggagccgtaccgtccttatgttgattttgttgtatggcatttggggcaagaaggctgcaaggaggtttcgccagatgctaaacggctattagcaagtatggcggagatggcgatcccgatgaaagacggtatttacccgatgcgccgcgctatacaaaaaacatcgatatcattagcaaaaatttatgaaaatggtaaagccgtgaagctggatttaccagagtacaaactgccactttggcaagcgcaggaggatggttatggaacatttgagcgggcacaggctgatgtggatgatggttatgtttgacctgccggttggcacgaagaaagagcgtagtaaagccacaaaatttcgtcagtttttgctggatgaaggatttgagatgtcgcaattttctgtttattttcgtttttgtggagatcgcagccgtaccgatccttacgtgaaaaagataaaaatgggtgcgccgcccggcggtaaaatcagtattttacttttcacagacaaacagttttctgatattgtaacaatacagaatcgaaatatagggcgaatgcctgaaaaaccggagcagttttcattgttttgaggttatatgtttattttttgctatatacaaaacaagaaaaaagcccctatatcaggggcttgtctcatggactattttagcagataaataattggcgtcaaaccgcaacgtctggcagcatcaatataacaatctggaattttagcagataaataattggcgtcaaaccgcaacgtgtcatcgatgccggtttcaccgagttcgattttagcagataaataattggcgtcaaaccgcaacacttgtcgctacgtgtcatgcggggcttggattttagcagataaataattggcgtcaaaccgcaactgcctgccgcgtgacccgaagtaattaaaaattttagcagataaataattggcgtcaaaccgcaactgactccggcttatgctgcggatgaatgcaattttagcagataaataattggcgtcaaaccgcaaccatggttttgtgcttctatgtctgccgcacgattttagcagataaataattggcgtcaaaccgcaacggatttcgcaaatattcaggtatattgtcaattttagcagataaataattggcgtcaaaccgcaaccttatggccggtgataagagacgacgtgtattttagcagataaataattggcgtcaaaccgcaacgtgtcaccttctttggttcaggcgttggtgaattttagcagataaataattggcgtcaaaccgcaactacaagagcattaatccgcttggtctcctgattttagcagataaataattggcgtcaaaccgcaactttttggcttctgccatgcccgcctttgccattttagcagataaataattggcgtcaaaccgcaactataagcttccaataattctggatgatcttattttagcagataaataattggcgtcaaaccgcaacttatatcattatatatggcatctagcattcattttagcagataaataattggcgtcaaaccgcaactgtagggccactttgcccaatcatattcagattttagcagataaataattggcgtcaaaccgcaacccgacacgtcagcggcaacaatcacagtgaattttagcagataaataattggcgtcaaaccgcaacaagtaccaagtgagggacaactcctataatttgacatcaatggtttcattgattacaatgtaatcataaggagtttttatcatggctaatattactattcgtgacctgcccgatcaaactaaagaaatgttgagagtgcaggcagcaaaatccggtatttctcttgaggcgtatgcccgttacattttgcaaacggtatcggcctcagaaagcctcgttcagcccagtatccttgatcttgcagggaagtattttgggacaaagaacggcattgacctttcattgcctgagcgcagttcaaaacgtgtccaagtggaatttgattgatgattatactggatacaaacgtattatcagagctaatgcgtcctagccctgaggccaaggttttaaagtggattgaagggcaaaaggctacaaatttagtcattacatctattggtgtggcagagattcaaaggggcattttaagacttccaaaaggaaaaaagagaaataccctccatgaaaattttaaagcttttgttgaaaatgcatttgctggccgtattcttccttttgatgaacgtgctgcttatttatatggtgaaattgcttcagatagagaaaaggcaggctttaatacagatgctatagatttgatgattgcagcaattgccaagaattacaatgccacgatagcaacaagaaatgtgaaggatttcaaggattgtggtgtaaagttaattaacccgtgggattaatagagattggtcatgaaagaaaaacgtatggattgttatccgtgggctgttccgacagaagaacaaaaacgcatgtttgatgctttgagttacgaagagcagcttgaaatggttcgtgcagcgatcattgagggcaagaatagcggagttagtgataaaaccgtcattgaaattatggatgatgagaaggctcgattaaagggtaaaggcatcataaaataaccaacaataggaatcatttcccataagttatattatcactccaaaacacccaagaaggtggattctattttgaagcgcgacttttgttaatttaagccccttttggggtgaataatggaagtcgattatgagtgaattttacaatcatctgagccttgatgaaaggcgcaaaatatatttctggcgtgaagaaaaaatatcagtcaatgagattgccaaacggcttggcaggcatagatcaacaatatttcgtgagataggccctatgggcacgtcggtgccatgagccgccaaaacttccactaatttcaatttttgaatagacatttatgctgttatggccaaactg

SEQ ID NO: 4085 - DNA, 6257 bp, synthetic construct
  variation 1225..1527: note = note, n is a, c, g, or t
  misc_feature 1..6257: note = Synthetic
  source 1..6257: mol_type = other DNA
taagcgaataaaaaggtcaatatttttccactctcttctaatctccacatttgatagatctgttaaatgaagattaagtgccaaaatatcttcatcgatttcccccaatacctgctcaaggaacttctttaagattatatcaccaaagccatgagtattattcggcgagagaatatctgccaaaaaattagaatgcctaatttctgtacgtgccacttttaatgcttcaaaagggcagtaaacatcttgcgcactagagagctgtataaaatcatcatcggccattatcaattctgataattgcttactatctataatattactcattactctctccatattctcttaaaacagtactgtcagacaaactctaacttttctctggaattgtacctaaattcaaattacgcgtaaatctcctcccatgcatcgacagaaccctggcgtagatttttaaaggtttctcgtttttctaaatgacgttgatggttaaaatgattttggaaaatggactgtattgagatgaatttttgcagtgatcgcatcgatcgaaatttattcatgccccgttctcgccgccggaaatgaagatgtgaattctcgacctgattgtttttgtattgcctagtattttgcaaatgcatggcacctatattcctcaatgcagccttataggagggcaatttatccgtcacaatttctttagttattccatgccgtgacatcagctttttcaacacttttagcgcggccttcctattgcgccgtttcgaaacataacactctaaaatcgtccttcgtgatcaatagcacgccataaataatgtgtttccccactaattttgacgaagactttatcaatatgccatcgccagtttgagggttagtttattgattttttcttaagatccttcggtaagagcgttccgaatttattccaccagtatcggatcgtttcatggcaaatatcgataccgcgctcatgaaggatatcttcgacttgtcgtaagctaagcggataacgggcataatacatcaccgctaatttgatgatttcgggactagttttaaaatatctgaagggatctatttttctcataatcagaaaaatatcagacccgcctcaaaaatcacattttaatctgacatcaccctttatagggtttcagaaggagctgtattagtgccaattttgataacgataacatcgattgtgtaaaataannnnnnnnnnnnnnnnnnnnnnnnnnnnnnnnnnnnnnnnnnnnnnnnnnnnnnnnnnnnnnnnnnnnnnnnnnnnnnnnnnnnnnnnnnnnnnnnnnnnnnnnnnnnnnnnnnnnnnnnnnnnnnnnnnnnnnnnnnnnnnnnnnnnnnnnnnnnnnnnnnnnnnnnnnnnnnnnnnnnnnnnnnnnnnnnnnnnnnnnnnnnnnnnnnnnnnnnnnnnnnnnnnnnnnnnnnnnnnnnnnnnnnnnnnnnnnnnnnnnnnnnnnnnnnnnnnnnnnnnnnnnnnnnnnnnnnnnnnnnnnngtgtaaaataaaagcgacaggccggagcctgccgcttcattttgtgattattctacgtcttgttaacgataaaacgccaatcacttatctgctaagatacataatcactaccaaaataaatttacaagcgcaattaaaaattaccctttatggttgtcattcttcccgcaatgtttattcttatcaaaagttacgtgaataaatatacggattcaaaatgacatataggcttgcatatgatttaggcacaagttctttaggctggtgcgtactggatttggatgataatggaagtccatgcggcattctcgatatgggcgtgcggatattccccgaagggcgagacgcgcaaagtaaggagcctttggccgttgcccgccgtggatcaagaggctctggccgccgccgtgaccgttatctgggccgtcgacgccgcctgatggattatatgatcgaaggtggattgatgccgacaaaccgcgccaagcgcaaagaactggaattgaaagacccttacgaattgcgcgcaaatgccgccataaaggaaatttcactgcacgaacttggacgcgctctgtttcatatcaaccaacgccgcggcttcaaaagcaaccgcaaggccaacagtaaggataacgaaggtggcgcaattaaaaaggggattgcggagctagagcatgcgcttatggccagcggtctgaaaactttggggcagtttttatacgaaaagcatacaaagcgtgagggcgtattggcgcgccccgaaaccaaaggacagaaaaacgaatatgatttttatcccgcaagggaaatgtatgagcgcgaagtcgatttcatcctgaataagcagcaggaatttcaccctgaactgacggatgatgtttgcaataaagttaaagagattatcttctatcaacgcccgttgaagccacaacccgtgggttggtgtacattcgaaagcaaggagaaacgcgcgcgactagccagtccttctgttcaatatttccgtatcttgcaggaggtgaataatctggagatcgaccagatgctggaaaccgatccgtggctgactcatgaagaccggcaaaaggtagcccaagccttgcaaacaaaaaaggaaatgacttttacggctattcgcaagcttttggggctttctggtgatgtgaaattcaatttggaggctgctgaaaaccgcaagggactaaacggcaacaccacaaatttcttcctgagtaaaaaagaatgctttgatgtgacctggtatgatttaactgcgcagcagcaagaagagatcgttgaatttctgatgaaagaacctgaccccgaacaggtaattgaaacgcttgtccacgattacgacgtgtcgttggaacaagccgagaagatatccggcgtgcagctaaaagacggctatggccgtttatcgttaaaggctatcaatgcgatccggccgcatctggaagaggggatgatatattctgatgcctgcaaagccgccggataccaccactccgactttcgcaccggcgaagtgttcgacaagctcccctattatgggcaagtattggaaaccgctgttatcggcggcacaaatgcggacacagaccgaaatgatcctgaaaaattttacggcaagattaataatccgaccgttcatatcgcgctcaatcaggtgcgtaaactcaccaacgccttgattgatatctacggtcagccgcatgaggttgtgatcgagctggctagagaattgaaatatggtcaggataggttgaatgagcataataaagagcaaaagaaaaatcaggagcgcaataaggatattaacgcggaacttgaaaaacttggcgtgacgcctagttacaaaaaccgtctgcaatttaaaatgtgggaagatttgtccgctgatccaatgaaacggtgttgtcccttcacaggaaagcaaatcggcatgaacgatatcttctccggcgagtttgaaatcgaacacttgctaccattctcgcgcagctataatgatagccctgcaaataaagttttgtgccatatcagcgccaatcgtattaaaggcaataagagcccgtatgaagcttttggccacacgcccgaatggagcagtattctggcgcgtgttgagaatctgcctttcaataaacgctggaggtttaaagaagaagcttgggagatcgcccaaggtaagaacgaggatataatcgcaaggcaactcaccgatacgcaatatatgacgcgtattgctgtgcggtatctatctttcattgtgccgcagcaaaaaagcgaaagccgcgtgtacggcattccagggcagctcaccgcgcttatgcggcgcaaatggggtttaaacaatatttttgacgatgaatcggaaaagaaagaccgaactaaccatcgtcaccatgccatcgatgctttcgtcgcaggttgcacaacgcggggtatgttgcaagccgtatcgcgcgctaacgaaaatgaccgtgaaaagattgtcattcccgaaccgttcgtcaacttccgcgatatactcaaagacaaagcagaagcgatggtgatttcctataagcccgatcatggtaacgcgcgcaaggccgctctggaaggtaaaaccgttgcagggttgcataaggagacggcttacgggcttttaagagacggagacccgaaaaaaagcacgaaggtttatgttacgcgtaaagccttaagcggttttacaaagcgtaaggatattgaagcagtggccgattctgcttggcggcaaactctattaaatgccatcaaagactgtaaagatggtagcgcagagtttaaaagcgctgtggctgagttatcagataaggaaaacgtccgtcgtctgcgtgtgcatgtggagcgttcatctgagacgatgatcccgatttttcagccccatgaaaaaggggaggagggagctataccctataaatactactcattgggcggaaattactgcgctgagatatatgagattaaattcggtaaagatgctggaaaatggggtattgaaattatttctaattttcatgcccatcaaaaagattttactccaaaatggcatcgggaatatccaacagctaaaaaaattatgcgtttgcaaatcaacgatatggttgcctatgaagaggacggggaaaccagaatttgccgcgtgaagaaaatgacaagtggcgttgtgtattacagagatcatagaattgcaaaggaggaggctgataaacttagtcggaagctctcaccaaaacaaatgcaggaatttaatctccgaaaaatatccgtggatattacagggcggattaaagacgccaaagcggcgttaaccaaaaataaaggaaaagccgcttaaatacacctatgggtttagatcgtatcgtagaaattgcaaccgataatcgtcacttagccgcctttcgcggctttatgactgtgtccgaaggtaagcaggaacttgggcgaattccgcttgatgatataagcgcagttattgcgaacgcacatggcttaacttattcgaataatttgctgaccgcgctagcagagcgcggcgcaccttttgtaatctgcggtgctaatcacgccccagcggcttttctttgggcagtagatggacatcacacacaatccgccagaatagattctcaaataaaggcaacgcagccacttggcaagcagctgtggaaacaaattgtacacgccaaaataaaagggcaggcgggtgtattggaggcactggataaacctaaagcgccagtagattttctagcttcaaaagtcaaatctggtgatccccaaaatattgaggcgcaggctgcccgccgttattgggggattctatttggagaagattttcgtcgggatcgcaagcaagaaggacaaaattctctcttaaattacggttatacgattatacgctccagcgtcgctcgtgcacttttggcgtctggtctgcatcctgcaatcggaattcatcaccgcaatatttataaccatatgagacttgtcgatgatgtgatggaaccataccgcccttatgtggattttgttgtttggcatatgacgcaggaggggtgtcacgatgtttcaccggaatcaaagcgactgctggccagtatgatggaaatggcgattcctatgaaagacggtatatacccgatgcgccgcgcgatacagaaaactgctcaatcattggcaaaaatttatgaaagtggtaaggcggcaaaactagatttaccggaatatgggctgccgctgtggcaagcacaggaggatggttatggagcatttgagtgggcacaggctgatgtggatgatggttatgtttgaccttccggtcggcacgaagaaagagcgcagcaaggccactaaatttcgacagtttctactggatgagggatttgaaatgtcgcagttttcggtatattttcgcttttgcggtgatcgtagccgcactgcgccttatgtgaaaaaaatcaaaatggccgcaccacctggaggcaagattagtattttgcttttcaccgataagcagttttctgatattgtaacaatacagaatcgtaatgtagcgaggatgcctgaaaaaccggaacaatttgcattgttttagagctgatatgaccattttttatgatcttataaccaagaaaaaagcccctatatcaggggcttgtctcatgaggtattttagcagataagagattggc

SEQ ID NO: 4086 - DNA, 24788 bp, synthetic construct
  source 1..24788: mol_type = other DNA
  misc_feature 1..24788: note = Synthetic
ctggatgaaaaaggcaaatacgtgacgcccgaccagggcaaacaggtcgcgccgctgccggtttacgagaagaatctccgcgaactggtcgcgcgaatgaaggcgaccggcgcgaagttgatctggtgttccaccacgccggtgccggaaggctgcgacggccgcgtgaaagattccgagatcgaattcaaccgtgttgcggaacaggtgatgaaggaaaacggtgtcgccatcaacgacctgcacgccctcgccgcctcgcgtctcgcggagatccagcttcctaagaacgtccactttacccccgaaggctacaaggctttggcgcaacaagtcgccgcccgcatcgaagccgccctgctgaaactgtaacccgaaccagaaagagtccatgaagaagaaccaccacgctgctcccattgtcgccctcttcgccgcgctggcgtttatcaccgtgactgcggcgccggccgcggacatcgccatccagagcggacagaaacttgcctttctgggcgattccatcactgccgccggatggggcaatcccggcggttactgcaagctcgtcatcgccggattggaagccaacggcatcagggccgtcggcattggcgctggcatcggcggacacaagtccaaccagatgctcgaacgtctcgagcgtgacgtgctgagcaaaaagcccgactggatgacgctgagttgcggcgtcaacgatgtctggcacggcgacaaaggcgtgccgctcgacgacgcccaggccgccgccggcaaatacgagttgcgaccgggcgaacccgccaagggcacttacaaagccaacatcaccgccattgtggaccgggcgcaagccgccggcgtcaaggtgatgctcctcaccgccaccgtcattggcgaggaactcgacaacgacaacaacaagaagctcgccgtcttcaatgatttcctgcgcgcgctggcaaaggaaaagaaatgcctgctcgccgacctcaacgccgtgttccagaagcagatcaaggccgccggtaccactgccggcaagcccggccgattgctcaccagcgatggcgtccacatgaatcccgatggcgatcagttgatggcggtcaccatcctgcgcgtcttcgggctcgacaacgcgcaactcgccaaggcgcggcaagcgtggctcgatattcccggaggcgcgaatctgcacgtaaccttcaacgcgaaagaccggaagcgcctgacggccaatgtcaacgtcagcctccgcgagcgccccaagctccaagccgctgcggacgccaagaaacaaaccgtggaccagatgctgcgcgcgatctacgcggaggaagtcaaacgcctgctgaaaccggccggcgagttcgattccgttgatgccatcttcgaggcgaagaaggacagggaagtccagaccgcgcttcagcagaagttcgacaagcgcgtggatgccttgctcgtccgctgaggtggaacggatgttctcatccgtccagtaacgggcctggacgcccgttctacaagcgccaccacgccgccacgaacatcccgttgccgcctgtgtcctgcggccacaaacagagttgcgccgaccgcgacggcgacggctggaaggaattggccatcggcagcggcgtgaactccgggtgggacttggaaaactcctccgccaccgcgctcgtctccgaccgcgccaacgtgcaaacggaataaaaaagccggccgcccggcttcacggcgggcgcgatggccgccaacaaccgcttctgcacctccgccagctcgcgcacatcctccactgtcgtcgtccaacgcgcatggggattccgctgccacgtgcccgtgccgctgcacggcgcgtccagcagcacgccgtcgaacttcgtccgcatcggcagccgctcgccgccatcccacaacgccacgcgctggttgaaacacttcgcccgcgccgcgcgcagcttgagccgtttcagccgccactcggcgcggtcgctggcccagatgaggcccttgttctgcagcaggtcggaaagatgcaacgtcttgccgccctcgcccgcgcacgcgtcccaccacgtctggcccggttgcggatcgcagagcagcccgaccgcctgcgaagcgatgtcctggatttcaaattcccccgcctgaaactccgccgtccgaaacaaatcctttccaccctcgtaaaacaccgcatccggcagtgtaaactgtcccatttccgccgccgcggtgagcgcatgaaccgcgccgtcgccgagtttcctcgccagcttctccccctgccctcgtttcgcccgcagccagagcaccggctcgctttggatggcagcggcccactccggcgtgaccttgatctcctcccgcgcccacgccggcaccgcgcgcgccagcagttcgtcctcggagaatccctccggcgcgtcgttgaaacgccgcgccagttccatcgcctgctccacctgcctgccgaccggcagcgtccggtccagccagcccagccagcgataataggcaaataccgtgtgactgacctcgcgcgactccgccgccgtcagcccgcctgccgtccgcaacgtctcgcgaagcacggcgtccgccgacttggcgcggctcgccgccgcgatgacgccagccacgagctccggcaactgatgatgtggtgtgtgtgttttcacagtttaaaaaaagatgctcgtcgtgtcctggaggtgacgaagttcaccgcagagtcgcagagaacgctgaggcgcgcaatgtctctgtgctctctgcgcctctgcgttaaatatacatcctcagttcatcaagacctacgattgtttcaagcttgcgccaccaactggcgcagcacgaagggcaggatgccgccgtggcggtagtaatccacctcgatgggcgtgtctatccgcagcttcaccgccacacgctcggtctggccgttggcgcgtgtgatctccagcgtcaggtcctggcgcggcttgaggttctcgcccaggccaaggatggtgaacgtctcggtgccgtcgagcttgagcgtctgcgcattgacgccctccttgaactggcacggcagcacgcccatgccgacgaggttgctgcgatggatgcgctcgaagctggtggcgacaacggcgcgcacgccgagaaggctggtacccttggcggcccagtcgcgcgagctgccggtgccgtattccgccccggcgaggaccacgagcgacacgccttccttctggtatttcatcgccgcgtcataaatcgccatcacgctgccgtcgggctggtgtttggtgacaccgccctcgacgccggcaaccatcaggttcttgatgcggacgttggcgaacgtgccgcgtgtcatgacgcggtcgttgccgcgacgcgagccgtagctgttgaagtcctccggcgcgacgccattggccatcaggaactcgccggcgggcgacgttttcttgatcgagccggcgggcgaaatgtggtcggtggtcaccgagtcgccgaagatgccgagcgcacgcgcgccgcggatttcagcgatggcgccgggccgcatcgagaagttgacgaagaacggcggctcctggatgtaggtgctcttcgcgtcccacgcatagacctggccggtggatgacggcacctcgttccagagcggattctggtcggcgaagttggtgtacaatttgcggaacacttccggtcgcagcgcggactgcatcgcgtcgcggatttccgccagcgtcggccagatgtccttgaggaacacgtcgcaaccgtcgcggcccttgccgaccggctcgcgcgtcatgtcaatgtccacgcggccggcgagggcgaacgccacgaccagcggcggtgacatgaggaagttggccttgatattctggtggatgcgcgcctcgaagttgcgattaccggaaagcacgctggccgcgacgagatcgttcttcgtaacgacctcctcgatggcgggcgcgagcgggccggagttgccgatgcacgtgccgcagccgtagccgacgaggttgaaacccagcttgtccagatacggctgcaacccggtcttggcaaggtaatcggtgacgacgcgcgagccgggcgcgagcgaagtcttgacgacgggattgacaacgagaccccgctcgacggcttttttcgcgagcagcccggcggcgagcatgacgctggggttgctggtgttggtgcaactggtgatggcggcgatgagcacgctgccgtggccgatctcggcgtcgaagcgcaggaacgccgacggcggcaattccgccgcggcgtcgggtgcgggatggtcgtcgcgcatttcggattcgctcgccgaaaccgacggcttgcgatggccatagctcgcgtcggcatggaaagccgcgtcgctgctcctgactggcacgcgctttcccaaatcctgcggcgatttgccgtagccggatgccgcgaccggtttttgcaggaggttgacgaatgcgtctttcaacgcggacagctcgatgcggtcctgcggacgtttcgggccggcaacgctgggttgcacgtcggcgagatcgaggtcgaggtccacgctgtagatgacgtcgcccttgcgcggaatgccgaacatcttttgcgcgcggaaataattctcaaacaccgcgcactgctcctcgctgcggccagtctggcgcatgtaggcaatcgtctcatcgtccaccgggaagaaacccatcgttgcgccgtattcgggggccatgttcgcaatggtggcgcggtcggccagcggcaggctggccgcgccggggccgtaatactcgacgaacttgccgacgaccttcgccttgcggagcatctgcgtgacgtgcagcgcggcgtccgtcgccgtcacgccttcgcggagcgcgcccgtcatgtgaacgccaacgacttcaggcgtgagaaaataaaccggctggccgagcatgcccgcctccgcctcgatgccgccgacgccccagccgacgatgccgaacccgttgatcatcgtcgtgtgtgaatcggtgccgaccagcgtgtcgggatagaaaatttcagatttgagatttgggacttgagattggggatctgagattccagattgccgcgagagcacgcccttcgcgaggtattcgaggttgacctggtggatgatgccgatgccgggcgggacgaccttgaacgtgtcgaacgcctgctggccccatttcaggaactggtagcgctcgcggttgcgcttgaactccatctccatgttcagccgcaacgcctgcggcgtgcgcgcgaaatccgtctgcaccgagtggtccacaaccaagtccaccggcacgagcggctcgatgagtttcgggttcctgccgagccgggcgaccgccgagcgcatggcggccaggtccaccagcagcggcacgcccgtgaagtcctgcaacacaatgcgcgcgacgatgaacggaatctcctccggcgccggcgccctggcattccagttggcaagggcgcgcacgtcgcgctcggcgactttcctgccgtccacgttgcgcaggacggattcgagcacgatgcggatgctgacgggcagcttcgagaccggtccgacgcctgccgcttccagagcgggcagcgagtaaaaccacgctttccggccagagccggcgtcgaaagtttggagcgagttgaaaaagttgtgcggtttcatatccttaaaaagcgcgcgcaacagtagcttcatgtgtgcgtggttgcaactgcgagctggttgcctgccccttggcgccgcccgctgtctgcttgacatccgtgcgcgagcggcacatttttcagcccgcgaacagcaaccagcgccatgaaaatcccatcctgtatccttctgcttgcggctttcggcttcactctcgcggcggatgacaagaaacccacaaccgccgacgcaaccgtctttcgcgaaccgttcacactcaagttgcggctggacaaagaccgttactacgaacagaaaatccccaagacgcagttcgtcattgaagataacgtctatttattcgtgggtgagaaattcggcattgtcctcgaaattgactacaagggcgtattcgccatccactatcagccggacgagggaaaagccgatgtctttctggaactcaaggaggaaaccgcgaaagacgggagcgtttcaacgacgctgattctccataacaaaacgaaacacacgctgaacttggacacactcctgaccgttccggaccagcagggcatgacgcgcacacgcatctccccaatccagcccggctcgaccaatcgtcagacgtggccccacgccattatccaactttgcttgtgcaacgtccaagtggggaaggagtcccctacttcaactcggtgatgaagatgttgcggaaatagtgctggccgccgccgggcacctcggcctgcagggcgatgtagctttccgccggcccctcgacaccctccgcgctccacgccggcttgccgttgatctcaagctccgcatgcgcaccgcgcacggtcaatttgaaatggttccactcgtgatccttgcacagcccttcactcttggcgcctttcaagcccgccacattgccctcgtcgccctgcctcatgttggcctgatagcgcaccggccaggggcgcttgggcgggatcgggtcataacggaaatagatgccgctgtcccatttctccggcttgagcgctttccagtcgcactcaaaaacaaagtcgcggtatttgcgctcggtctggaccaaaccattgccggccttgatgaacaacttgccgtcctccaccgttgcctcgcaagtgatcagcgtccagccattgagcgtcttgccgtcgaacaaacaaacgcgctggccggcttccgccgcctgcatggtggttgccgcggcgcacatcccaaccagcgccgcacccaggaacaattggattttcttcatgacacgatttcgtaacgcgccgccgcaccaaaagcaatcgtgaagagtggggcacgcttgctgctttcaccttgagttggcacgcggtggaacctaggcttgcgactgtattcgaaccccacaaagagcgccaatcgcgatgagcaacgatgaactgcgccgagtagtctgtgttgtgctggccgccggccagggcacgcggatgcggtcccacaacacgcacaaggtctgctttgatgtcgcgggcgagccggccatcctccgcaacatgcgcgccattgaatccgccggcatcacgcgtttcgtggtggtggtcggggcgatggccgcgcaggtcatgaccaccgtcgcctcgcggcatcccggagcgatgtttgtctaccaggccgaaccgctcggcacgggccacgccgcgcggctggcggccgaggcgctccaacgcatgggtcaccgcgggccggtgtttgtcacgatgggcgacaagatcatcgagccgcgcgtgataacggaactgctggacacgtttgggcgcgcccaaaccgacctggctttcatgacggtgcggaagatgcccggcgacaccgagggccgcatcgtgcaggcgcccgacggcgccattctcggcaacgtcgagttgaccgacatccagcgcgcccaactcatggaccggctcgcgagcgcgatccgcggcaaacgaacggtcaagccggagccactgcggcaaatcgcctcctcggtcgtgtcgaatcccaccaaactcaagcgccttctcggtccggtcgccaggctgctggagcccaaaggcccggtcgccgccgtggaattgaagcgacagatcgaggccgccggacggacggtgacgctggccgagcggacgctcacggcggcgcaaatcgaggacgcgtcgcccacagtcaacgtttcgctctatcttttccgcgcgcagccgatgtatgaggcgctggcgcggctcaaatccaacaacgcccagggcgagttttatcttaccgacgccatcaacgacatggcgacgatgcgcgggccggacggcgggacgctttaccgcgtgcggatggtggttctcgaggaccgcgacgccgtgctgagctacaactcgccggatgaactggtgcaagtggagagcgtgctgcggcggcggctcgcggcgcaagccgacaagccggtggtggaagcggcccccctgagccgcaaagtcctgaaaccggttttggcgtggatcgaactgtttgagaagtttcctccgaggcttcgctcgtatctggcgacgctttatggcgacgacagtgccagtctttccgagcggcgttcggccattctgtccacgctaaggcttttcgccgcgcgctacggcgaggaccgcaaagtggtcgtcgcgcgcgcgccgggccgggtaaacctgatgggccgtcacgtggatcaccgtggcggccacgtcaacgtcatggccatcaaccgcgaagtgatcttcgtcgccgccgcgcggcaggacgacaccgtccgcctcgccaacacggacggccatcggcacactgacaaggaatttcgcatcgcggagcttctctgcgggctgacgtgggaaagctggctgcattacatcaactcgcagcaggtccagcagatcgttctcaacagcgctggcgactggtccaactacgtcaaggccgcggtccttcgccttcaggaatccaaccgccacgcccaggtgctcggcatggattgcgccgtcagcggcaacatcccgatggccgcgggcctttccagcagttcggccgtggtggtcgcgacggcggcggcggcggcggcgctcaaccggttcaacctgacgccgcaacagtttgtcgatctgtgcggcgaaggcgagtggttcgtcggcagccgcggcggctcggccgatcacgccgccattcggttcagccatcgcggcaaggtcgcccatgtcggcttcttcccgttccgccttgagggtaattccgactttccgcgcgaattgacgctgttgatcgccaacagtcatgtccgcgccgccaagagcgagggggcgcgcaaccgtttcaacgagaaggtggccacttatgaactcggtttcctgcttttgaaggatcgttttccccaatacacgcacctgctcgaacacctgcgcgacgtgaacccgacgcggctcggcgtgaaggtgggcgaggtttactcgatgctgagcacgctgccggaaccgctgacgcgccaacagttgtgcgaactgctggcgccgcatcatagcccgcaactggagaaaatctttgcttcgcatcaggagcctgacggctactggccccgcagcgtggcgatgtttggcatcgccgaatgcgagcgcagccggttgttcgcaaacctgttgcaaaaccatgacatcgcccgaatcgggcagttcatgcggatcagccacaacggcgaccgcgtcagtgaacttggcgcggacggccgcatgcatccgcgggattggcgcgtgacagacgcgatgctgaattcactcatggaggaccttcgcagcgaggagcccacgcgcgtcggtcttgcccaactttggacgcgacccggcggctacgcctgcagcacgccggagattgaccggatggtggatctggtcaaccgggttgaaggcgtttgcggcgctcaactggccggcgcaggacttggcggttgcatcatggtgctggcgcaaaaggaagcggtggcggacgtggagcatcaactggcgcggcactactacgaacccgccggcctccagcccgccatcacggtttgcgtgccggtggaaggcgcgggcttgttgacggtgtagccccggtagctttctgcaaaaccggcgcggcacttcctacaaaccacggaacccgcaaccaacccggacaccgcgtatagcaaactgctatacgaaagcctcacgatttcctgcgttttccggttgaaaccggcgcgtccggtctgtcacactaccggccacccaaaggagcggaacgaccatgaatgaaaccgtctgggcctttgacctcggcaaagcctccatcggcgaagccgtgagacagggaaataagtttctccacaaagcatcgctgctgattccggcggaccttgggcgacgcggaccggcaaccatgtccggcactcccgcgagtcggtatcgtatgttgcagacgcgcctagcgcatgcacggcgcgaggagtggcttgacagggtttggatggcggcgggattgacgccactcgtgagccgcacggtcgagcacgtggacttcacagtgcggcgggtcaaaaagaatgtgcgaggcaaggtgcgttggcgaaacaagaaggtggggggacgatggattttgaaaagcaaagccgaccccagcttggaacgagaattcggcggggcggatgattcagagtgctacacttcttgtcttcttcgcatcaagctgctgaatggtgacacactaaaagactggcaactttacaaagcgctattctctgcgattcaaaaacgcggctatgctgatgtcccttggaaggttcaacgcaaagcgactgaggacaaacccaagaacgcacaagaagaagcagagaatgcgattgctggtaagcggtggactgatttctcaaagcatcctgatgtggccaagatcgggacacatttccaacgcgcctgttattttgacgcttggcacatgaagctttggaatccggccaagccaaaggagatttctttgcaccccaccgagcgccaagagagcacgcaaaaggtggttttcccggggcgaatcatcgccgaggaagtgttggctctagcccggaaggccaccgaacaagagaagcgattggagacaggcttttccaaagtcatggaggattggaagaaaagcgtcaaggaacgcatcgcccgaatcaacgctcaccgcgcacacctgggaaaatcgcttgtttgggtgcccgacttctcgcgcggggctaataatttcgcggagttattggtgtatggaccgggcggagcgccggaaaaccctatagatggtgtgcggcatattgccagtcacgatccagacatccgtcgcgccaccggcctgcacccgggcggagcggatgacacaatgggcgcgcttaatcagaaggtcgcgcggttcgaaaaccgtttgcgtgcgtcttgcgccttgattcctcgccttgttgtctgcggcaaccttgcaccagaagaatcagtaagaatcaaagagcacgaccatgagcgtctcctgccctcacaagtgacgctcttaatgaagctgaaaaatatgagcgtggaggaacgaaatgcggcgcgcaaccagcgcggtcttaagtcggaagaactgcgcaaaatatttgaggcgttgaatccaaagcgaaaatatcatctcacaaagcgggagtggcgagattggtgccgtcatttcgaggttttgccggtgactgatcctgacgacaaggatggtgcgaaaaacaatcaagcccctgccgaaggcacggagaagaaaaagacggatgacttggcagtagaaaagccgaaaccggcaggtcgaagcaggttttcgcgccccgcgttgctgatcctcaaggaactactgttaagcggattgtcgccaagagttttccatgacgaccttgccaatgcacgcacagttttgaaggtcaagacagggccgcgctcggggcctatcatcgagaagacgttgaatgtcgctgcggatacaggcgatgccaaaacggacaccaagaatagaatgtgcggattgcttgtttccgacctgcagttcctgctccgcatgggaaaagacggaaaaccggcggactcatgggatgacctttacattcccagtcagcaattagaccggcgcgctcaggaggcgcaagcgacgatggaagaacgagcgtcggcaatccgcgcccttattggcgaacagaacaatccgattgtccgccacagactcgatgctttttggaagcgactccaaaagctggaaaaggcttacgatatcccacagcgtattgtgttggagtttgtgcgggacgactccgaaacatcttggctgggaacggaggccgctgctgaaatcacccgcgctcaaaaagagcagcgcgaacgacgcgaacgcgcccgcaagatgcttgcggagatggggaatccgaatggtgatgtcctgaagtatctgctttgggaagcacaaggcggacaatgcctgtacggcaaacctgccggcaagccacagtgcccatacaccgagaccggactgagtttcactgatctccacaaatatcggattgaccacattgtgccgcgcgccaaaggcgggccggattcattctcaaactatgtcctcaccacggatgagaccaatgctgcgaaaggcgaccggacgccgtggcaatggtttcgagaggaccgcaatcagcaagattgggacgcctacaagtcgcgagtttggacacgagtgaaccaattaggttggaaaaaggttcggctactgctaagcgcggacgccgaaaagctagtggagcgttacactccgttggccgagacggcttggattgcgcgtttggcacagacggttgccgggttgcacttcggctgggtcaatggcaatgaccgcgaaggcaacaagcgcgtcattaccgtttcgggagggctgacgggacgcgtccggcgccaatattttctcaacagcctcttgggccgtgaccgggagcttgacggaaagatttccgagcggttggattcgctggcggagttgcgctcgtctggtttgccttggaaggaacaaagggacaaagcccgggcgcttcgaagcgaacttgatgaactcggcgctcaggccaacaaagaccgtgcagacaagcgtcatcatgcacttgatgcgatggtcttgagttttctcgaaggctgggtaaatgaccctaaacgggaggaggaatttcgccttgaactattaggcgacaatccaacatttccaccgaacttaatgggagagattggcaaactccgcagccagatcatcgcaatggaggcaacggtggccaagtcgggatcggcggaggagcgcgctcggctcaatgaacgaattatcagttgccgtgatgggttagccaagatgcggatggaacgtaacattcgcgcggtgcgcgcagcctttcggcgcgagatcgaaggcgacgaaaagggaggcgtcaaaccgattcttccgtttgcgcttcattatccaaagccgcatctggaagcgacgtttcaccggggcgtctggctgaaagtagaaagcgcgtcgcgcgcagtgcatgcgaccattgacgactacgacaaagcattcgagcaagaacgcgtgcctttgctggaattgccgaatcaggaaaacttcgtcaccgaggaaaaggagcattcagttgcctatgctgtgctccgtatcgccgaaatcgcgccgcacaaggactacgacgcgatgtcggtgcgaaaggccgttgagagctttcttaagacgaatccttccattgaggaatggcaggcttggtgcacctgcgatgtagcgcccgcgggcatcaaaccaaaaaaggggcagccgaacaaacgcgagatagttttatatcggatcgaagagaaacgaacaaagcgcgtatcgctttttgggcttggagtaggcagcagcgaggttcccgaatacgatcgcgcacactttgaaatgcagatcaaccgtctggtttgccgaccagaacgcagcaaggacaaacccgagacaccactccaaccagatggcgaattgcaagccaagctgcgcgaactccaaccccgcatcgaagcgttctatcaggagaatcctccggacccaggcgaccgtccacggaaggaatccgcccgcgctgaatggcaagcacgcaaagaccgagctaaagaagcatgggaacaattccagaaggatactggcttggatcggcacaagcgggtttgtcttcgcaccgactcagcaaagacgactgaccggcgttatgaactggcgggtttatcgagccttctgcttgtcagggtaaaacgctacgaccacgaaaacgcagagaaacaaatccagttcctttccgacgcttggacgcgctttcaattgcgcgagttcttgaaacaaaatccttctcccaagcaatggaaggaattctgcggcacatttgttcaggtcaggcgcgaagaattgaaacaattcctctcaccgcagccacaaactgcggaagaatttattcggttctatcagcaacaagccgaggcgtccgcgcggcgagatggcgctgcgaacaaaatccgtagcatcgtaaaaacggtccaaaaggttatcggcaacccacacgcctttgtggatgtttccaaagacggttcgggcatatatgccacatctggcaatcgtggctatttcgtgtggcggcgtcgaacgaccgatggcgagaatgcagaacagttcgtctatggcacacagcctgtccaagctttcttgcgcttggctgacgtgaaacggcaacttttgcgacaagaaggcatggagttgctggacaagcggctttggcagacagacatgctgcttcatctgcccaacgatacactgagcggaaagaaaaccgtgccgtctggctactatttgttcggttcaatttccaatggaacaaatgcgaccttgaagccgatggctggcggggatgtttacgatggcattagaatcgacttgctgctggagaaggggttgagccgcgttcatctagaaacggaaacaaaagaaaaaacgcaagtatgagctatcacatccttcacattctcaagcatggcgcgatgctgaccaaggaccgagggtttcttgtctgccgcggcgaagatggttcggagggacggattcctcacaccgacgtgcgggcggtgatcatcgcggcgcggggtgtaacgatgtcatcgaacttcgtttccgcgatcttggaaagtgacggcgtcatcctgcactgcaacgaaagctacaagccgtgcggcatcaccgcgccgttggcgcgggtcgtggatccgcttgcgttcttccatcaagcagaccaaccgaaaaggctcaacgcgaggctttggcaggaactcatacgtggcaagacgcggaaccaattgcatgtgctggcgcggaagaatcttcactcggggcatctccaacgcgccctcgaccgggagacttttgacgaggccaactgcgcacgtcgctactggcaattgtatttccctgccatcggctgggtatcctccaagcgggatcgcaaggaagaatcggccccgaaccagatgctcaactacggttacgcggtgctcgcggcgttgtgccatcgcagcctcattgttcatggattgtcgccgttgctcggcgtcaaacacatcccccgtttccattccgatgcgctggtctatgatttgatggaaccgttccggccggcggtggacttgatgctggcggaattcatggtcggccaggacatcagcatgaaggcgtggtgcaaaaaggtgggaacggaactgcgggaaatgcgggtgatgcacactcggttctcgctgaaactgatggatgcgatagacgcttccgcgaactcgctcgcgcgcagctatgcggagatgtcggcaaaacccttctgggtgccagaactggcggcgtaaggaggtctgacgcgaatgcgcgtcgaaaagcaaagtccgtttcgtatgggttggattcttgccatgttcgatctgccagtgatgttgccggaggaacgtcgggcggccacgcagttccgcaaagacctgctggatagcggatacctcatgatccagttctccgtgtatgcacggccctgcgtcactttcgagcaaatggaggggcacattgcgaagatcaaaccttacatcccagaggcgggaaacgtgcggctgatgttcatgacggatgaacaatggaaaaggagtttcaccgtcgtcggaccaaactacgaccaaggcaaacggtcggttaacccggacctgccaaagcaggttgatttctgggaataaaaaaatagcggcgttgaaacgtgctaggcagtggtttcaacgccgccgaattagttaaggcttctcctcccagagagatgacttaaaccgcgctaatactgctcacctcagccgcttccgtcaatcctattctagctcatctctctgggaggagaagccaaaactttgaacgcggttgcggctcggcagagacgattctagctcatctctctgggaggagaagccaaaacttacgatcattgcgcttcggccttggcgagattctagctcatctctctgggaggagaagccaaaacaagtcgtccgccgcgtctcgcagaatgcgcattctagctcatctctctgggaggagaagccaaaacatggaggcgtcgtgatccgagcacctgatgcgtgggcgcatccggcgctcgtctcacgccgggcttgccacgcacagcgcatgagtaaccactggcaggaaggaacagcggttggacggaaacggcggttttctccatgaccggacaggcaggatgcctgtccggcgttgcccgactacgccgcgccgacctggttctggaccgcatcggcaatgcgctgcgcgtgccgctcgatgacggcgcggtcgcggccctccaccgtaacgcggcacagcggctcggtgccggagtagcgcacgatgacgctgcccgcctcctgaagcacggcctttgcctcccggatcgcgtcctgcacgccaccgatggagtccagcggcggcttggagcgcaccttgacgttcaacatgacctggggaaaccgctgcatgacgcggcaaagttcgctcagcgtcttgccggtttcgcgcatgacacgcagcacctggagcgcgctgacgatgccgtcgccggtggtcgtgaagtcgcgaaagatgaggtggccgctttgttcgccgccgacgctggcgtccagccgccgcatttcgtcgatgacatacttgtcgcccacttgcacgcggacgaccttgccgccggctttgccgatggcctcgtcgaggccgccgttgctcatgagcgtcgccacgatcgtcttgttgcgaagctggcccttctggagcaagtccacgccggccacggcgaggatttcgtcgccgtccaccagccgcgcgttctcatcgcagaaaatgacacggtccgcgtcgccgtcatgggcgatgccgaggtgcgcgcgatgcgcgatgacggcctggcgcaagccgctgggatgctggctgccacactccttgttgatattcaggccattgggcgcgttgttgtagacaaacaattccgcgcccagttcacgcaggatgcacggcgtgcttttgtagccggcgccgttggccgtgtccacgacgatgcgaaaaccgtccagcgtcatgccgcgcgggaaactggtcttggcgaactcgatgtagcggccgagcgcgtcgtcaatgcgtgtcgccttgcccaccgcgccggcggtggggcgaatcgtgtctattgcgccgccaaagaccagctcttcgatctcgtgttcgacggcggcgtcgagtttgtagccgtcgcggtcgaaaaacttgatgccattgtcgtcgtagggattgtgcgacgcggtgagcaccacagcggcgtcggcgcgcaaggaacgcgcaatgtaggccacccccggcgtaggcaacggaccgatgagcagcacgtccacgcccatcgagagaatgccgctggtcatggcgttctccagcatgtagccggagagacgcgtgtccttgccgagaacgattttgtgccgcgacgagccgcgctcggcgggcgcggcgtgacggttgcggaacacatgcgcggcggcgcggcccagtttcagcgcggtctcggcggtcaccggttcgatgttcgccttgccgcgaacgccgtcggtgccgaacaacttcatcgtggcaggcgttggatcgctcatggctctttcctacgactttcgccggagttcgtcaatcacgcgcaacgctggtgccgtctcggccacgtcgtgaacgcgagcgatgtgggccccgcgcgcgaccgcccagaccgccgcggccaccgagccctggcgcaaagcgtccgcttgggcggcgtccgggccgagcattttggctatgaagcttttgcgcgacacgccaacgaggacggggcggccgagcgaaaccaccgcctccagacgccgcagcagcgtgaggttgtgcccgaccgttttgccaaaaccgatgccggggtccacggcaatctgctccgccgggatgccagcggccttcgcggcggccaaccgttcgcgaaggaaacccaccacctcgttggtgacatcgccgtagcgcggatccagttgcatggtttgcggcgtgccttgcatgtgcatcaacaccagcccggcgccggcgcccgcgacggtcgccagcatcgccggatcgaagcggcccgcgctgatgtcgttgacaatgtgagcgccggcttcgagcgcgcgccgggcaacttcggccttggtggtgtccacggagatgaggaagcgcagagcctggggcatggagcgtaaagcgtgaagcgcttccacggttgggatgacgcggcggagttcttcatcgagcggcacaggcgcggaaccgggacgcgaagactcgccgcccacatcaatgagttccgcgccagcctccaccattgccagcgccccgtccacggcggcctttggatccgtgaaactgccgccgtcgctgaaactgtccggcgtgacgttcaggatgcccatcagccggctgcggccgtcggaaaaatccagggagaaattccggccgctccagatcatgagaatggaccgccggttcggttacgcgctggccggtgcgctgcccatgccgggcgtcggtggcaacgacgaaggttcggctttgctctccgtcgaggcgggcgcggtgaccactggaggaacgttcttgtcatcgccggaatcgtgcggtcggctgagtttgccggtgcgcacgagctccatcacttcctcgccgtcaagcgtttcaaattccaacagcgcctcgccgagcgcaatcagcttgtccttgttgtcgatgagtatcgccttggcttgctcgtaagcctcatccgtgaagcgacggacttcctcatcaataacgcgggcggtggcttcgctgacgctctgcgggcgggccagttcgcggccgaggaagaccggctgttcgtcatccacgccataatgaacattgcccagcttttcgctcatgccccactcgcacaccattttccgcgcgatggcggtggcatagcggatgtcgccataagcgccgctggtgacgtcgccgagaatcatttcttcggcaatgcggccgcccatgaccatggcgaggcggaccaacagttcctttttcccctgggtgtatttatccttcgtcggcaaagacatcgtcgagccgagcgactggccgcgcgggatgatcgtgaccttgtggaccggatagtcgccggtgtcgagcacgacctgaaccagcgcatggccggcctcgtggtaggccgtgcacttcttttccttctcatccatcaagcgactgcggcgctcgcggccccaacgcaccttgtcgcgggcctcttccatctcctccatgcagacggcctttttgttgccgcgggcggcgatgagcgcggcctcgttgacgagattggcgagatcggcgccgctgtagccgggcgtgccgcgcgcgatgatcgccaggtccacttccttcgcgagcttgacgctgcggacgtggatcttgaggatctgctcgcgttcgttcatatccggcatgtccacgacgatctcgcggtcgaagcggccgggccgacgcaacgccgggtcgagcacgtcgggccggttggtcgcggcgatgatgatgacgccctcgctggtgtcgaagccgtccatctcggagagcaactgattcagcgtctgctcgcgctcatcgtggccgccgccgatgccggagaaacgcgagcggccgacagcgtcaatctcgtcaatgaaaatcaggcacggcgcatgtttgcggccctgttcgaacatgtcgcgcacgcggctcgcgccaacgccgacgaacatctccacgaaatcgctgccgctgatcgagaagaacggcacgtccgcctcgccggcgatggccttggcgagcagcgtcttgccggtgccgggaggaccggtcatcagcacgcctttcgggatgcgtccgccgagccgctggaactttttcgggtctttgaggaaatccacgatctcggagatttcctccttggcttccttgatgccggccacgtccttgaaggtgaccttgttgcggtcgcgcgagagcatccgggcgcggctcttgccaaagctcagcgtgcctttgccggcggacttgaactgccgccacaagaagagccacaccagcacgaagaacaggagaatgggaatggcgggaaccagcccctggatgaacacggagttgtcgctttgttgggagaaacctttgctagccagcagatcgctgagttgatcggtgacgcgatgtttgaggtggaacagcgtcgtcgtttccttgccatccttcttgacgcgcatggtgcctctgatgtcctgcagcttcggctccgctccgtaagccaccgcaccgtcctgaatctcgccggcttcgagcttctgtatgaaatcgtgatagctcaattccgtcacggggcgttcgtgttgcacctggaagacccagaacgcggcggtcagaatgaggaagccgaaaaaaagcaccagcccgcgaacgttcaaacggttgtcgcgtccctctggcggcaacggcttgcggttgttgtcattcttgttgaacatagaaactttcgcgctacgactaccctattctactcttcgaatgctagcatggccaccctgtcttggcaatggcgctttcccgcgctgccgcggcgcgggttggcgcgccttcgtcatggtcctcgagcggggctggcaacacccgcgtggtcgcgtcgcaggcggctgaagtgttcccgacaagccgggatgaggaaggcaggcgatcttcggacaccgttcgtcaaccgaaatgccgatggaggttggcgatccatgccgccagcatcaacaccaccagcagccacgtgacaacggtcccacagcgccgccacaccggccggatgatcgcgcgatccgtgatcgcctcccacgcaaccagcgccatccacgcccccagaagcagcgccaacggaaccgccgcgatgttgaaggcggaagcccgcgccagttcgccgtggcagagcgcagcggcggcccgtgtcatgccgcacgtggcgcagggaatccccgtcaaccggcgcaacgggcaggtgttgggcagccagtccgccaagcccatccggagtgccgccgccgccagcaagacaaccgccagccaccacaacgcgcgcgaccgcatcccgcctcaaccgaatttgagcgaattgccctgggcgtccttcatgatccccatgccgaccatggcgaaatcaatcgtagcccaaatgccgcaaccgccaagcgttaccagcttcagcacgcccagcccggtgtaaccaagataaaagcggtccacgccgaaaacaccgagcagccccgacaagatgaacgtcactgtctgcgacttcaccggcgtcccgacggctgcgtcgcgttgcaacgccgcgccggtcgcgtcggtctgggcgccgatggcggtcaggaccatgtcaatgagcgcccagatgccgcagccgccagccgtgatgagtttgaggatgcccaagccaacctggccgagatagaaccgatccacgccaagatagccgagcaaccaggagaggaggaacgttgtgctttgtgatttcatgggggtgtgtggtgaatttggacaacccggataggatgacaaaaacgccgggatgtcaatgaccaacacgcgccggcagacggtccttttcgcgctccaaagcgcgccggaaaacctcagtttctcccgggccgcaaccgcgcttgacctgcgcaaagtatttgcacaggatgcgctcatgcaaggcggtttccaacccaaggagatgcccatgtccaatgattgttgctgctccggcggtcgctgccggccaccgttgccccccgaattcacgcgccgcgacttcctccacaccgtcgccgtcagcgccgccggcatggccgccggcagcgaactgtttcgcccgccgtccgcggcggcggcgctcacctcgccgaagctgcccgactcatggcgttatccactgacgccgccgcgcgtctatcgcggcgcgaacctcgaagccgtctctatgcccatcggcggcatcggcaccggctccgtctggctcgacggccagggccggctcggcatctggcagattttcaacaacctgagcgagacgcgcgtgccggacagctttttcgcggtgcgcgtcaagagcggcgacaaaccggcggtgttgcgcgtgctgcaaaccatgccggaagaaccgctcacgccagtcgcgtcgctgacctacgaaggcggctatcccatcgcccggctcgacttcagcgatccggcgctgcccgtcgctttgcggctcgaagctttcaacccgctcatcccgaccgacgccgccaactcctcgatcccgtgcgcgattttccgtttcaccgcgcgcaataccggctcaacgcccgtcgaactgtccctgatcgccacctgccagaacgccattggcagcaacagcggcgccggcgtcaagggcgtcaagttcgccggttacggccgcaaccgcaaccgcgtcgtgcgcgagccgggcatggccgccgttgcgatggataaggcggtcgagccgatcccgacctgccccgtgaaagtgcgcgcccgcaccggcgagatcgtcccggggccggagcgccagtggttcgccgacatgccggcgctcgcgccgcccgtcgccgaaacgatcgtgcgcgtcgccaaagccggcggcgtggtcgtcgctgccgcggtgtcgccgcagtttttctccaacgtcgccgcgttgcgcggaaatcgcgacgaactcaaacagcagttcaccgtgttcgaggatttcgagcgcgacaactacgatggctggacactcaccggcacggcgttcggcaaggtgcccgccactggcacgagtcccggccagcaaaaggtcagcggcttcgccggcaaacggctggtgaacacctaccgcccggacgacaagccgcaaggcacgctcacctccaaagcgttcaccatcgaaaaacgctacatcggttttctcatcggcggcggcaatcacaaggatgagacctgcatcaatctgcgcgtcggcggcaaggtcgtccgcacagccagcggcaaaaaccgcgagcaactcgaacccgcaagctgggacgttgccgagttcaaaggcagggaggccgccattgagatcgtggaccaccactccggcggctggggccacatcaacgtggaccagatcgtgttctccgacatttcgcccgacgccgtgctgacgctggattcgccgattcgcgccgccgccgacgccatcgccctgcccttctcttccaccaccgccgcgaacctcgacgccgaattccgggcgacgctgaagaatgtcgccgaaccgtggtgcgttacgcgttacacgcgactgcaaggcttcatcgacggcgcgaaaggctggcgcgcgctcgtcgcctcgccgaacggcgacccgctgctcatcaccggtccgctcggcaaaggccgcgttgtgctggcgctcgccgccaacctgccgtggagttgggctgccgcgctgttcgcgccggaaccgctcaaggacggcgaacgcgttgtcccaagcattggcgggacgatggcgcttgccgcgctcgacgacaatgccgtcgccacgccgcgctggacggcgggcgaggaagtcgttgccggcctgaaacccggcgaagattccggcgagagtccggcgggcgagacgttcaacgccgcgctcagcgtgccgatgaaactcgcgcccggcgaggaacgcacggcgacgttcgtgctggcgtggcatttccccaacgtcgagagattccaccacgaaggaaacctctacgcgcgacgctggcccgacgcgctcgcggtcgcgcgccacgtcgccgccaacgccgacgcgctctggcagcgcacgcggctctaccacgagacgctctatcaatcgaatctgcccgaagagtttctcgacgcgatgacgtcgcagtcggtgattctccgcgggccgacgtgctggtggtcggaggagggctatttcgccgggttcgagggaagctacggttgttgtccgctcaattgtacgcacgtctggaactacgcacaggcccacgcgcggctgttcccggaagtcggccgcaacctgcgcatctccaactttgtcacctatctccatcccgacggcgagacgtcgcaccgcgaacacggcccgcacggcgcgtttgccgacggccattgcgcggtgatcgtcgcggcgctgcgcgagcaccagctcagcccggacgaaaagtttttgaaacacatctggcccggcctgaagaaagccaccgactggatgatcgagaaatacgacgccgaccacgacggcgtgccgtcgggccagcaatggaacacctacgacaccgccgtcaccggcgcgaacacgttcatcggctcgcagtatctcgccgcgctcgccgcc

SEQ ID NO: 4087 - DNA, 25166 bp, synthetic construct
  misc_feature 1..25166: note = Synthetic
  source 1..25166: mol_type = other DNA
ggttgcgtaaattgctcataccccttcaaaccacgaagcgtttgaggacatttggcataaatatcatcacttaggaaagtggtgtcaacacgtggataagtggtgaatttcttctcgtagagactctgaatgagttgtaaggtctgttctgcagaatagccgaacttacggttgcaatccacctgcaaagaagtcaaatcgtagagtcgaggcggtgcttccgttccttttttcttctgaatatcagtcaccgtaaaaggttgcccttcaatagattggagaactgccctaccctcttcttccgtcaagaactctatctgcttgtagatagggcccttactcttgatggtcttgccttcttctgcagcagccttcacttctgcggcatcctcagcttccgcttcctcatcatgggcaatggcggtgaatttcgtgtcacgataaagggtggagagcacccaactttgtttgggcacaaaactctctatctcctgttgacgacgcacgatcaacgccaatgtaggtgtctgcacacgtccgacagaaagcacctgcttctcctgaccatacttgagcgtgtagagacgtgtggcattcatgccgagtgtccagtcaccgatggcacggcaaagtcctgcctcatagagtgactggtattcaatttggtctttcagattgttgaaaccctcacggatggcttcttctgtcagcgaagaaatccacagacgtttgacaggacatttcgccccagccttctgcatcacccaacgctgaatcagttcaccctcttgccctgcatcaccgcagttgatgatactatcagcagcctgcatgagcttctcaatcgtggcaaactgacgcttcaccccgtcatcatccttcagacgaataccgaaacgtgcaggaatcatcggcaggtcccataaatcccaacgcttccaacgctcaaaatactcatggggattcttcagctcgcacaaatgtccgaacgtccaagtgacctgatagccattgccctcaatgtagccttgcttcatgtctttggcgcccaacacgttggcaatgtcacgtgccacactcggtttctccgctatacaaacaatcatgagtgtttctgttggtcgtgcagttccttcgcctgccgcaagatatcgctggcaaagatgaagtcttccagtttcttgttggtggcatccatgatttccttgttgctgccctgccattcggcacgtccttcgcagatgaaggtgatgttttcaccaatgcccatcacggagttcatgtcgtgggtgttgacgatggtggtgattttatcctcatgcgtgatgccagcgatgagttcgtcaatcacgatgctcgtcttagggtcaagacctgagttcggttcgtcacagaaaagatatttcggttgcagcacaatggcacgcgcgatagccacacgcttctgcataccacccgaaatctcgccggggaacttgttttcagctccttgcagattgacacgcgccaaacaatcaagtgccctgcgtttgcggtcttcgtaagcatcatacgaaaacatgtttaagggaaacatcacgttgtccaacaccgacatggaatcgaacagcgcagcactctggaaaatcatgcccatctcacggcgaagcaagattttctccttcttcgacaaagacacaaaatcacggtcatcgtagtaaatgcttcccttggtcggtgtgagcaatcccacgatgttcttcatcagcaccgtcttaccgctaccactctgaccaatgatgaggttcacctcaccatcgcagaacgtggcattgatgtcctgaagcacttccctgtcctcaaaactcttgtataagtgttctacttttatcatgtcagcatgtttgtcaagaaaatatcagaaaagagtacaagaatactgctggtcaccacagcatcggtgctcgacttacccacttccacactgccgccttccacggtgtaacccttgtaggcagagacactggtgatgatgaagccataaacaaccgccttgatcataccgcaccagaagaaccattggttgaactgataacggaaaccctcatccagttcaggcacagtggtggttcccatcaacgaggtggcgtatgcacccatgatacccgccgccacactcaatgtaaccaagatgggcatgatggtcatcagccctactatcttaggcagtatgaggtaattagcagaattgacacccatgatgtcaagcgcatcaatctgctgcgtgatgcgcatggtgccaatctccgaagcaatgttcgaccccaccttacccgcaagaatcagacacatgatgctcgatgaaaactccagcaacataatctcacgcgtcgtgtaaccaaccaccatacgtggcatccacggactctgaatgttcaacttgatttgaagacaaatcaccgcaccgatgaagaaggagatgatgagcacgatgccaatcgaattatatcccaattgatacatctccgtgacatattgcttcaagaacattctccatctgtctggctgtgaaagcacacgccccatcagcatgacatacctacccagatgggttaatccactctttattgaaagcacttctattgtgattttaatgatttataaatggcaaaatcttggcaaaattagtcatttttgttcaaaagaaccgcttttaacatagttttttcttttataaagtgactaatcgccaaacaattcgtacttttgtaactaatttgaattgatatggagctaaataaacaatccataaccaccaacgcgggcgatgagaacataccagagttttctgacgaccggaacacactctacactcgtaatcttgtcaagacatatggcaagcgcactgtggcaaacaatgtgtccatcagtgtgcgtcaaggagagattgtaggactgttgggaccgaacggagcaggaaagaccacgtcgttctacatgacgacgggtttggtggtgcccaatagcggacgggtgttcatcaacgatgaggaaatcaccaaagaccccgtttcaacccgtgccaaaaaaggcgtgggctatttggcgcaagaagcaagcgtgttccgcaccatgagcgtggaagacaacatcatgaccgtgctggagatgaaatacaagtccaccgaagagcagcgggagcatctcgaacggttgctcgacgagttcaacctgcagaaagtgcggaagaaccgcggaaatcagctgtcgggaggtgagcgacgacgttgtgagattgcccgttgtcttgccatcgaccccaaattcatcatgcttgacgagccgttcgccggtgtggaccctatcgcagtggaggacattcagtatgtggtgtggaagttgaaagaccgcaacatcggcatcctcatcaccgaccacaacgtgcaggaaaccctctgcatcaccgaccgcgcctatctcctcttcgaagggcgcatcctcttcaaaggcacaccgcccgagctggcaagcaaccccatcgtgaaggagaagtacctcggaagcaattttgtgcttcgtccaaaagacttccagatgattgaagagaagaagaaaagagagttggaggataattaacacattaatatattaaatgacagaaaccgaaaagttagtgaagtcctgcatcgcaggcatccaagaaaagaagggaaagaaaatacgtgtagtcaacctcgaaggcattgacgatactatcaccaaatatctcgtcatcggcgaaggcaactcgcccagtcaggtggcagccatcacagaatctgtgcgcgatttcgctcgcaaggagcagaatgcgcgtccgtcggcattggacggaacaagaaacaacctctgggttgccatcgactttattgatgtagtggtgcatatcttcgtacccgatgcacgcgagttctacgatgttgacaacctttgggaagacgctgaaatcactgacattccagacattgattgacgaaacatgagtacaaacaacaataacagcaacaacaaactgcaaaagccacgtttcaacttcacgtggctctatatcttgctcattgcaggattggcattcatgatattcacacgccacgacacatcggcttcacgcagtgtcgattacaccaccttcaaggagtttgtgaacaagggatatgtggctgatgtaactgtcaacaaagacaacaacaccctcacccttgccatcgattccaaacacgagaagcaagtctttggtgctgtgagcaagaacaagaaacccgcccgcatcaaggtggagtttggttccattgacaatctggagagttacctcgacgcacagaacaaagagggcaacttcaaaggcaaggtcacttacgaacgcgataacgacttctttacgaatctcttgtggaacttcgcgcccctcgtcatcatcatcctcatttggttctttatcatgagaggaatgggtggcggcggcttcatgggaggtgctggcaacatcttctccgtaggaaagtcgaaagcgcagctcttcgagaaagacgacaagaactctccgcaaatcaccttcaaggacgtggctggacaagctggtgccaagcaggaagtgcaggagattgtcgatttcctgaagaagccagagaaatacaccaacctcggtggtaagattccaaagggagccctcttggtgggtcctcccggaaccggtaagacactgcttgccaaggcagtggcaggcgaagcaggtgtgcccttcttctccatgtctggttccgagtttgtcgagatgttcgtaggtgtgggcgccagccgtgtgcgtgacctcttccagcaggcaaaagccaaagcaccttgcatcatcttcatcgacgagattgacgccattggtcgtgcacgcagcaagaccgcagccatgggaggcaacgacgagcgcgagagcaccctcaaccagctcctcaccgagatggacggcttcggcaccaacagcggcatcatcatcatggcagccaccaaccgtgctgacatcctcgacggtgccttgctccgtgccggtcgttttgaccgtcagattcatgtggatctgcccgacctcaacgaacgcaaggaaatcttcatggtgcacctgaaaccgctcaagatagacgagaccgtagaagtagcacagctggcacgccaaacaccaggtttttctggtgccgacatcgccaacgtctgcaacgaggcagccctcatcgcagcccgcaacaacaaggagtgggtggacaagcagtgtttcctcgatgccgttgaccgcatcatcggtggcttggagaaaaagaccaaactgctcaccgcacaagagaagcgcaccattgcccttcacgaggcaggacacgccaccatctcttggttcctcgaatatgccaacccattggtcaaagtcaccatcgtgccacgtggtcaagcccttggcgcagcatggtacatgcccgaagagcgccagatttccaccaaggaagagatactcgacgacatctgtgcgacactcggtggacgtgccgctgaagaactcttcacgggacgcatctccacaggagccatgaacgacttggagaaagtcaccaagcgcgcttacggcatgattgcctatgcaggtatgggcgacaaactgcccaacctctgctactacgaaaatcaggagtaccagttcagcaagccttatagcgacaagaccgccgagaccatcgacgaagaagtgcgcaccctcattgcaggcgaatatgaacgtgccaagaaagtgcttttggagcacaaggacggtcatgcacaactggcacaaagactcatagaaaaagaagtcatctttgctgaagacctcgaagacatctttggcaagcgcccatggacctcacgcaccgacgaaatcctcgcatccaatgccgaagacgagcagaaggaaggtgagcaaccctccagcggtaccgaccacaagaaagagaacgaggaaatcatccgtcagaagattgtgcaggcagtccttgagaaggcagagaaagccaaagagaacggacaggatgccgacaatcccccctccgacaaaccaaaagaaaccgacaaaccagaagaaacgtgaaaaatctgattatacgtgccatcacgggtgcactattcgtcatcgtccttgtgggcggaatcgtgttcaacccctactctctcctgattctcttcaccgtcatcacagccttgacggtgtgggaattcactacgattgtcaatcgtcacatgcacctgcatgtcaaccgtttcatcaccaccgttgcggcagcctacctctatgtcgccgtgtgggcattcaacaccaacatcatgggcgcggaggtcttcatcccctacctcatttccatcatctacctgttggtgtctgaaatctacttcgaccgcccagaaaacatccagaactggggcatgaccttcatggcacagctctacatcgctctgccattcgcatcgctgaacacactttgtttcatcagcacaccagcaggagtgacctactactactggtacgccctgtcgttgttcatcttcctgtgggcaagcgacaccggcgcctacctgttcgggtcatggctgggcaagcaccacctcttcccgcgcatctctcccaagaaatcatgggaaggcagcatcggtggaggcatcacagccattgccgcctcacaaatcattgccagtttcatcccctttgccgagacactctccgacacgacaagccgcctcctgtgggcaggacttgccctgctcaccgtcattgtaggcacatggggcgacctcgtcgagtcagtgctcaagcgccgtctcggcatcaaagactccggcaacatcctaccagggcatggaggcatgctcgatcgctttgatagttcactgctcgccattcccgcagcagtcgtctatgtctatacaattatgcttaatataattcactaaacaactatgactgaaattcagaaccccactgaggaacctgtagtggaacctacagccgaacctgcaaccgaacccgttgcagcagaagaaacagcagccgttgcagaaactgcaaccgagccagtagccgaagaagccgctgagccagtagccgaagacgctgccgaagagcctcaggcagaaacctcaactacttctttcgccacctacgaaaccgaagcagaagtcgtcaaccgtctccgcgagatttcagaaagcgacgaagaggtcactcgccaagaactcgacagcctcaagagcaacttctaccgcatccatcgccaagaggcagatgccgcctacaagaagttcatcgaagaaggaggtgcagccgaggagtatgctccagaacccgaccccgaagagaccgccttcaaggaattgatggcagccatccgcgagaagcgtgcagccattgctgccgcactggaacaggaacgcgaggcaaactatcagaagaaactcgaaatcatcgacaagataaaagcgctcacggacaatcccgacgagattaaccgtgcctacaacgacttcaaggaacttcagcagcagtggaacgacatcaaggaagtgccagcagaacacgccaccaccctctggaaaacctaccagcaggcagtcgaggcattctacgacaccctcaagctgagcaacgaactccgcgcctacgacttcaagaagaacctggagcgcaagaccgccctctgcgaggcagccgagaaactggcagaagagaccgacatcatcgtcgccttccgcaagttgcagcagctccatcaagacttccgcgagacaggcccagtggcaagcgaactgcgcgaggaaatctggacacgtttcaaagatgcctccaccgtcatcaacaagcgccatcaggaatacttcgaagcccgcaagcagaaggaagaggagaacctcgaaaagaagaccgccatctgcgaaaccatcgaaggcttcgacatcgaaggactgaaaacctttgctgaatggaatgccatctcagagaaaatcaccgccttgcaggcagagtggaaaaccatcggctacgcaccccagaagatgaacaccaaaatcttcgagcgcttccgtgccgcatgcgaccacttcttcacccgcaagaacgaatacttccagtcagtacgcgaaaacctcaaccagaactatgccctcaagctcgaactcgtcgagcaggcagaagcactgaaggacagcaccgactggaaagccaccaccgacgcactcgtcgaactgcagaagaaatggaaggaaatcggcaccgtgcctaagaagtacagcgaccagatttgggagcgcttcaacgcagcctgcgatgccttcttcgctgccaagaaagaggcaaacaagggtgcaaacgaagagcagcacgccaacttagaaaagaagcgcgccatcatcgacgccctcacagccatcgtgcccgaagagttcgaaggcgacctccgcacccgactccgcgaagcacaggacgagtggaaccagattggtcacgtgcccttcaaggagaaagacaagctctacaaacttctccgcgaacagatggaccgtctttatggctatgccaacgaacatgccgccaagcgtcgcatcgaccgcttcaaggagagcatcaagggaggcaacggaggtgatgtacgttcacgccttctccgtcagcttgacatcctcaacaacgagatcaagacctacgagaacaacctcggcttcctcaccctcagcagcaaatccaagcagggcaacagcctcatcgaagagctcaaccgcaagatggagaagctcaaggcagacaaggaagaagtcagagccaaactgaaagcactcgacgagcagtaatgctcaccgcatcataccaaaaggagggttgccaccaacggcacaccctcctttctatttaccccccttcatgcgaatgaaaaaacaaaaattttaccttttctttgaaaatgaaaaatgaaagaatgagaaaatgaaatatctacgatgtgtctgtcaacgctaaactctcaacctttaacattatacattatcactcaattctgtttcatattacacaggtagtccactggagggtagtactaatcaattctacagtgccccgtctgttcgcccaccgctgttgaggtatctcacccatacaggtgttggtgtctcacccatacacccaacgaggtctcactcatagaactatcctttggtgttcctttagtcctcctttagtcctcctttagtgctccttgtgttcgtagtggtaagatagtggtaaggtagtaggttcgtagtggtaaggtagtaggttcgtagtggtaaggtggtaggttgtttgtagttgttaactgtcaactcaaatagtttatcgcaagggttaaaggtaaaaaatcattttgagcctttttccattcctgtacagcgcatttgttatcattttcccgatgttgttgacggcaataaaatctggaataatcttacgtttcttttgtattgtgttcggttttcactaacgttggcttcgccgaactttggatgcgcctcaacaataaaaatgaaaaaattattctttcattttgtattgtgctcggctttcactaactttgcaataataaaaccgaaaaaagtgaaacctgtaccgtgatttgaaacaacatgggtgtaactttgcagtcgaaaatcattaacaatcttaaaaaacagaagaagatgaaagacgtaaatcagtatgtggaaatattcccctttcctaaaacattgcatttccaatcaagaaaccttcatatacaacaaaaaagcccccgttaaggacgagggcagaaacctgaatgttttcacaacggaataatccttattgtgatttgcttcaaattagtgtggcaaatgtacgatgttttttgatttcatacaaatttatttgataaaaaaattgtttttccgtaattttggcggcaaataacttcaaattagaaaaaccaaaaccattatgaaaaagattttaggcctcgacttaggaacaaacagcattggctgggcagtagttgaaatagaccatgacaaaagaattgtccgcattatagcccttggatcacgtataattcccatgaatgctggagagataagtacgtttgaaagtggcggaaaactcaagagttctgcagcaaacaaaacagaaagcaagtctataagaaagaataaagcaaggtttcttttgcgcagggataggcttcattgtgttctaaacatgcttaacatgttaccagaacattacaaactcgacattgagtttgttaatgaaaaaggcaaacgatcaggcaaaatcataaaagggcgagagcccaagatggcctactatactgatgagaatggcaagccacaattctatttcaaagaagcatatgctgaaatggaggaagagtttagggctgtacaccctgaattatttctctacaaccagcatacaaaaaaacaaccaagaatcccttatgactggactttatattatttaagaaaaaagggactctcactggaattgagcaaagaagaactagcatgggttattatgagttttctgcagaaaagaggatatgaaaaggtaatgggagaagatgaaaaagaacaaaaagaaggtgaattatcagaagtcatcaatgccaaagtcatctccgtagaacttttgcctaataaatccgccgaaggtctaaatctttatcacattcagttagctgatgagtacaacaatgtcattttctcatacaatgagcctgccttatatcaaataacgcgaccaaacgaatacaagcaattagaaaaaatcacaaaattagacagtgacgagaacatcaagaaagaagaaatagttgtcagcgagattaagaacatagagatagtagaagttatcaacactcacgaaacccaaaaagaaaaaacttcttttgaaattactctcgatacaggatggaagtacgaacacctcagtcggtattaccctaaaattgcaaaaacacgcagagatttcatcatcacctcaacctttgaccccaaggggaaccttcataaacgcagcatctctatgcctaatgaggactcaaaacagctggagaaattaaagactgaaacatccatacaagaatacaattccaacaacagaaccgttggtgttgcatcttatatatacgaaacgttgcttcgaaatccaaatcagaagattaaggcaggtttgattgagacaatagagagagattattacaagcaagagcttaaaaacatcattgagaatcaaaaacgattccacccagaattgtgcaacgagcagaattactttgatgcgctaagaatgctctatcccaataatgaaactcacagaaacacacttgcaaggcaagatttcacaaaccttcttagtgatgatattattttctatcaaagagacctcaaacccaagaagtcacaaatagccgattgtaaatacgaatacgtcacatatcataaagacggtaaggaaataaaacagccattaaagtgcattgccaagtccaatcctttatatcaagaattccgactatggcaatttgtgaaacgcttacgaatcatccagaaagagtctgaaaatgaacaaggtgagagacttgtaaatatcgacatttcagatagtgtgcttaccatgtcggtcaaggaaagcctattcgagtttattaataacagaaaggaaataacccaatccgctattctgaaaaaactaaaattagacgaaaacaattataaatggaattttgaagtagaccacaaagaaccatgcaatgaaacacgttatgattttgtgctccgactgaagcgcatcaagggattcgactgggaaaagtttctaaatgcaaagtcgaaagttcataaaaaaggggatgtaatagatggacctagtaatgagtacttgctatggctttttttctattcaataaaaaagaaagaagaaaggattaaaggattgccacaccttgtcgaaaagctcctgcacaatgccagcatggatttatcatacaaggagagagttattgagacaatcagcaccatctcaacttacaagaatgagtatggcacatattccgaaaaggccatcaagaaacttctaccgttcatgcgacttggcaagtattggaatcaaaaggatgttgagcaagcgtcaacaataaaagacatcaaaccagaagtgctgacaaaagaaaacataaatggtgaaataaatgatttacaaggcttgtgggtgtcaagtgcttgctacattgtttatgggaaatattctgaagctagcgacgctgcacaatggaaccaaccctatgcaataaaacaatttctacaaaaagagttcaaacacaattccatcaataatcccgttgttgaaaaagttgtacgcgaaatgctcatgatagtacatgacatttggaccacctatggagaaacagatggaacatacatcaacgaagaaggtacggagattacctcatacagaaaatacttcgatcaaattaacattgaaattggcacgtcactaaaaaacaataataaaagaaagaagcaagaggatgacaggaataaagaaaacagacgtgcaaacgatagagcttatgaaatgctcaaggacttaaaaacaacttattacggaatagaagagcgttctccctttcaacaggaaaaactgagaatcttagaagcaggcattcttgattcaatatcatacgacaaagatgacaaagtatatgattatgtcattaaaacaaacgaaagaaagtttacgaaaaaagaaatacgtgaactcataaaaaaagatgtagagaaaataagtaaaagcgatatccttcgttataggctatggcttgagcaaagatatatttcgccctatacaggaagggctatcagcctctccaatctttttgatagaacaaaatatcaggttgaccatgtatttccacaagaacgagtcactcttaactccatgtcgaacaaagtcatctgcgaagctatagtcaatcaggcaaaaggtgcgatgaccggatacgaatttatactcaaaaacaatggtatggcacactacaaagggcaagacattcctttgttaagtcccaatgaatacgtttcacatattaacagcacaatcaaggacaacaacaaaaaagaaatattgttgagcaaaaacattcctgacaaattcggaaataaccaactcaataacactcgatatattgcaaaattggcaatgggaattctcagtaatttagtaagagaagacaatgaaaacgaatataagtcaaaaaatgtcgtggtcatttcaggtggcgttactgccaaattgaaaagagattggcatctcgatgaagcatggaatgaactcatcaaaccacgttttctgtatttaaagaatcttctcgaaagcgatgaattcttcgataaaaaaatcatagacgggcatcttgtccaaataccccgaattcctaataaagacgttgacaagaagcgcatcgaccaccgccatcatgcacttgatgcactcatcgttgctctaaccacaaacaaccatgtaaactacatcaacaatatcagtgcactaaatataaacaccgatagaatcagcgaacgtaaagatttaaaagcgaaatacatgacaacaaagcaacgtgatgacggaacaaaaacgcgactctttcttccccccatgcaatataaagaaggaggagatgtcattgcctataaatatgcttataaagatggtgagcctaataatgttttcaaaaccgttgctcttactgcactacagaacacattagtaacgtttaaacaaaacaaccgcatcatgcggcagcgtatcaactacattcaacacccagaacacaaagagggactaaaacaaacgaacctgaatctcaaacaaaactattctatacgacagtcactacacaaacagacattttatggactaaggaacttttgtcctaaggctattgaagaagctatcaaaaggcccgatagaatacttgataacaaagtcagatacctcatacagcagtaccaacaacaaggaatgagcatggaaagtaccattgaactactaaaaccgcagtttgctaccgtatatgttcaagaaaagtgtgtcgtcacccaatggtctcaccaacttgaatatctatcagacataaaagagaaggaagatgataagaaaacattaaggactggcaaaagtcccatcatacgagaaatagaatgtgtggcagacatcaccatacaaaagatactaaagaatcatcttgccaagtatgactctataaagatgaccattgctgaggcatcgcagtgttacgatgatattgttatcgaagaccaaagagccatcgttagagagtacatgacaaatggaacaacaaaagatctactcatcgatgtgtttgtcaagcaaagaagcacagaaggaaagactgtatttcataatccacagattgcattctctgcagaagggataaaagaaatgaactaccacattacagagttgaataatggcaaaacccacaaacctatctataaggttaaagtcactcaagcattaggaaagatgttccctatagtagaggaaaactctgaaaaagctataactgtcaaaaacaaacaatatgttatctcagacgcaggaagcaataacttctgtggcatatacaagtccgattctggagaaacagctatttatgtcccttcgttgaaaaccacaatagaagcaacaagaacgaatgaaagcctcttccctaatatacatccaaactctgctgacttcaaatataaatttaccttgtcaccactcgacctcgtttatgtacctacacaagatgaaatagtcaacaaccatattggtaataacatagactattcgcgtgtatacgtggtaaatgatttcaatgatgcaggagtcatgtattttaggccctatagtcatgccaatgctattgttgaaaaggaagttgatttaaggatagacaaaaaaggcaacattattggctctttctcagacaaaaccgctaactgtcaaggactatctataagagactgctgcattcccataaaaacagaccgtctcggcaacattattcaaataggagaaaggattatcacaaaataatctataaaacataatacgtagaatacatgatcaagaagaccctctacttcggcaatcccatctacctcagcctccgcaatgcccagttggtgttgcggaagcctgacgcagacaaattagaagagtcgttcaaacaggaagcagaacgaaccattccgattgaggacatcggtgtggtggtgctcgacaacagacgcatcaccatcacgacaggggcgatggaggctctgcttggcaacaactgcgccatcatcacatgcgacagcaccaacttgcctgtggggctgatgctgcctctcagtggaaataccacacaaagtgagcgtttccgcaaccaaattgatgcttcgctaccactaaaaaaacagctttggcaacagaccattcgacagaagattctgaatcaggctacggtgctgaacaagaataccggagcgatagtcaagaacatgcaagtgtgggctaatgaggtgaagagcggtgacccagacaatcttgaagcacgtgctgccacctactattggcgatacctcttccccactctccccaactttgtgcgtggacgggaaggtgaccctcccaacaacctgctcaattatggctatgccatccttcgagcttgcgtggctcgcggattggtgggaagcggcctcttgcccacattgggcatccatcaccataaccgttacaacgcctattgtctggcagatgacattatggagccttatcgtcctttcgtggacgacttggtcatcaacatcatgcaagagtaccccgattacagcgaactgacacggagcatcaaggcagcacttctcacgattccgtcactcgacgtgatgctggatggaaaacggagtccactgatgattgccgttggccaaacaaccgccagcctcgccaaatgcttcaacggagaactgcgtaaaattgcctatcctgaattgtagaaaacagagaacatgagtagtttgtcacgcctcaccgaataccgagttatgtggattttagtattcttcgacttgcccacagaaacccaaaaggacaagaaacgctatacggactttcgcaagaaactccaaagtgatggattcaccatgttccagttctccatctatatccgacactgtgccagcagcgagaatgcagaggttcatttaaaaagagttaaatcttttctcccagagttcggaaaggtcggattgctaactataactgacaaacagttcggcaacatgcaacttttctatggtcaaaaaccaactgagcccaaaacgcctggagtgcagttagaattattctgaaaatgaaaaaaccagccgtcgagctggttttttcatatcacacaccctgcttttttattttctaattacacctacaacttcttaatactcttttacttacaaagattcaggtgtatatgactctgcaaagatactaatttgaaagcaaatcacaacgttctggggaaggatgtgggacttccatcaggtgtatatgactctgcaaagatactaatttgaaagcaaatcacaaccagtacgcttttcctaaataaccagcctttggtgtatatgactctgcaaagatactaatttgaaagcaaatcacaacttatgggtttctcgttaggagaatcagcgggtgtatatgactctgcaaagatactaatttgaaagcaaatcacaactgttacgttgccattctcatcgagggtaaaggtgtatatgactctgcaaagatactaatttgaaagcaaatcacaacttggtgatggaagagaggctagactactggggtgtatatgactctgcaaagatactaatttgaaagcaaatcacaacttcttgagcgtattgatgtaggacaccgatggtgtatatgactctgcaaagatactaatttgaaagcaaatcacaacattattacatatctctaaatatgtagagagggtgtatatgactctgcaaagatactaatttgaaagcaaatcacaactctcttccgtttgttcaaagatggtaatatggtgtatatgactctgcaaagatactaatttgaaagcaaatcacaacctccacatcaaaaagcccacgcgggaggcgggtgtatatgactctgcaaagatactaatttgaaagcaaatcacaacccgcttcagatggtaccgcgccgatggcgtggtgtatatgactctgcaaagatactaatttgaaagcaaatcacaaccacatgatgcgtctaatcatctgtgcacgggtgtatatgactctgcaaagatactaatttgaaagcaaatcacaactccagaagagttgcacttactctacctgtcggtgtatatgactctgcaaagatactaatttgaaagcaaatcacaacttgttgccccgcctccctcgttggtggcatggtgtatatgactctgcaaagatactaatttgaaagcaaatcacaactgacgtacctcacggccaagggagtcgagggtgtatatgactctgcaaagatactaatttgaaagcaaatcacaactggtaaacctcagagggcttaaagcgcgaaggtgtatatgactctgcaaagatactaatttgaaagcaaatcacaacaaacacactcaacccatcgaaatcccctaaggtgtatatgactctgcaaagatactaatttgaaagcaaatcacaacaatgcgggaactgcggacagaggaatatggggtgtatatgactctgcaaagatactaatttgaaagcaaatcacaacaccaaaataactcacctttgcttcttcgcggtgtatatgactctgcaaagatactaatttgaaagcaaatcacaacaacctgtagaatgtcaactaactttgccaaggtgtatatgactctgcaaagatactaatttgaaagcaaatcacaactgagcacggtcttctgcctgctcgcagtcgggtgtatatgactctgcaaagatactaatttgaaagcaaatcacaacgaaggttaatgatttggttagtttttgatttctcataagtattaattcttacatcagtaattttgtaagccagaagggtcttcgcagcgatgcgcaggctcttttttttaataagataaagattgctaaaacactgataataaagggtttattacttgcatagtcttgattatagcgttaactttgtcctacaaaagaaaaagaacaacaacttaaatatcaacgctttatgaacgaacaagtaagaaacattctcaacgagagcatcaccaagacagccaagattcagaagctccttcagatgggactcacacgcagagccgtcgccgaccttgtgaccaacggaaattacggattcgtgcagaacgtctatgctcgcatgatgcatgaactgaccaccaccgccacatcttcagcagagcctcttccacaacttgactacaccttcaaccgcaacttcggagtggaaatcgaagcctacaactgcacacgtgagcgcctcgccagggaactgcaagcggcgggcatcagcgtagaggttgagggttacaaccacaccgaccaccaagaccactggaaactggtcactgacggtagcctcacaggcaccaacaccttcgagttggtcagccccatccttcacggtgaagagggtgtcaacgagctggaacgggtctgctgggtgctcgagctttgcgatgtgaaggtgaacgattcctgcggactgcacatccacatggacgcacacgacttcaccatgcagacttggcgcaacctcgccatcagttacaagcggctggagacggtcatcgacggcttcatgccacgctcacgacgcaacaaccgctactgccttcccctccgcaacatcagcgaggagcgcatcaaccgcacccagaccattgccgaccttcgacaggcattcagccacaaccgataccataaggtgaacatcgaggcatacgcacgccactccacagtggaattccgtcagcacggcggtaccaccaacttcacaaaaatgtcggcttggatccatttcttggaaaaaatgattacctttgcatcggcaaccaccatcagcccacgcaccacgctggagcagatccccttcctcaccgccaacgagaaactttactttcgcctccgcacacgtaaacttgcagcctgatatgacagtcacaacaacctacaccctcagaggtggcgaaatcatcaccgccacctctccctctgacttcgtccgccagcttcacgacggcagccgattcgaccaaggtggcaccgaccatgattacatgattcggttcgcccgtcgtctccatcagttcgacggatccatcgtccgcgccaccgaccccgaccttttcctcgccgatttaattcggtgcggatacgctacagttctttcctgctcttaattatatgtttctgtgagattttttgtcgctttgatgccaaaatcgtgctattttaacgttttttttgttgttccgtatggacataagacgaaaagggtgtatctttgcagcacaattgtgagcttacaaacaaacatgtttctaaccaatttatgaaaacccaagaacaaattgacggcatcaaagctgtcgtgttgtatattctacaacacttcaaggagggggtagactatatcaagctgttcaaaatcatgtattttgctcagcgcaaatatctatctacctatggtttgtgtgtggtcgaagacacattcaaagctcgtccgcgcggtcctgtgccatctcttacgtataaagtggttaagatggtggaaaatggagattgtttcgatgaatgtcccgatttaaaagactttgctgatgccgtggcaatagacaaagggcaaaaagtgtcagcgcttgtagctccagacatggattacattgctgtgatggagcgcaaagtgctggatgaaacaattgccaagtacaaagatatcccatcggaggaactttcagaaatgtcgcatgatgcagcttataagaaagtgtgcaaattgatggagtctgatccagaaagagacaccatgactcgcatcgatattgcacgtgctggtggtgcctctaaagaaatgattgaacgcattcgtgaagaccaaattattgagagagcacttgcaagctgatggatgatgctaaggggacattggcagccttaaaggctgctgttgaagaagacaatgttgtcaaatcgcgcaatgatctgaatgtcggggatattatatatcagtgcatggacagaaatgacggtttggtgctgaataagggctacgacactcgctacaaaatattcgtcattgtgggtaaaaagagtaatggagaggcggttggaatgtgtttcattaattccaactccgattactacaaaaacaacccggaacgaaagaagtttcaatatacgataaaaaaggcagattatcccgatgtggatattttagtgaaagacagtcctctggactgctcaaaattgtttacaatgactgcacgaaaaagtgtagccgtcaaagcagaagtcataggacatcttacaaaaaaagacgaagctgcaatcattccattggtggcatcttgtgaattcatcaaagaacagatgaaaaaatcgtatcacatcaaaaaataaaccgccagcagttcatgtggagctgctggcggttctttcatgtttaacgttggaacttttcaatagttagttgtcagttgattcacaggaagagctgaataaactgtacaatcgtgatgagcgcacctaagtacttgaggacagttactattattcgctgaatcctccattgattgtatgaactcatattatatttttatatttatttacgtataagttctttgccctctctgaagcgcgttttcttcatttcagcatttcgggtatttatctaaaatataccccgttgtttttcacttttcaataataaataggcctctattccgaaaaaatttgccttttccacattttttctcaaaaagtttgccaacacaaaggaaaatgcgtacctttgcattgtccataaacaaagtacgtacataactctatatgagtcccttctcaaggtgtaacccgtagtcaatcgggttgaggttgctttacctttggacacaccttgataagggactctccatttgtgtaaatatggattttcacgatatcgatgcactcgttgcgagtataaaggaacagaatgctgagcgtaactactggatggtgcgcactatgggaggagccttttatggtgactttatcagaaatggctatattgccattggctataatgaaatctccttgcaagatatcgcagctttagaccaacaaagtcataatgctgcacatgaagaactgaaggctttgattaccaatcgctgtccagatattgcaaacacaggtcacccctcaggacagcttcttcgattcgtgcgagacatcaaacctggtgatgttgtgatgattccttctacaggctcatttcacgtagcgataggtatcgtgagaggtgacacttttgaggagcatgtggcggtcgttaatgaccacacccgttgccccttttataagcggcgttgtgtggattggaaaatctatactcgtagagcagcccttcctcctatgctccaattgatgttcgcttctcgtcatatcgtttctaccgtgaacgactattctccctatatagacagtcttctgaacgatttctactataaggacgaaaccatgcaccttgttcttgaaatcaagactcgcagggaagtgatgctggaggatttctgcgatttgaaagcactgggctctttggttgaccagttctgtgagacatctggattcactgaaggaggttcgattgccatgaaagtacagatggaatctcctggatggctcagactctcaaataaaaatgtaaagaaaatgctggtgtttggtttctttgtggttcttcttacaggaggcggtgtgaaaatcaacacggaaacatggaatttcgatatgtcaacaaatgggattcttcagagcataggtgagttccttgatcggaaagcggaccaaggacttgtagaggctgcaactcgtgctgttgacagccttaaaatcaaggcaccagaagacctgcagcccatcatcgacatcctcaatgccaaaaatgagggaagggagaaatattaagcgggaaaatggtagaaaggaatcaaggacaaggcgatgatgaagccaatggaataaatgatgtagttttcctttctgctcagctttggcttactggtgaaaatgcccatggctatttgcatggccagaatggtcaatgatgatatcacaagaaaagttccggtgaatgctaatatgttccgtagcaaatccagcatgttgattattcgccacaaagataggctttttatctgatataacgaattctacacatcgttattttactttttcaaggcggaaatgaaaaatttctgccttttttctttgtcgaatgaaaacaagtgcatatctttgcatcgctaaaacatcacagcggtcagtccgctccgcatgagcatcggttaattgctccacgaaatcgttgggcttttttttatgccctgacctcttttccgcattatagcggacagacatacacatataggcggctgcctttcccacatgactctttgctcttcggaagcgataccagttgtgatgttttagcgaacgggaaggggcagccgtttctcttgccccaatgctaaaacatcacaactggttatgaaaacagttcaaacaacaatccaagctggtcgcctctctaatgaggtgaccatgcagcggaacatcttcggatggctccgcagtaccaactctttgtgctcctcgctgatgggggagcaagtgacccacctgcaggtgcttagcgcactgtgcatgttcctgttcctcacgctggcggtgttcaccgtccagagggatgttctcgtcacagttctgttccttgccctcgccgccgtgtgcagccgtggcattgtggaggaaggaggtaagccttgatcgtatgtgaaggtatcagaacgttttaattaattaaaaaagatatagttatggacacaccgcaaatcagcctttcagaaaacctgcagcgactcatcagatacatgcagcagaacaactgtgaatcagcccatcgaagagcggctttcatcgatagcctgatcactcacattgtaacagaaacccgtccactcggactggagcctgaagacaaagcgaacctcatcgagatgctctctctcatgaaattagagtacttgaccttcattccggattggacattaaaacttgaattatgaacaagcaagacaaaaacaagaaggcacccacagaggtaaccgacatcagcgtgcagattgccgctctcgccgctcgtttcaagccggcaaacaacccttcagaggcaacccactggttctccaccgaggaggtggtggctgccatcaaggatgtggatccatcagccaaggtggatgcaacactcgtacatgatgccctacggcaagccggatactcctaccggacgcgaccaggctcacagtcgctgtcgttccgatggatgttccgtgccaaggactgacgctccgacgttgaaaacggctccattcatcatggagttcgtttaagcgggggacgcttcgctgtgaagcgcggcgtcctttttctcttcatcgcatcgacgtatctttgtggtgcttaaacgaactcaaacttcttatttaaatcatgaatggaacgcaacgttactcacgcttcgcttttcagcggcatcggtgcgcccgaactcgccgcacattggatggggtggcagaacctattccactgcgaaatcaactctttctgcaaaacagttctaaacttctggtatcccaacagcaaggcttatgaagacatcaagacaacagacttcaccccatggcacggacgtatcgacgtgctcactggaggcttcccgtgccaacctttttcatctgctggaagaaggcggggagcggctgacgaccgctacctctggccagagatgctacgagcaattcgggaagtgcagcccactttcgtcattggtgaaaacgttgctggaatcctgtcgatggtacaaccaggcaacgagactcgagtggaaggctcagccgatgagacaggaacgggtgatgagatatacgagagacggcagcagttcgtcactgagactgtctgccaggatcttgaaaaagaaggatattccgtccagccgattgttgttccggcttgtgccgtcggcgcaccgcacaggcgagaccgcgtgtggttcgtcgccaggaggattgctccccaccccgctgacagtggacatcgagcaccgtcaccgcatcgagcagctgaaagcacagggcggacaaaccatggggagccgacgaaacggggaactgcgccccaacgggctgatggacttcctcaagttttatggtctgatgcccaccccgaatgcagcagatgcacatcttggatccattgttggcaagaacgaccagattgtgatgactcacacgggcaggttggtcaagaagaccccgaagaccatcttcagtctgaagcttcctgtcttcgcccaactgttgcccacacccaatgccatggaaggattgaagtggtcgaccaagttcaatcccaacagtcagatgggcatgggactgaccgccagggcgctcaacggaatgctgccaacgcccagagccaacgggcaggagggctacgagacgagagctaggcggaaggggcacaagactgcaatgagctatctggagagcgctgtggagtatctgaccacggacttccacagaagttctggagggacttcccaactgtcgcccctgtttgttgcggaaatgatgggattccctttgacctatctggtcttaccctttctttcccgaagtggcgaagtgaggcgataaaggcacttggtaacgccatgg

SEQ ID NO: 4088 - DNA, 21539 bp, synthetic construct
  misc_feature 1..21539: note = Synthetic
  source 1..21539: mol_type = other DNA
gtcccgtcttcagcagttcatcacacagataatgggctcctgcataggagagttgagccgcctccttcatgccttgtttgcccatcagtgagagatacaccgtcacccaaagtgccatcaggctctgattactgcaaatgttggacgtcgccttctgacgacggatatgctgttcacgcgcctgcaacgtcagcacaaaagcacgttgattgcggttatcttttgtcatgccgacaatacgaccaggcatcttgcgaatcagtttctccgtacagcacatatagccaacgtatggtcctccaaactgcatcgggacacccaaactctgtccatcgcccactgcaatgtctgcaccccactctgcaggagttttcagcactgccaagtctgcagcgacactgtccataatgaaaagtgctttctgttcatggcacgcctcagcgaagcctgtgaagtcttccacgataccatacacgtttggttgctgcaccatcacgccagccacaccctcaagagttgagagttgagccttgagcgttgagaggtcggtcacgccatctttcagagggattgtcaccaactcgatgccatgatgcagagcgtatgtgtcaatcacctcacgggtgcgagggttcagccctcccgaaaccagcaccttgtccacctttttgccagcagccacagccatcatcatggcctcggcagcagccgtagtgccatcatacatcgaggcattggagatgtccatacctgtcagttcagccatcatgctttgatactcaaaaatatagtgcagtgtgccctgcgaaatttcagcttgataaggtgtataagatgtaaggaactctgagcgttgcaacagattgggaatgacagaaggagtatagtgatcatacacaccataacctgcaaaacaagtcagttgcttattttgcgagcccaacaggtcgaacacacggcgcactcctgtctcagcctcttccgaagaaatttgataatcacccctgaagcggatactctctggtatctgagcatagagttcgtcgaagttcttcactcccaccttctccatcattaccttcaggtcgtcatccgtatgcggaaaatacttatacataaattttaagaatgaggaaatgaaataatgaaatattgaaaaatatccctatactccattttccttcgtttttttaatcgtttttattagtgtaccaataatgacattcaaatcattcacaacagagtcaaattgttgatcactgatattaccagagtcgtgcaataattcgagccaatattttgtctctgtggtttctctttgagggatatactcaatttgctaacaaaacctgccttactttgggcatttatgctatcagcaatatttgcccaatacttgttccactgcgatatttctgcttagacatgacatattcttttctctcttcagacagaaacacatagagttttataacccttagtgcaaactttttactaagatcgtatataatattgtcatgtgtcatatcgctatttcattccctcattttttcattctttcattctttacaaaactcttcgtatgcagcagcatccatcaagttttccagctctgactcgtcactcatctccaccttgatgatccagttctcgtaagcatccttgttgatgagttcaggcgcatcttccaatgccccgttcacctccaccaccgtaccgcttacgggagaattcaaatcgctggctgccttcacgctttccactgcaccaaattcggcaccagcctccacctcgtcatccacgtcaggcatgtccacataaaccacattgcccaaagcgtgctgtgcataatcagtgatgccaataacaccaatgtttccttctactttcaagtactcatgcgactcagaataatagagtccttcaataacctttgccataattcaattctgtttttagtaatttctatttcttgtaatgtttctcataaaaacgcttcttcaccaccttgcctgggaaggtcttcttccgaatctggatttccacctccgtatccaatgccgaatactcgcggtccaccagtgccatacacacactcttatctgtcgagagcgtatggtatcccgtcgtcacctcaccgattgtcttgccatctttcagcactgcatagccatgacgtggaatcgcacggtcagccagttcgatgcccaccaacttctttgccacaccttccgctttctgcttcaggagagcctcccgaccgataaactcaggcttctccaacttcacaaacgtggagagtcctgccatgatgggagaaatcgtctcggaaagttcgtcgccgtaaagtggaagtcctacttcgaagcgcaaagtgtcgcggcatcccaatccacaaggctgcacacctgcagcaatgagtttgtcccaacacccacgaatatactcaggagtagcatacacctcgaaaccgtcctcgcccgtataacctgtacgagacacaatcacatcgcccaccgtcttcactgtatagaaagacaactcgctgcaaggaatcccaagcaccgtctccatcacctgttccgactcaggaccctgcacagcaatctgtccataatcgtccgaacggttctgcaagtcaatatcaaaacccgttgcctgctgttgcatccacgcccagtctttgtcgatgttggcggcattgatgacaaggaagaagtcattctcccccatcttatacactaagaggtcatccaccgtgccaccatgctcataacacatcatcccatagtaaatcttccccacaggagcaccagcaatatcgtttgtgaagatatgctggacataacgctcagcctctttgccacgaaccgtcacctcccccatgtgagacacatcaaagagtcccaccttctcgcgcacagcctgatgttccacagcaatgcccgcatactgaatgggcatgataaaaccaccaaagggagacatcaaagcccccaattccacgtgcttgtcatacagacaagtccgtttttccttctgttccaaattctctgtcataatcattatatcatttttcacccctcatctttcgccccctcattctttcattattcaaagataattctcttccatctgctcaatctctctcacatccgacggagtgagcatcctctcccccacacaaagcgtctttctgatgagcgctttcacctcctccaaccccatgtccgtataatccttcaacagcgtgatacgctgacgcacactctccacacccttccgttgcagtttttcccgactcggcgtgatggcatgcaacatgttctccatatccgtatcatacaagaacgtgctatgcacgatattccgcccaggcagatgatagaacgccgttccgcacacctttctgtcaccgatcatcacatcgttatgactcgttcccacagcctcaacacccatctgtcgaaacaccaacagcaacatattgatgaatttattgaacgtgaaacccacattatccccatcacacacatacgacaacatcacgttcccctcgtcagcatacacacatccgcccccactcttccgacgaatcatttgaatacccttctcgcggcaatacgccacattcacctcattctccatcacttgattgcgaccaaagatgaccgttggtgccacctgccacatgaagaagcactccgactcgtccaaatgacgagccacccactcttccatcgccaaataaaacgacaggcgacgcaccttctcctctggcaaagtaatgtatttcatctttaaatttaactttaaccctaactctcaactgtcaactctcaactgtcaactctcaactgtcaactctcaactgttccaagcagttctgctgcttgtctccccctactttttcttcttcctcacgattcctttcacccatccgccaacagccttggcacctcgcttcgtgttccacaccgccacggtcttctggtatttagccttcaggttatagtacttctccagttgaatctgcgtcatctgcttcttcacgctcttatactccttcgtgagttccttatacacacacttcagcgagtccatcgtttcaggcaacgtattgtccttatcgagagcagccacgccatccacaaaaagttcatatttattaatgaaatcactcggagcgtcagccatcaaagccgacacaccaagcaccagtgccatgcagcaggtgagaaatctttttgccatcatttttctaactatcgattatctgttatcgcttccttttccgaaaatcggaggtaaagttacacaaaaaatatgggttagcagacaacaaacacacttttttcactttttatcactaaaatcacctttttccccacctaaaacaaactcaaacgccaataacaagaaagccgacatgttcccatgccggctttctcttctttatattattagacaaattttaccacaaaagaccatctatctccttatcaaaatccatcaattcatcctcatcgaaaggattagccttgatgccgttcacattgggagtaccgccaggtactgacgaaggcagggatgctgcaatcattgactgagacgccaccagcaccatgtccagttttggtttgatatatactttcttatccattgctctatctcctttctttacttgattgcaacttttttaccatgatagatatagatgcccttttcagttggcttgcccgtaagcttcacacctgagagcgtgtaccatacgccattcgccgtttcttcatcacaacccactgtcaactctgtgatgcctgtagcctcgctgttgtcaacaaagccgatagcaagagcagcagcttgaaggttgtgcgatgagccgtagaagtatgcacggaaaggctccacatcacctgtggtcttggcaaactccgtaccggcagcatttaacacgtaagaatttgtgacagcctgcttctgtgtgttgcccgtaaacatatagtagaaaccactctgagagcccttaccgccagctttgactatagcactgctaccttcgaaagtaatctccttacctgtcaactgattctctgcaccccatgcatcgctgggtacattgatgagataaggcgtgtttgcctcaatactggcagcatagtcgaagtccaccgtgcctttatcatcgctggcaaactgataaagccagaagttcttgcccgtgtcgctgccgctcttgaaccaatcaatggcagagcctcccaccttcacggcattcacggcgaacggcaccatcagtgtgttccagccaccgcccattgctgtggcacccgttgtgaaggtacgcttgtaacttatctccgtagcagtgaaatctatcggtgtatagaagccatgagtgccatcatccaccagttccacattgtctgccgtcgtgccattcacccagtttttcgtgatgccgccgactggggcagaatttgccaaatagagtgtgttcgggttactgttcggtgtgatggaagtgaccaccgactgaccacgcaagtcaactactgccgcatcggttggaacagtgagagaggcttctgccagcttccacgatttcgttccatcggctgcaaggatagtgacagcgggcttagccgtatatttcgtatatacaactttgggggcggcggcatcccatccatcactatgatagtaatatgcttccacactatatacctcgccaatagccacatccatctcatatgtgatgtctatagacgatgagggaggaactaccactttttccatctccgtatttgtcggagttccagtaccaccttcccacttataaacagccaagtaagcccaaccttcaaaagcattcgtggtgttcgtatttgtcaaggtaacacgatcaaccaacttttcacctaaaatatatgtattactttcgtccacattcaagtgatgagtcgaagtcaaagtgggggtattgtctgagactccattcttcacagtcaggtcacccgtccaaatcacatttgcacctgctccatcagtagcaatcttcatggtcttgataacaggagccgcatcattatatctgaacgtgaatgtagcaataactttctcgcctgcctccacactaacgccattgccagcaacagctccactgatgcctccaagaagcaagaagagctcgccattgaatcgtgtgccattgttcttaatggtggcagtgatggttgtgagtgctcccttcatacactctgtaggagtcacctccgacacagcgagattaaccgtcggagtcacattcgtgaaagttacattagaagcatctgcaaccatttggatataataatcatccgcaccgaaacacttctgccattcagaggcacccttttccttgctgacaagtttcaacttataagttccattaggcacttcggatgaagtgaaattgaaagaagaagagcgagtccccccccttcctgcattaactgctacggcatccaacgaagaagatgccgacacagccaagcaattgtcgctttcatcatatagagccaacgcaaaatcaaaatcatgcgtataagttaattcgttgtaaagccagaaatgataagataccgtacaggatgacgaccttccgagcgttgttgtaccagtataactacactcatgcaccgccatacgtccatcctccaattcaggagagcctgttggtttctccatgccaaccacaatttcctgcactatcgtatagccatcatcagatgtaccggcaccaacgcctctctcactcggattgagcactgacagcaggaagtaaccattgccatcacctgtccatccccagttgatgtggaagtagccgtcagcatcgtaaccgtcacagacgaaagcatgccctccacctgtcgaagaaccagaataaaacacagggcgctttgcctccaattcctgataaatgatgttttcccattccgatgtggaatagtgagaacgacgcaaatacttcacgcgctggtcatagccaaaataatccaccaatgcttgcggcacatccggtgaagaggcgcccgaactgcctgtaccatattgcatgccgaccgatgcaccacaatactgcatcagttttgccaccgcttgtgctttcacatcaacggtcgtttccttgccagtgtatgtcttctgcatgttcgaccagtcaaaagtagtcactggacactctgccacactgacgcccccttttgtgaaggcagatattgtcttcacagtagaaacagggaagccctctttctgattgtggtaatagagcaactgagccatcgccgtggcgacacaccccgtcttgcaatacgtgccagacactttaggacacagataattgtagggcgcactctgcccccattctgtctcaatcattggcgcaatcggagtcttcacgcttgcaggtgccttgcgcaaagcctttgcctccgctgccgacgacacgccatttttctccagataagcaatctggtctgcatagccttgcaaccacgccttcatgttttcaggcatgttctgtacatcgaaggcaccctcatcagtgtagccgatgatgtcgggcgtgaggtctgagccgctcacgatgacaaagccatcgcctgagccgatattaaacacgtggtacgcgtcacctgtcgctgccagcgacaagtcttgctgttggcgcggtgcctttgccacaccactctttccgcctgcctttccataaagaaaggtcagcgctttcaccttggcttcatctttgccgactggacctgccatcaaagttgtggcaagcatcaagccaatgacaaaaagtgtagtctttttcatatccatatataaataaagtgaataaagttaagtctcggatattctacttcgttggagttaaaggagttagagggagttagaaggagttaaagccgatactctgactgatggtttttcactgtgcagcagcgccgctttcagagccttccgtcttaggtgcctcctgcattttgaaagtaatcggcagtgtgtatctcacacgcaccgtcttcccgcccttcttgcctggcttccacttaggcatggctttcaccacacgcacagcctcttcgtccagagcgggatggaccgatttcactaccttcacatcgtcaacgctgccatcccgattgacgatgaaaccgaccagcactctaccttgagcatcagcctccacagccttttccgggtattgcatattctgcgacaaccaagtcatcagagcctgttggccaccctcgaactcagcctgttcgtctggaacttcctccacaggttcttgcggtcttggagggaaggggaaattaggctgtggctcttccttcttcacctccagtttctcaatatccttatacacccttgcccaatactgtgctctctcttcatcctttggcacacctgccccttggtgatagatggctgcgagattgtactgtgcatccttcactccctgaatggcagctttctcaaaccaatacactgccttctcatagtcctgcagcaccacctttccttcgatgtagaaagtgcccaaattatactgcgcacccgcatgtccagcatcggcagccttctgatagaggtcaaatgccctgtcatacttctttgccctcagaaagtcattccctttctgataagccttctctgcctcctcctgcgcttttagttttgcctgctgcggattaaagcccgggaagaactgtgcttccatccccattgccacacacacggcagcaacgagcactaaaattctccttttcatgattcttgctgttttgattgatagtcaattattagattagtaaaaaagtgatttacgccacaaaattacactttttcttcatgacgcccaaacatattcaaaatttttgtaaaaaatggggaagaaaaaactaaaaagatgagcaacaaccccattcagggcaacaacaatgcaggagggctccatggcgtgaccgacgacaccataggcgacgacgaactattcattttcaccctgcgtcccatgacctcccgcttcctcgtcctccccgacaccctgaagttcaagtaacaacaaggaagttgaaaaacaaaataatcaattgaagtttcgcaagtgctcaactttcttggagttaaaggagttaggaggagccgaaggctgacatcagacaatggacaacggaaggagagacctctccgactaaagacccctctgccctacgggcatctccccctctatggggagagttacccatccggctcccaactgttaagttaaggttagggttaacgttagggtaacttttgttcttacacctcttccctccaagatgcacttcgttgattcccaattatcgtcttccagcgtgaaatattatgcgctgtaagaacgaaatatttcacgctgagtgcgtgaaatgacaggcgcaccgtgccgacttttgcaaaggaactgcgaatgacacaacaacgtgaaaatgattgaatgaagacatcggcagttaacccttctcacattttttcagtatttcatctccccattctttcatttttgaaattaattatgtaattttgcatatacaataccgaaaaaagtgaaggctgtaccgtgatttgaaacagcataggcgtatctttgcagtcgaaaacaataataatctaaagatagaataagatgaaagacatgaatcaattcgtagaaacgtaccccaattctaagacattatatttcgacctttcacatgcaacaaaaaaagcccccgtaaaaggacgagggcaacctgaatgttttcacaacggaataatccttattgtgatttgcttcaaattagtgaggcaaatttacgatgtttttagaatatctgcaaatttattttgacaattttattgtttttccgtaaatttggcggcaaaataactctaaaaccttcaaattagaaacaccgaaaccaatatgaaaaagattttaggcctcgatttaggcacaaacagcattggctgggctgtggttgaaatagaccatgaaaagagaattgtccgcattattgcactcgggtctcgtataatccccatgaatgcaggagaaatcagcacgtttgaaaatgggggaaaacttaagagttctgccgcgaacaaaacagaaagcaagtctataaggaagaataaagcaaggtttcttttacgcagggataggcttcattgtgttctaaacatgctaaacatgttaccagaacactataaactcgatattgagtttgttgacgaaaagggcaaacgctctgggaaaataaaaaaaggtcgagagcctaagatggcctattacacagacgagaatggtaagaagcaattttatttcaaggaggcatatgctgaaatggaaagagaattcaatgtagtacatccagaactattcaaaacggatcacctgacgaatagacagatgagaattccctacgattggactttatactacttacgcaagaaggctctcacgtgtgagttgaacaaagaagaattggcatgggtcatcatgagtttccttcaaaaaagaggctatgagaaagtaatgggagaagatgaaaaagaacaaaaagaaaatgaactattggaagttattaacacaaaagtaatttctaccgaactcttaccaaacaaaagccctgaagggctaaatctttatcgtattcagttagcggacgaatacggtaacattgtatttacttacaatgaagcggccttacaccaaataacacgactcaacgaatacaaacaactagaaaagattacgaaactggatagcgatgagaacattaagaaagaagatatcgttgtcagcgagattaagaatcttgaaatcacagaaattattaacactcatgaaataaaaaaggagaaaaccacttttgatattattcttgacacaggatggaagtacgaatactatagccgatattatcctcgaattgcacacacacgcagagacttcatcatcacgtcattctatgattcaaaaggtaatctccacaagcgcaatatatccatgccagacaaagactctatgcaactggaaaagttaaaagccgaaacatccatacaagaacacaattccgacaacaaaaccatcggtgtagcctcttatatatatgatacattgcttagaaaccctaatcaaaagattaaggcaggcttgattgaaaccattgagagagactattataaagaagaattaaaagctatcatcgaaaatcagaaacgattccatcctgagttgtgcaacgaacaaaattacattgatgtgctaaggatgctctatcccaacaatgaaactcacagaaatgcacttaaaaaacaagatttcactgcccttttaggtgatgacattattttctaccaaagagacttaaaacccaagaaatcgctaattgcaaactgcaaatacgaatacgttacctatcataataaggaggggaaggaaataaaacaaccattaaaatgtatttcccgatcaaaccctttgttccaagaattcagattatggcaatttgtgaaacgattacgaataattcaaaaagaatcagagaacgcgcaaggggagaaactcataaacacagatattacagaccgcattcttacaatgcctgtcaaagaaagtatatttaattttatcaacaacagaaaggaaataactcaatccgccatattgaaaaagttgaatttggatgaaaacaaatataaatggaattttgaagaggaccataaagaaccctgcaacgaaacacgttatgattttgtactacgtctaaaacgtatcaaaggatttgactgggagagatttcttgatgcaaagtcatatgtccacaaaaaaaggaatgatacaaacatgttgattgaagggccaagcaacgaatatctattgtggcatttcttttattcaatcaaaaagaaagaagaaaggattaaaggtctcccgcacctcatcgagaaacttctgcacaatgctggcatggatttatcatacaaggagaaaataattacgacaatcagtactatttccacatacaaaaataagtatggaacttattcagaaaaggctatcaaaaaacttttacctttcatgcgattgggcaagtattggaaacaggaggatgttgaacacattaagacaacaaaggacattaagcctgaaattctagagaaagagaacatcaatggcgaaataaccgatttacaaggcttgtgggtatcaagtgcatgctacattgtctatggccgatattcagaagccagtgacgctgcaccatggaatcagccctatgacataaaaaaatacatacaaaaggatttcaagcataattccatcaataatcctgttgtcgagaaggttgtccgcgaaatgcttatgattgtacatgacatatggactacttatggagagtctgatggaacatacacaaatgaagaaggcaaagaagaagtcttttacaagaaatacttcgaccagattaacatcgagattggcacatctcttaaaaacaataacaagaaaaaagaacgtgatactatcaagaatgcagaaaatagacgtacaaacgatagagtatacgaaatgctcaaggacttaaagacgacataccacggaatagaagagcgttctccttaccagcaagaaaaactgagaatcttagaagcaggcattcttgactcaatatcatacgacaaagatgacaaagtatatgattttgccattaagacagacgaaagaaagtttacgaaaaaggaaatacgtgaactcataaaaaaggatgtagagaaaataagtaaaagcgatatccttcgttataggctatggcttgaacaacgatatatatcgccttatacaggaagagccatcagcctctccaatctttttgacagaacaaaatatcaggttgaccacgtgtttccacaagaaagagtcactcttaactccatgtcgaacaaagtcatctgcgaggctatagtcaatcaagcaaaaggtgcaatgactggatacgaatttatactcaaaagcaatggtatggcacactataaagggcaagacatacctctgctaagtcccaatgaatacgtttcacatattaacagcaccattaaagacaacgataagaaagaaatattattgagtaaaaacatacctgataaattcgggaacaaccaactcaacaacagccgatatattgcaaaattggcaatggggatactcagcaatatagtaagggctgacaatgaaactgaatataaatcaaaaaatgtcgtggtcgtctccggtggcattacttcaaaattgaaaagagattggcaactcgacgaagcatggaatgaactcattaagccgcgtttcttgtatttaaagaatctcctcggaagtgatgaattctttgacaatagaatcattgatgggcatctcgtcagaataccccaaatcccagatagagacattgacaagaagcgcattgaccaccgccatcatgcacttgatgcactcatcgttgctctaaccacaaacgtccatgtaaactacattaacaatgtcagtgcactaaatgtaaacacagataggattaacgaacgaaaagacctaaaagcgaaatacatgaccacaaaacatcgcgatgacggaacgaaaaagcgactatttctccctcccatgcaatctaaggaaggaggaaatgtcatttcttacaaatacgcctataaagatggtgagcctaacgatgttttcaagaccgttgctcttactgcgctacagaacacattagtaacatttaagcagaacaaccgtatcatgcggcagcgtaccaactacatacaacaccctgaacacaaagagagattaaaacaaatcggtctgaatttaaagaagaactattctatacggcaatcgctgcacaaaaagacattttacggactaaggaacttttgtcctaaggccattgaagaggccatcaaaaagccagataagatacttgacaacaaagtaagatttctcatacaactgtatcaacaacaaggaatgagcatggaatgtattatcgaactactaaaaccacagttcgaaaccgtctatgttcaagaaaagtgcgtcatcacacaatggtctcatcaactcgaatatctatcagatataaaagaaaaagaagatgacaagaaaacattaaagactggcaaaagtcctatcataagagaaatagaatgtgtagcagatatcaccatacaaaagatactaaagaatcatcttgctaagtatgactctataaagatgactattgctgaggcatcacagtgctacgatgatattgttaacgaagaccataaggccattgtcaatgagtatataacaaatgggacaacaaaagacatactcattgacgtattcgtcagagaaaagaacacggaagggaaaactgtatttcacaacccacagatagcattttctgccgaagggataaaagacatgaattatcacattacagaattaaacaatggaaaaaatcacaaaccaatttataaggttaaagtcactcaagcattaggaaagatgttccccgtagcagagattgatccagacaaggtcataactgccaaaaacaaacaatatgttatctctgacgcaggaagcaataacttctgtggtatctacaagtctgattctggagaaacagccatttatgttccttcattgaaaaccacaatagaagcaacaagaactaatgaaagcctattccctaacagacatcctgatgctgtagatttcaaatatgctttcactttatctccactcgacctcgtttatgtacctactcaagatgaacttatcaataaatatatcagcgaccacatagattatacccgtatatatgttgtcaatgatttcaatgatcaagggaagatgtatttcaggccctatagccatgctagtgctatagttgataaagaggttgatttacgaattgacaaaaaaggtaacattataggttctttttctgacaagaccactcaatgtcaaggacaatcaataagagactgctgcatccctataaaaacagaccgtctcggcaacataattcagattggagaaaggattatctctaaataatccataaaacatagaaaatacatgatcaaaaagaccctctacttcggcaaccccatctacctcagcctccgcaatgcccaactggtgttgcggaagcctgatgcggacaaattagaagagtcgttcaaacaggatgcagaaaggaccatcccgattgaggacattggcgtggtggtgctcgacaacaggcgcatcaccatcacgacgggagcaatggaggcactgctggccaacaactgcgccatcatcacgtgcgacagcacggacttgcccgtggggctgatgctgccactctgcggaaacaccacacagagcgaacggttccgcactcagatagatgcgtcgctgccactgaagaagcaactctggcaacagaccgtccgccagaaaattctgaatcaggcaacggtactgaacaggaacactggggcgattgtcaaaaacatgcaggtgtgggcaaatgaagtgagaagtggagatcccgacaattttgaggctcgtgctgctgcctactactggcgcaacctcttccccgctcttcccaactttgttcgcggacgtgaaggcgaccctcccaacaacctgctcaactatggctatgccatccttcgggcttgcgtggctcgtggactggtagggagcggacttctgccgacacttggcatccatcaccacaaccgctacaatgcctattgtctggccgatgacatcatggaaccttaccgccctttcgtggatgatttggtcatcaacatcatgcagcagtatcccgattacagcgaattgacccgaagcatcaaagcggcacttctcactatcccgtcactcgatgtgacactggatggcaagcggagtccgctgatgattgccgttggtcagaccactgccagccttgccaaatgcttcaatggggaattgcgcaagattgcctatcctgaattataacaaaaagagcatgagcagcctatcacgcctcaccgaataccgagttatgtggattttagtattcttcgacttgcccacagaaaccaagaaggacaagaaacgctatacggattttcgcaagaaactccagagcgacgggttcaccatgttccagttctccatctacatccgccactgtgccagcagcgaaaatgcagacgtacacttaaaaagagttaaatcttttcttcctgagtttggaaaggtcggattgctaactataactgacaaacagttcgggaatattcaacttttctacggacagaaaccgaccgagccgaaagcacccggtgttcagttggaattgttctgaaaacaaaaaaaccagccgattggctggttttttcatgttatacccctttcttttttcttttctatttgcattcataaccatttcagaatcttttatttacaaagattgtggtgtatatgactctgcaaagatactaatttgaaagcaaatcacaactcctgaatgtaacgctcactcttgccgaacggtgtatatgactctgcaaagatactaatttgaaagcaaatcacaacctgtgtgtcaccgaggtcaatctggtactcggtgtatatgactctgcaaagatactaatttgaaagcaaatcacaactgtaagcaaagcaataaaactttctacataggtgtatatgactctgcaaagatactaatttgaaagcaaatcacaacctcgttcattggaagtctctcgacaaacaaggtgtatatgactctgcaaagatactaatttgaaagcaaatcacaacgaagtggtcgatggagtcagatgtaaaggcggtgtatatgactctgcaaagatactaatttgaaagcaaatcacaacctgatgctgtgtgccaatctcgcgggcgttgggtgtatatgactctgcaaagatactaatttgaaagcaaatcacaactcttcatcttgcttgttgttttttaattgtggtgtatatgactctgcaaagatactaatttgaaagcaaatcacaacacgacctccatacatccatgcctcgttaccggtgtatatgactctgcaaagatactaatttgaaagcaaatcacaacgcataggtgagagagtggaccgagcaagcgggtgtatatgactctgcaaagatactaatttgaaagcaaatcacaactggtcgatgttatgatagaacttcacgaaggtgtatatgactctgcaaagatactaatttgaaagcaaatcacaactgctaatcaagcgcaacttgcttttcagcggtgtatatgactctgcaaagatactaatttgaaagcaaatcacaaccgttgccatgcttcagagaagaacgcttggcgttcgaagttctgatcgaactcgtcagatagctcaatacggatgtcctgaaggatatttctgatgatattttgaaatttttctgccattttgtttggaaggtgagaaaaatgttgtacctttgcaacaacgattccgtagctaatgactaccgattcgttgattgcgggagctggccattggtcagctgtccgtttttttatagagcagttttattgttccatcgctttctcggagccatacttcttctatgacctccccctagtgtatatgactctgcaaagatactaatttgaaaacaaatgacaacgcaacttaagcgtttcgactttgagaagaggtatattttctcgcaaatgtatgaatagtatgggaaaaatccgtatatttgtgccgtctttttatgaaaagtgaatagtgaaaaacaaaatgtgaaatgaataatactggaaatactcgattgccacatccacttgttgccctcatccctgttgtggtgctcatcgctttcttgggcacagccatctatctttttggtagcgattcgttgagtggaggcagtcagatagcgctcatctttggcgcgtgtgtgtgtatcgccttatccatgggcatctatcgcgtgccgtggaagactttcgaggagcgtttcgccaagaccatcagcaatatagcaatcatgatcatcatccttctggctgtaggcatgctctcgggctcgtggatgatcagcggagtggtacccacgttaatttattatggcatacaaattatatcgccccagttttttctggtctgtgcttgtgtcatcagcgcattggtttctgtgctatcgggcagttcgtggaccaccatcgccactattggcgtggcattgctgggcatcagcgaggcactgggcatcagcaccgcatggactgcgggtgccattatctctggtgcctacttcggtgacaagatgtctcccctcagcgacacgaccatcctcgcttcatcggtcacgggcactgacctcttcaagcatatccgctatatgatgtacacaaccgtacccaccctcatcatcaccatcaccatctttctcattgcaggattgggcaatgatgcggggagaaacctacaggtgacggaatatatggagggacttaacagcactttcaacatttcgctatggacactgctcgttccaatcattacgggtgtactcatcgcacgacgagtgccttctgtcatcacgttgtttgcttctgccatcatggggggcatcacggcactcatcctccagccgcatatcctccaccagattgcggacacgaatgaactttcctcttccatgtcattgctcaaggggcttgccatcactttctacggttccacagccatcgacacggggtatgccgcactgaatgacctgatttccactggaggcatggctggcatgctcaacaccatttggcttatcatctgtgccatgtgtttcggctccagcatggtggcaagcggcatgatcgagagtctcacccgagtcatcgtccgcatggctcacaaccgcttcagtctcgtcggcactactgcctgctccggactcttcctgaatatcaccactggcgaccagtttatttccatcgtcctcacagcagacatgttccgcgacgcttaccgccagcagggctacgagtctcgactcctcagccgaaccaccgaggatgtcgccactgtcacttctgtcctcatcccatggagcacttgcggtatgacacaagcggctgttctcggagtccccactatcgtctatctcccctactgcttcttcaacctcatcagccccctcatgactttgctcatggcggcgattgggtggaaaatttacaggaatggggatgtgaaagaatgtgccagtgaatccttagccgttagggagtcctaaatactcaaagaaacggtcgggccagaagttcatgatgagttcgtcggggaattgggtctctgacaacaggggcaccagacggtcgtagtcggctatctggaaggagatgtgggcatcgctcccgagaatggtgggtacctcgtacttcttgcagaggcgcagcagttgaagattgttgtcgcgggctgccactttgttgcgctgaggggcaagggagtggttgttgatttcgagcagggtgtgggactctttggctgccaacacaaggggctcgaagtcgagttctgccgttccgtcgcccggatgactgatgatgtgtatcttggggttgcggatgacgttgagcatgcctgctgtgttctctgctttggttcctccttgatagcatttctcgtggatgccggcaatggcgatgtcaagccgattgagatattcgtcattgaggtcgagacggccttcggtgtcgaggatgttgacctcgcaccccatcagaatgcggactccgtagagatggcggggcacgacgaacatgttgcggaaatagacgagggggcaagtgcctttgatgctgggaccgtgttcggtgatgcccagcacttgcagacctttgtccgaggcggcttgcgccatctcctgcagactgctgtaggcgtgtcccgacgctacggtgtgggtgtgggcatctatcagtatttttctcatatctgtcttcaaagtagatgttatacaactacaaatgtagggagaaatggtgaaaagaaaaaatatttgcagaaaaaacggggaagatgcttgtggatttggagaaaatgcgtacctttgcactcggtaacggtaatgagaggggcgtagcccagttggtttagagcgctgcagtcacattgcagaggtcatcggttcgaacccgatcgtccctacgcactttcaaagtgcaacagcgagaggggctgtttcattacctaaaaggaggagagatgccagtgttttacgctggcatctttttttgtgtaacaattcagcgcaagaacttcaacttgctttttctgaaactaatttgacgccagttcggtataagagaacttaatttcggaagttctttttaccgctttgcgggctttagaaaaacaagaaaaaaatagaaaaatacaagaaaaaaggcactccactttctctttttttttcttattttcttttgttttctcatatttttctaaagccgccgaaggcgtaattcttacaccgaactcacgttataattatcaaaatttgtgaataaaattattctaattatggcaatgtgtttcttaaaatccaccactgagggcgattcgctgaatagatttcttttttgtgtcttcgagttaaaattagtaaaaggaataaactttgcgataacgaaatggtcttaatgatgtgattacaacaaataacatattacattaaccctcatttaacagacacaatgaaaaagttttttctcaccatgatggtggcagcgatttcgctcacctcatttgcacaacagtttggcggcggacagcgccgtgagttcaaacctgaagacatggctacacgcagagccgaccaagtgaaggaggctgctcagactactgacgagcagtacaagaaggtgtatgaccttttcctgaagcaggctcaggagcagcaagcacgaatgaaggaggctcaggagaagggcgagcgtccacagttcaaccgcgaggacatgcagaagcagcaggaggctactaatgccgcactgaaggagattctgggtgcagagaagtttgaggcttaccagaaggctcagcaggagcgccgccagcgcatgggtcaaggtggtggcttcggcggaggtcgtccacgtggtcagggcggtcagcgtccacagggtcagaacctgtaaggtgtcgcctgaaggggatttcctccctgtcaataatagcatgaagaggaatgcatcaaaaaaataggtgcatccctctttttttgcatttttctttttattgctgtccgctaaaaatcaaatgaacattaaaaatcttccgcactgccgataaacaggcattgcggatacttttttcaaaaagtaagcccctctt

SEQ ID NO: 4089 - DNA, 19424 bp, synthetic construct
  source 1..19424: mol_type = other DNA
  misc_feature 1..19424: note = Synthetic
gaccttcactatggttgcggtcaacaacacccgacgcacttgttccatagaacacgctggagtatttttctattccgataatgtcgctgaagttaacatgaagaagcagataaacacatgcatcagccatgtcttcactccaaaggaactcacgcaaaggtgttcctgttccccacaactccaccttattatcatgaataccatacttggcaagtacgttgagaatgtcttcattgcttctctcgcttgtcactccttccacgggacgtttgtctatatccttgcgaatggcattccaatctccctcatgaatgagttttgccagataaatcttacgaatcatcgcgggcattacgtgggaattctccaaatggaaattatcattgggcccgtagagattggtaggcatcacggcaatataattggtgccgtattgaagattataactctcgcacatcttcaatcccgcaatcttggcaatggcatattcctcattggtgtattcaagtggtgaggtaagcaaggcatcttccttcatgggttgaggcgcattcttcggatagatacacgtactacccaagaagagcaacttctttaccccatgtgcgtatgcttcgctaatcacgttgcattggatcttcatgttttgcatgatgaaatccgcacgatacaacgagtttgccataatgccaccaacgaatgcagccgccaaaaccaccgcatcaggacgttcatcatcaaagaatttcttgaccgccacttgatccgttaagtcaagttccttatgggttcttcccaccaaattatgatatcccctcgccttgagattttcccaaatagcggaacccacaagtccgtgatgtcccgctacatatatttttgaattcttatctaacataatcgtgatgtttaatattaaaaaatgagcgtttagtgttttggtaaaaatacgctcaacaccaaacgctcaacactatcatactttattatatttgtgatttcaagtgtaatttcttgacgaatctcatatcatgttcaaccatgattttcacaagtgtttcgaatgaagtctttcgtggattccagcctaacgtttccttggctttcgttgggtctccaagcaactggtctacctcagcaggacggaaatacttggggtctacctctacaagcactttacccgtagccttgtcgattccttgttcttccacgccttcacctttccattccaattcaatacctacgtgtttgaaagccaatgtagcaaactcgcgaacggtatggtattcacctgtagcaatcacgtaatcgtctggctcaggttgttgcatcatcaaccacatacattcgatgtaatccttagcatatccccaatcgcgcaatgaattcaagtttcccaaatacaacttatcttggaatccttgcacaatacgagctgcagcaagcgtaatcttacgcgttacgaaattctcaccacgacgctcgctctcatgattgaacaagataccattgcaacaatacataccgtatgattcacgataattcttcataatccagaaaccgtatagcttggcaacagaatatggagaacggggataaaaaggagtcgtttccttttgtggcacttcctgaaccttaccgaaaagttctgatgtagaagcttgatagatgcgacacttcttctcgatacctacaattcgaacggcctccaacaatcgaagcacaccaatagcatccgtttctgccgtgtattcaggtacgtcaaaactaaccttcacgtggctttgggctgccaaattataaatctcgcttggcattacttctgcgataatgcgaatcaaggaagaagaatcggtcatgtctgcccaatgcaaattcacgaggcgttgctttttcatgtcacgtacccactcgtccaaatacaagtgttcaattctacccgtattgaatgatgatgagcgacgaagcaaaccatgtacttcatagcctttttcaatcagaaactccgcaagatatgatccatcttgtcctgtaataccagtaattaatgctactttcttatccatttgttctttcatttattctccactaaattgtttgattcgttgttcctctgccaacttacagataagcaacgttccatctttttctgccacgatataatcatcgagtccctgtataaccaccttcttctcttgtgtagtatgcaccacgcaattgtgtgaatcatacatggaaatatcgggaccgatacatgcgttgccgtataaatcacgatggacttgattcaacaatgagccccacgtacccaaatcactccatccgaaactggcgggacaaacgaagatttccgaaaccttctccatgatggcataatccacggagatattctcgcatcttggatattggtcgtcaatcatctgttgttcttctggagttccatacacatcagtaagaccttcaaaaaccttgctgatggaaggttggtacacgcggaacgcattgacaatggtattcacattccaaatgaaaatacctgcattccaaaagaagttgttttgtttaatgtatttttgagctgtagccaaatcaggtttctccctgaattggtctacacgataaatctctctgttgcgaacagaactggaagacaagtcggcttgtatatacccatagccagtttcaggtctgttgggcttcattcccaacgtaacgattgcatcactctcacccgagaacttcaagcaagtctttaccactcgttgaaactcgccttcgttcattacaacatgatcgctgggagttacaacaatattggcttgggggtcttttgacttgatgcgccaactcacgtatgctatacatggagcggtgttgcgcctacagggttccaacaagatattctcaacgggaatctcaggcaactgctgctgaatgatttcagcatacttcttattcgtcaccacccaagtattctcatacgggcagattcccttaaacctgtcgaacgtaagttgtaacagcgaacgacccacccccaagatgtcgataaactgcttggggttatcaactgtactcattggccagatgcgacttcctacgccaccagccattatcactacgtggttattcttctttattgccatagcgttccgtttactttcgtgtagaaagcgcaaatttactaaaaatcatctgattgaacaaatgattttagataattaacgaaaataacatgaaaacatgcttatttcgtgatgcggaaccagtctatgtctaaatatccgttatttccttttatgtctataggttgcgaggcaacaagtcctactttcgcaccaatccactttccttctttcatcgtgaattcagaacctacttccttatatgacttgccgttggtgctataagcgaaagtgcatttcccgtcttttaccttgattctcaaatacacgtcttcatacaaggctgggttgtagtttaccttatccttatccgtaggtttcaatgtggcgagcacttggatagtttcatccttgcccttatcggctgccttgcacgtaatctgttgcaattggaattcatcccctactcttttcacgacaagggctgagtaatccataccaaacatgatgattccaccatattgcttttctgccttggcggcaaaacgaacctttgtggttgcggtaaacacatcggctggcgttttctgaagcaacatagcaggattctgccataagttaacgggaatgttttgagtgcctaacttatagcaaaaaagacggaagaagccatctgcagtaggcattccatacaactgatgataatctcctgcccattgccattgcttgcccaatgcgggttgattgaattcgtctgattcaacgggattacaaagtgccacggaaacagcagtcttgggtttcttgtaagtcatcacgggttcaccacaatatcctttcttaggtacaactcccatcacaggccaattgtccttccatgtaacgggttgcaaatgaactacacgaccataacatcctttatcttggaagtgcataaaccaatcttctccaaatgccgtatgtacccaaccaccttggtgaggaccatttaccttcgtgtttccttgtgccaagaccgtcttgcactcgtatggtccgtatggagatttcgaacgcatggctaattgccaaccttgttccactccacctgcaggacacaaaatccaataccatccgtcacgtttgtagaacttaggaccttctgccgtgcgattctcatttccgccatcaaacacgatgatggggtcgctaatggctttcgttccgtcggctgacaattcacgaacggtaagtatactattgaatccagctctactgccagcccatccgttaacaagataacaacgaccatcatcatcccaaagtggagttgtatcaatcattcccttgccaggaatcacgcaaacggggtcttcccatcttccgtatgggtcttttgtctttaccatcatcacgccattgtctgggtcgccccaataaatgtaatattctccctgatggtaacgaatactcggagcccacacgccatttccatgttgtggtgcgggtgagtcggggaattgacttctcaacgcgtaattgatgatttcccaattcaccatatccttactatgcaagataggaagtcctggcatactggcaaacgaactggccgtgagataatagtcttctcctacggctatcacgtcagggtcgctatagtcagcattaattactggattggtgtatgtaccgtctccattgtctggacaccatacttccgaaacataattctgcgccatcgcggtcatgggaagcatcatcattcccagtaaaaaggtttttgtcttcatttctatattattaataatgtaagttcaatttataatgtctcatatactttccatcggcaaaatgtccaatcgataacccttatcatatttcacgctcatcagcataggatgaacgaacttggattgtaatgacaatgccacatgtcccatcgttctcctcaagtttaattccacacaaggatgcaaccgataatggctttcttcgttaaccaccatcatatccactccaaaaggtccccaatatgtatcttgaagatattctttcatttgttttaatagttcatccctcactttgtccaacacagacaagggtatatattgggaaatcacttgtagtttataatcttcagacgcaagaatgttgcccgtgtaccctcccaaattggtcaaaaacaacgaaattccaagatattttattccttctgcggtggattcaaactccatggcaaaatccaatgagtgctgataatagggttctaccattattccaccctgtttctcaatgacgtttttcgcccaattttggtttgccgaaaattgttgttcattgagagcgtatcgcactcctctcccactacaactccaaggagacttgaagacaacaggacgtgtgaatgatgataacgacgtgacataatcggcttcacaaacgattgtctcgtccaactcattcaaaacgggcaatagatgaatggaagtccattggcgactactgatttcacgaatctctctcaattgttcatcggtgggcaaacaagcgggcgatacttgcaagcgtttcaattgatgaacgattgaacgatcccatccccacggacaaacactatctataggcaactggggaatatgtttagccgtcacaaacatgatgtttgcataaggcaaacctattctttccaaagactcatgagccttctcaacatcttccacccaaaccgcatctccatcgtttgcccataaagcgggcaaaaacgacagatacgaacgcatctccctccctgctcgcggagaggtaaactgatggagattggcggcaagcgccatctcatgttcgggattgaatacgtgcagaatcatgaagcaagctcaatttgagtgcaaatttactatttttaccgaaataattcgttatataaacgtggaagaggatgtgccaggcacaccctcttattgaatcttgaagaatcccgattctttcgcaaacaagcgagataaaacctttgactatcggactcttcattatcatttacaatctgatgagcgtagaaccttgcgttccaatcttcacgacataaacacctgaagagagagcgggcaactgcacattacccatcaaggtggtaatctctacatcaagttgcttcaactcattggcgatagaggcggcactcttgtcgggattacatgttaagatgaaagtagtacgctcggcattggcttcattctgcttagccaagcggacattgtttttttgaagatacaagttcttcaaactattcacattaggagaaaaaacactttgtgccgttgctgtttgccctatcatcaacgcagcaaccagcaatccaaatagtttacgtttcatgactattatttcttatgatgataatcgctaatcaatcctttcttcacgagaattggcaatatattggctgccgactgacgattgcttttcttttggtttccctgatattgctcaaacaagacagggtcgtcgcgcagaaggttttccataaaactatcgttgatgcgcatcatgagaatcttacctttttcattcgggcccttatccaatagatacaagacgtgtttctccattaagtcatcattggtcaatagcatatccgcagccaagaagagcgaaccagcagtataactacccgtagcaatcaaaccaatgtcgagtcctacgtttacaatatccaacacgtcgcccaatgacaccctatagctaatcacgcagagtttattgcctttgtatggcaaggcacgtgtataagcgctgataggcagcacggcaccgtcgtcatcgcgcaaagaacggctgttaatgaagagttggttatcaacagacaccatgaaaacatccttcttgataatttggtttacctccttgtcatcagtcttgatatcaaagtcgacaccattgtttttgatacgacaagaatcaggtttcttgtcacccgtcaacgattcgtatggactccacttattctccataaaatcggcataactcttacaaactttcacctgtgcttgagcgttcattgccattccaaatagaaactaggcaattgataataatttgtttttcatcttcatagtttttattttgataaaattagtaaattttctatatgattaatatttatgcaaaattacaacaaagattttaaatatatttaaaaagtacccaatttaacttttgttatacttacattcacccatcagatgacataattgcaggaaatagatgaatgaaatttcatgctaagagtcttaaaaagacatttttatgaagacaatccactaacacaaatgttacatttactgacataaatagtacatttttacatttattcacgttttaatgttttttttatgtatattaaagtcaaaatcttaccgctactttgttgcaaaaaggcaatgttttttatatctttgcacaaaattatcaatttcactaacacatggaagcatctccaaactacttatttttggcgctgaagttactcggttctttggctttattgatgtatggtatgaaaaccatgagtgatgcattgcagaaaatggctggtccacaactcagacacgtactgggtgcgatgaccaccaaccgttttacgggaatgctcacaggtatattcgtaacggctgccgttcagtcgtctaccgcaacaaccgtcatgacggtttctttcgtcagcgcaggcttactgactttggcgcaagccatctcggtcatcatgggtgcgaacatcggaaccacgcttaccgcttggatcatgtcggcaggattctccttcaacattaccgatttcgtttatcccgcctttttcatagccatcatactcatctacaataaacgtcgtcgtgtattcggcgacttcctctatggtatcgcgttcatgttcttgggactgggcacgttacgccaaacaggtatagacatcaatttgggcgaacaggaagccgtactcaacttcttctccagtttcgaccccaatagtttcattaccaccctcaccttcttgctcatcggtggaatcctcaccatgtgcgtgcaatcatcggcagccgtaatggctatcacgatgattctctgttcatcgggcgtactacctatttatcaaggtattgcattggtaatgggtgagaatatcggtaccaccgttacctctaacatcgtggcgctctctgctggaacacaagctcgacgggctgcctttgcacacatgttcttcaacctattcggtgtcgtatgggtgttaatcatcttccatccattcgtgaatatggtgtgcggattggtaggatacgacgtggaaatgacaaaggcatcagcaggtcatgcggaattcttggcaaatgccgccaaactcagtttcgtattggctgcgttccatacttgtttcaacttgattaacacgggtatcttgatttggtttatcccacaaatagaaaagttggtttgctatgtcatcaaaccgaagaaggaagacgaggaagaagacacgcgcttgcaatatatacaaggtggcttgatgaagactcctgaaatctccgttttgcaggcacagaaagagattacgctcttcggtgagcgcatccaacgcatgtatggcatggtgaaagacttgcttgccgagaaagacaaggagaaatttggtaaactgttcgttcgcatcgagaagtacgaaggtatcagcgacaacatggaaattgagattgctcgctacttggaacaagtaagtgatgctcacctttccgacgagacgaaggagaaaatccgtaggatgttgcgccaaatcagcgaaatcgaaagtattggtgatgcctgctacaacttggctcgtaccatgaaccgcaggatgcaatccaacaaagatttcacggctcagcaatacgaacagattcataagatgattgacctcaccgatgaatcgctcacgcaaatgaacaacatcttgaagggtcgtcgcgaagaactggacatcaacgagacattccgcatcgaaaacgacatcaacactttgcgcaacagattgaagacggagaacatccaggccgtaaacgaacaccagtacgattacgctatcggtacgatgtttaccgacttgatcagcgagtgtgagaaattgggcgactatgtggttaacgtcgttgaggcaaggttaggaaagtaggattaagtatcaactgaaatagcacatagcggagaaaaatacggagtaaatccctgatttttgaaaaaatcatcggaatttatttgccagttcaaaaaaacttcgtaactttgcatccgcttttataagcaaaggatcgggatttagcgcagttggtagcgcacacgtctggggggcgcgaggtcgctggttcgagtccagtaatcccgacattaaaacgctaactatttggatataaatagttggcgttttttttattatccatttgcacgacatccctttaaggctcagtcaataattgatggaggtaagcgatatcatcaataatgctattctcttgcttctgactgtcttactatctttaaaaagatgaaaattgtcctaaaaaaagacacttaactgttttgaaagttttagttaagtgtttctaaagttatgcttaactgttttgggagttttagttaagtgttacttttagttgtcattatttggtattcctcaaacactccacgcacaaaaaaagtccaccgtttaaggccgatggacaagaacctaatgttttcacaacggaataatccttattgtgatttgcttaaaattagtactgcaaagataaactttttcgttataagtaccaaatgttttagaaaaaatatgtatttttgtagctaaataactaaaaacaaatatcatgaagaagattttaggccttgatttaggaacaaatagtataggatgggcagtagttgagattgacaatatcaagaggattgtccgcattatagcccttggctctcgtatcattcctatgaatgctggggagataagtacgtttgaaagtggaggtaaactaaaaagttctgctgcaaacaaaaccgaaaataaatctataagaaagaacaaagcaaggttcctgttgcgtagggatagactacattgcgttttgaacctacttaacatgttgcctgaacattacaaactcgacattgaatttgttgatgaaaaaggtaaacgatctggtaaaatcatcaaaggtcgagaaccaaagatggcctactacacagacgagaatggaaagaagcagttctatttcaaggaagcatactttgaaatggaaggtgaatttaaaactgtccatcctgagctattccaaaacaacccacttaaaaataggaagaaaagaataccctatgactggactttatactaccttcgcaagaaatctctttcacaagaactgagtaaagaagaattggcgtgggtcattatgagttttcttcaaaaacgaggctacgagaaggttatgggagatgacgagaaagaacaaaaagaaaatgaactctctgagaccatcaatgccaaggtggtctctgttgagcctttgtctggaaaatcctccgaaggcttaaatctttatcgaatacagttagctgacgaatttaataatatcatattcacatacaatgaatctgctcaatatcaaataacacaacccaacgaatataaacaattagaaaagattaccaaactggacaatgatgagaacatcaagaaagaaaatataattattagcgaaataaaaaacattgaaatcacagatgttatcaatacccacgtaaacaaaaaagaaaagacttcatttgagattcttcttgagacaggatggaagtatgaatacctcagtcgccattatcccaagatggtgggaacacgcagagacttcatcatcacctcaacttttgataaaaagggcaatctttacaaacgtaatatctctatgcccaatgaagactcgaagcaattagagaaattgaagacggaaacatccatacaagaatacaactcgaaaaatggaagtgtaggcgttgcatcctacatatatgacgcactgcttagaaatccaaatcaaaagattagagctggtttaatagagacaatagaaagagactactacaggaaggaactaaaagccattattgaaaagcaaaagctattccatccagagttgcgcaacgaacaaaactatcttgatgcacttaggatgctctacccaaataacgaaacccacagaaacacacttgcaaaccaagaatttgcgagtcttcttagtgatgatattatcttttaccaaagagacctcaagcccaagaaatctttaatagcagattgcaaatatgaatatttaacatatcacaaagacgggaaagaaataaaaaagcctttgaaatgtatttctaagtcaaaccccttgtatcaggaatttaggttatggcagtttataaaacgcttacgcatcattcagaaagagttaaaagaagatcaagggaagcgaaatgagcaacttatcaatatagatgtctctgataagatactcaccattccagtaaaggaaagcttatttgagtatatcaataacagaaaggaaataacccaatcggctattctcaaaaagctaaaattggatgaaaataattacagatggaactttgaggaagaccacaaagagccgtgcaatgagactcgatatgattttgtgctacgattgaaacgcatcaaaggattcaactgggagaagtttctaaacgcaaggtcaaaagttcacaaatcaagaaggggaaatgacaccaacaccattattgatgggccaaacaatgaatatctgttatggaatttcttctattctataaagaagaaagatgaaaggataaaaggattgccacaccttatcgaaaagcttctccgaaacgctaacatggatttgatgtataaggaaaaaatcgttgagacaatcagcacaatctcaacttacaagaatgagtatggcaattattccgaaaaggctatcaagaagcttttgccatttatgcgacttggaaaatattggaatcaaagtgatgttgagcaagtaaaaacgagtgaacacattaagccagaagtgctgataaaagaaaacataaatggtgaaataactgatttacaaggtctttgggtgtcgagcgcttgttatatcgtctatggtagatattctgaagctggtgatgcagcccaatggaatcagccctatgctataaaagagtatctccaaaatgaatttcgacataactctatcaacaaccctgtcgttgaaaaagttgtacgcgagatgctcatgattgtacatgatatttggacaacctatggagaaaccgatggaacatttatcaatgaagacggaattgaggttgatttctataagaaatacttcgaccaaataaatattgaaattggtacgtcgttaaaaagcaacaacaagaaaaaagaacgtgatagcatcaaaaatgccgaaaacaagcgagcaaacgatagggcctacgagatgctaaaggaattaaaaacgtctattcatggaattgaagagcgttccccttatcagcaagaaaaaatgaggattcttgaggctggtattcttgattccatttcacgagataaagatgacacaatttatgattttgctattgacacaaacgaaagaaagctaacaaaaaaggaaattcgtgaactcataaaaaaagatgtagagaaaataagtaaaagcgatattcttcgttacagactatggcttgaacaacgatacatttcgccctatacaggaaaggccattagtctatcaaatctttttgatagaactaagtatcaaatagatcatgtcttcccacatgaaaggattacgttcaactctatatccaacaaagtaatctgcgaagccatagttaatcaggcaaagggtgcaatgacaggatacgagtttattctcgaaaaaaaaggtttggcacactacaaggggcaagacatccctctgctaagtccagaagaatacgcttcacatatcaaagatacaataaaggacaacgagaaaagagaaatactattgagcaaaactatccctgacagattcggtaataatcagctcaataacagtcggtacattgcaaaattggccatgggaatacttagcaacattgtaagggaagatgacgaaaaagaatataagtcgaaaaacgttgtggtcgtgtcaggcggtgttactgctaaattaaaaaaagactggcaacttgacgaaacatggaatgaactcatcaaaccgcgctttttatatatgaagaatcagttaggaaaagacgaattcatagaagaaaggtatatagacggccatcttgtatccatacccgttatacctaacaaagaaatagaaaagaagcgtattgaccaccgacaccatgcacttgacgcactcatcgtagcgctgaccacaaacaatcacgtgaactacatcaacaacctaagtgcactgaatgtaaatacttcagaaagaattggcgagcgcaaagatttgaagtcgaaatatatgactacaaaacacttggatgatggtactaaaaagcaattcttcctccctcccatgcaatataagaatggaaacgaaatcgttacatacaagtatgcttataaggactgtgaaccagataatgtcttcaaaactgttgctcttactgcactacagaaaacattagtgacatttaagcagaacaaccgaatcatgcggcaacgaataaactacatcatacatcctgaacataaagatgggcttttgcaaaatgatcttaatttaaagaagaactattctattaggcagtccctacataagcagacatactacggacaaagggaattctgtccgaagcccattgaagaagctatcaaaaagcctgacaggatagtagaaggaaatgttaaatacttaatacaaaagcacctgaatgaagggaagagtaaagaacaagttatagaactgattaaactgctacatcctgttgtttatgtaaatgagaaatgcgtcaccactcaatggtctcaccaacttgaatatctggcaaacataaaagaaaaggaagatgacaagaaggcattaaagactggtaaaagtcccgtaataagagagattgaatgtgttgcagacattgtcattcagaatattcttaaaaggcatcttgctaaatatgactccataaagatgacagatgtagatgcatcaaagtgctgcgacgatattgtcaacgaagaccagagagccgtcgttgaagaatatatagctaatggcaaatcacaaaatatgctcatagacgtgtatgtcagagaaagaaacaccgaaggaaagactgtttaccataacccgcaaatagcattttccgcagagggaattaaagacatgaacgaccacattattgagttaaacaatggcaaaaggcacaaaccgatttacaaggtaaaagtatcacaagcattaggcaaaatgtttcccatttcagagagagaaccagaacagcctgtaacagctaagaacaaacaatatgtcatctctgacgcaggaagtaacaacttctgtggtatatacaaatcggcccaaggagaaaccgccatctacgttccttcgttaaaagccacaatagaggcaacaagaaataatgatagcttattccctgatatacatcctgactccgctgatttcaagtatgcttttatgctatcacccctcgacctcgtttatgttcccacagaagatgagattgaaaacaactatattagcgacaacattgactattctcgtatatatgtggtaaatgatttcaatgaccaaggaaaattatatttcagaccttatgctcatgctaatgccatagttgataaagaagttgatttaaggaaagataaaaaaggcaatattattggctcattctctgacaagaccgcaaactgtaaaggaatatcaataagagattattgcatacctgtaaaaacagaccgtctcggcaatatcattcagattggacgtaagattatttcaaaatagtcttagatatgtaatggcatgattaaaaagactctgtgcttcagtaacccagcttatctctctttgcgagatgctcaattggttatcaaactgcctgaagtggaaaaggcaaagaaccttattgacgactttaagaagtctgcagagataactcgtcccattgaggatattggcgtggtggtgcttgaccataagcagattacaatcacatcaggagtgcttgaggctttgttggagaataattgtgccgtcatcacatgtgattcacattcattacctgttgggttgttgcttccattaacgggtaattccacacagaatgaacgctttagaaaccaaatcaatgcttcacaacctctacgtaaacaactatggcaacaaaccattcaaaataaaattcgtaatcaagcaaaagtactggaactttgtacgcacaccgaaacgggatgtatgttagcatgggcaaatgacgtgagaagtggagaccctgacaatttggaagcaagagctgccgtgtattattggaaagggctattcgggcaaatcaacgggtttattcgggaaagagatggtgtttgtcctaacaacctcctcaactatggttatgccatattacgggctgtcgtggctcgctcattggttgcaagtggattattaccaactttaggaattcaccatcacaaccgatacaatgcttattgtttggcagatgacatcatggaaccctttcgcccttacatagaccgtttggtttatgatattgtagagcaatatggtgacaatatagagttatcaaaagatgtcaaggctgaattgttatctattcctgtattggatgtggtcattagcggcaagcgtagtcctttgatggttggagttgcacaaaccacggcttccttatacaaatgttttagtggagagatacgtaagataacatatcctgaaatgtaaacaatgaatagatttagcgaatatagagttatgtggctattagtgctattcgatctgccaacagaaacgaaaaaagatattcgtgaatatacaatattcaggaagaatttactaagagatggattcaccatgtttcagttctctatttatgttcgtcattgtgccagtttggagaatgcagaggttcataaaaaacgagtgaaatcttttctgccaagatatgggaaagttgggataatttgcataacagataaacaatttggaaacatagagttgttttatggcaataagccacaagtccctaatacgccaggacaacaacttgaattgttctaaaaaacgtgagttcgacgtaagacttatgcaattacatttgtaagagtcagaattgtccttctgagcagagaggtggaggatgtggaggatgaaatagtaactgcgtataaagaaaaatcatttaggtcgggggtaaataatttcctatagggaaagttgcaaaacctatcgtcattatcgtcactcttatgtcgaactcatgttaaaaagagaattccatcgttttaaatggaattctcttattcataaacatcatttttctttttctatttatccttgcaaatagttgataattagcgctttactctaatcgagatgtttatgctattgcaaaggtactaatttttaagcaaatcacaacttttggtgaacttaccgccttcacgcactgatgtttatgctattgcaaaggtactaatttttaagcaaatcacaacacacgcaaacaaggcagcagtggacttggtgatgtttatgctattgcaaaggtactaatttttaagcaaatcacaacgcgttacgaataccatcacggccaacatggatgtttatgctattgcaaaggtactaatttttaagcaaatcacaacgacacctcgtaatgggttctgctcaatcagatgtttatgctattgcaaaggtactaatttttaagcaaatcacaactcagacgaagtgtgatgtctgcatcctcggcgatgtttatgctattgcaaaggtactaatttttaagcaaatcacaaccctgatgagttcgatgacatcgccgcccttgatgtttatgctattgcaaaggtactaatttttaagcaaatcacaactctgcttgtggtcagttgttacccgtttagatgtttatgctattgcaaaggtactaatttttaagcaaatcacaacaaatggtagagaactgtaatttttcagattgatgtttatgctattgcaaaggtactaatttttaagcaaatcacaactggtcgctcatattcgaatgctgttggcttgatgtttatgctattgcaaaggtactaatttttaagcaaatcacaacttccattgtcatattaagagtttagaggatgatgtttatgctattgcaaaggtactaatttttaagcaaatcacaacgctttggcgatagcttttatcagagcctttgatgtttatgctattgcaaaggtactaatttttaagcaaatcacaacaacatttaaattattgcactaactttgcagatgtttatgctattgcaaaggtactaatttttaagcaaatcacaacgtatatgccagcatcgtaaattgaacgtttgatgtttatgctattgcaaaggtactaatttttaagcaaatcacaacttaagtctggtcggcgttccaataggcttagatgtttatgctattgcaaaggtactaatttttaagcaaatcacaacttgttttttcatttaacctatgcacctggtgatgtttatgctattgcaaaggtactaatttttaagcaaatcacaaccaactacagacataataatctcttatttaagatgtttatgctattgcaaaggtactaatttttaagtaaatcacaacaatagcctcaaagttattattgttgatttgatgtttatgctattgcaaaggtactaatttttaagcaaatcacaacgccttggttataccgcctttagtctacctgatgtttatgctattgcaaaggtactaatttttaagcaaatcacaactccacccaccaacagttcccgtaaaaaggagatgtttatgctattgcaaaggtactaatttttaagcaaatcacaaccataaataaaggaaatctgtgcaaaagaatgtgttgacatgtttttgcttgaaaaacaaagctatatagcaactcgcagaattatcgacgagttatacaatgagaagtagtatgtggcaaattacagaaaacggaaatctttagagagtgtcgatttatcgttgtggaaagaaaaagaaaggtctaaggattttaggattggaggattttatcataagtgctgataatgaaaatccttgaatcccataatccttagacatagaaattgcgggaatggataagagagttcttccgttgtgtattaccacgggaaagtctcagggtcgttgagcacgttagaacgcagattctgattcagggtattgatggcgtgcatatcctcgtcggagagcgtgaaagtcatgatttccatattctcgtcaaaatgctttggcttggcacgagggatggtaatgaggtcacgctggactatccatcgtagcacgatttgcgaagccgtcttttggtattttagagccaacgaagacaacacgggatgacctattacgtcaatgtctccctgtccgaaaggtccccacgcttccacttgtatacccaactgatgattgtaggcgatgttctcttcctgtgtcatcaatggatgcacttcaatttggttgattacgggtcggatttcagcatattcgagcaattcatccagatgatgtcgattgaagttgctcacgccgatagacttcacgagtccttttttcacatattcctccttcacctgccacgtacttttcacgcagttcttcacaggccaatgaatcagcaacaagtcgatgtagtcggtcttgagtttgcagagactctcgtcaatagaatccctaactgcctcactcccttgtcgcatgatgtttgtagccactttggtggtaatgaacacttcactccgttccagcccactatcgataataccctgtcccacttcggcctcgttttcatacccttgtgcggtatcgatatgtcggaatccagcttctatggccaaacgggtattttgccttgccgtctcaccatataacgtccacgtacctacaccaatctgaggaatttccggcgcagatgaaaacttccgtgg

SEQ ID NO: 4090 - DNA, 12882 bp, synthetic construct
  misc_feature 1..12882: note = Synthetic
  source 1..12882: mol_type = other DNA
gatgttgaggtctttcggcagacggatttcgggagcgatgatttcgtcgacaagttgttcttgcgatttcacgccgatgaccttgagcatcttttcagcgtcggatgcggtgggcccgttgtggcgtttgataaagttgtttctaatcattttgctgtgttttaattatttatgattgaattttactcgtattcattaagtttttgttccaatgcgttgacgttttggatggatttgatttcctccgacgggacttgcaccaatttcgctttccaagcattgaaaccagaagtgttttccaagatggtcaggtagaggtagaaaaactccttgctcctcagattcttgtttttgtattgattgtacaaatcataataggtgcgcatgttcttctcctgacgatggatcaacacccaaaactctttcctgaattgctctttcgcgtccaccgtggtttgggcaactggttctttcttaacttcttgaaccggtttaacttcttgagctggcttagtttcttgaaccacttgaactggttggggagtttcttgaacaacaggtgtttctataacttccacaacttctgcaagttgcttatcttgaacggtttctgttggagcagattcggcaacggccttttctgcttcgggttcaaccacttctgcgacagcctcaacggtttccgtttcgtcgatggcggcagtgtcttccttgatcgagaagtaggacgaggtggcgtcaatcacgacaggctcggattggggcgcggcgggcgtttgatggttgttcctgaaaaggctaaaaagcatgatgccagcggcaaccaaaagaagggcacaggcggcaacaatcaagttggttttcaacttcgggcttatggactttggctcgtattgggcgaccaaacaaccgtcgtaaccgcttgactcaggctcaggcttcaatttgaatccagccagattaaaacctaacggcggggtgatgaattctttgacgtcgtggccgtcttcaaagcaggaataggggcaattgggaagaagttcgccttctcctgcgtcaaccctgtattgtttgttctccatagttttcatggcttttccaattgtttattcgtaatcctctaatatctgtttcaatgcgttgatggtatggatggacttgatttcgttggatgggacttggttgagaatctcgctccatgccttaaaccgagttgtgctacccaaaatggtaatccaaaggtaatggtattcgtttccatcgactttcccatagtatttcctgtataacttgccgtattccgtcatccttttgtcctgacgatgaatcaatgcccaaaactcctctttgaattgggcagtatataattcagtggaatcaagttgaggctcagtcgtttcgctgattctctcttcggcttttgcttggaagggagcggtttcagcggccttttcctcaacaatctcatccttaacaataatagtggtgtcattttgggcaaaagattcctttaaagtgtcatcaatggcaccaactgaatcaatcgaatcatccatttcaattgtatccattgcaacaatggcaaaatcagtaactcctacttcgtctaataataccgtctgccttatctgggtcatttgagccatgtatgatttggtttgggagaatagggtggtcaatatcagcccgaatacgacaaggacggccacggcagccaaataacgccagaagttatgcttgggtttggcagtggaactcgtcttctcgaactgcgcaacagttttctcctctttaccctgttcaggatcgattgagttggtgttgggatgttgttggccttccatattacttggatgctttgaggttgctcctcaatccatcaatgttttcaatggtcttcaactggctctcgggaacggtcttcattttgtcgtaccaagccttgaacgaaacataatccttcaaaatgacgaagcggagatagtcgaattcctcgccgctgaccttggacttgtatttgttatagaggtcggtgtaggtgtccatgctggcgttgcgagtgtggattagtgtccaaaactcttgtttgaacaaggtgttcgggtcgtcggcagcaggcttgggtgtttccacaactggggtcactggcgtttcttccacgactgctggagtcgttggcgtttctttcacgacaggcgctacttccggtgctttcggttccgaaggattgttggtgacagcggcaggcgtttcgtcgaaattggcggtgttggaattgtctttgtttttggcagttttggtgggctgcactttggtttccggctctttttcggtgcgacttggtttaggattcttgaacacgcttacggccaaaacgacaacgagtgcaacgacaaggacgatggcaatcacgaggactaacttccaaagattggacataatcctttgggtgaaaggcactttagtgtattctgcggtgagttttccgtcgtaaatttggttgctggcgttagggtcgaacttgaagccggcaaaaacataacctttgggaggtatgataaaatcttggacatcatgcccatcctcgaaggtcgagtagggacatccgggcatttttttgcccttcccggggtcgatgctgtagtgtttctcggcaaattctatcatttcggattttattgtaaggttttgtttaacgtgatgtaattgggataggcaagttgctggtttccaacggtaatgtaaggcttcacctgaagtcccacattaacgggattgctgctcgcgccggctaatttgaaggccaaattcacgatggcatccgccgattcgccgctgaacagttggaacaggtctgtagtgacgggaatcgtgaccatgctgttcgatttggcgggaacgttcacgctgttgttcatggtggtgctgacaacttgctttccgttgagggtcaatatgtaatccatcttggccatcgaagcggcgatggagttggggttgcttacatcaaggttgacattgaaagtgacgggcaggcttctgttgctgattgcgttgacgagagccaatccttgcgaaatgttgaggttctctctcgacatgcccttgctcaggttgatgccgagcatctcaatatggttgacgctgttgaaatcgaaggtgcaattggcaaagttggccatttgtgcaacttgagtgagcacgtcacacgaggccaatcctgccgtgacgaataaaattataagggttctcttaagttttgacatgtctgtaattatctaataatcaatttaataaatcacaaaaatccaacaagcgttgggcttgttttctgctcgtctataattttgcaataatacgaaaaaagtcggacatacagcccgacttttggaaaatatttttcggcattattcctctccacggcgcgaggcgcgtttgcgctcaatctcgtcgaggatgattttgcgcaagcgcaggctcttgggtgtgacttccaaatattcgtcgtcgcggatgtattccatgtattcctccaacgagaaccgcacgggcgggatgaggcggatggcctcgtcgctgcccgaggcgcgcacattggtcaagtgcttggttttgcacacgttgatgacgatgtcgttgctgcgggtgttctcgccaatgacctcgccggcatacacatcctcattcgggttgacgaagaaaatgccacggtcttgcagcttccaaatggcgtaggggatggcctgtccggtttccatcgaaatcaaggcacccacgttgcgcgaaggcatctcgcccttccaaggctcgtagtccttgaaacggtgcgacacgatagcttcgccttcggtgacggtcaaaagcgtgtttctcaggccgataagtccgcgtgaagggatgtcgaaatcgaggcacatgcggtcgcccttgggttccatttgggtcatttcgcccttgcgggcgctgacttgctcgataacgcgccccgagaagtcttcaggcacaaggacggtcaaggcttcgataggttcgcatttcacgtcgtcgatgtatttcacgatgaccttgggctgaccaagttggaactcgtaaccctcacgtcgcatggtctcaacaaggatgctcaaatgcaggatgccgcgaccgtaaaccatcagtgaatcaggagaatcggtgtcttccaccttcagggcgaggttcttttcggtctccttgtataaacgctcgcgcaggtggcgcgaagtcacatatttgccttccttgccgaagaaaggcgagttgttgatggtgaacaacatgctcatcgtaggctcgtcaacatggatgggcggcagggcctcggggttctcgtagtcggcaacggtgtcgccaatctcgaagtcgtcgatgcccatcagcgcgatgatgtcgcccgcctcgacgggtttcttggtgcgttccttgcccaagccttcaaaggtgtaaagctccttgatggtggagcgggtgacggaaccgtcgcgtttcaccaacgagacgttttgtccggcctgcaaagtgccgcgtttcagacgacccacggcgatacggcccacatacgagctgtaatccaacgaagtaatcagcatttgcggcgtgccttcctcgaacttcgcgggcggtatcgtgtcgatgataacgtccaaaaggtaggaaacgttgtcggtgacgtggttccagtcgtccgacatccagccttgcttcgatgagccataaacggtggggaaattcaattggtcttcggtcgcgccgaggttgaacatcaggtcgaagacggcctcttgcacctcgtcgggacggcagttgggcttgtccaccttattaatgacgacgatgggtttcaagccgagttcgatggccttttgcagcacgaaacgggtctgcggcatggggccttcgaaggcatcaaccaacagcaaaacgccatcggccatgttcagaacgcgctccacctcgccgccaaaatcagcgtgtccaggggtgtcgataatgttgattttcacgtccttgtagcgcaccgacacattcttcgagaggatggtgatgccgcgctcgcgctcaaggtcgttgttgtccaaaatgagttgccccggagcctcatccgactccttgaagagttgggactggtaaaggatacggtccacgagagtggtcttgccgtggtcaacgtgggcgataattgctatatttctgatattctgcattttagtagaaattttcctaaaaattcaagcggcaaaattacaaaaaagtaggaaaagtgtggctatttcattcaaaagaattctacttttgccacgatgcgtcttagattgctatttgtacaaatctattgtcttcatcaattcgtcgtgtatcgttttgcgcaacgatttgggttcgatgacttctttccaatatgtatcacgttttgaaacaacgatagcgtaattttgtcgcggaaaaaccaaaccagtatgaacagcgacaagatttgggcaaaaaaagacgaggcgacagaaatcgccccgaacttgatgttttcacaacggaataatccttattgtgaattgctgcatatcttgtgctgcaaaagtagggaatttttcgatatggaatggcttttatttggaaaatttcgtaattttgaagcccaataacgattgaggaatcattacaaaaattctaaaattatgaaaaagagaatattaggattggatttaggcacaaatagcatcggctgggcgttggttgaaattgaccacgaacagaagatagttagaataattgcattaggatcacgtattctaccaatggatgcaggggaaattagcaaatttgaaagtggtggaaaactccaaagttctgctgcggcaagaacggtagtcaagtcaacaagaaaaaacatttcgaggtttctgctcaggagagacaggcttcattgtgttctaaatttattgggaatgctacctgagcattacaaattggatattgaatttgtaaacgaaaaagggaaacgttctggtaagtttaaaaaagggaaagaacctaagttagcttattactctgacggaaaagggcaatcaaagttttactttgaacaggcatacaaagaaatggaggcagagtttaggactgcacatcctgaattattctatgaaaaaacacgagggaagaaacatattcaaacaagaatcccttatgattggacattatattatttgagaaagaaaggattgacaaaagaactgtccaaggaagaacttgcttgggtaaccatgagctttttacagaaaagaggttatgaaaaagtcatgggattggatgaaaaggaacaacaaacagaagatttgtcagaaatcaccaacgctaaggttgtttctgttgaattgcttaatgcaaaatcagcaactggattgaacaaataccatattgtattggcagatgaatatgaaaatgttgtttttgaatatgaagaagatgcttcgtttcaaatcacacaaaaagatgaatttaaacaaatcgaaaaaatctcaaggtttgataagaataatgatgaagtgataaaaagcgttgatgttattattagtgagataaaaaacttggaaatcatagatgttatcaacactcacgaaaagaaaaaggagaaaactgcatttgaaataaaactttcttcgggatgggattatgagtatttaagtcaatatgcccccaaaataaaaggagataatagagatttcataattagcacatgttttgaccaaaaaggaggttttaaaaagcgttctattaaaatgccgagcgaagatgattggcaattggaaaagctcaaaacagaaacatctattgaaaactttaatctgaagcataatacatgcggagtcgcctcctatatttatgatgcattacttaggaaccccaagcaaaagattaaagcaggattggttacgacaattgaaagagatttttatgagaaggaattgaagaaaattcttgacactcaaaaagcatttcatgacgaattaaaagatgtccaaaaatatcaggaagcattgtgcttgttatatcccaacaacgaaactcatcgtaacaccttggaaaaacaagatttttcaactttattaagcgatgacattatcttctatcaaagagatttgaaaactaaaaaggcactgattaaagactgcccgtacgaagagcatatttattgggataaagatactggggaaaagaaatctgctaaaataaagtgtatagcaaaatccaatcctttgtaccaagagtttagattgtggcagtttattaaacggttgagaataataaagttagaaacagataatgaacgaggagaaaaacttgtcaatcaagatgtcacagacagtgtcttgacgatggctgttaaacaagagctttttggatatttgaacaacaaaaaggaaatcacgcaagaaacattgttgaagaagttgtttcacaaaaaaggcgagtacaaagaatacaagtggaattttgaagaagaccataaagagccatgtaatgaaacacgttatgattttgtgttacgactgaaaaggattaaagattttgattgcgaacaattccttgatgcaagagcaaaaactcatgaacctgatggaaaaaagcaaaattctgatgctttagttgatggttgtacaaatgaatacctgctttggcactttttctattccgtaaagaagcataacgaaagaatttcagggcttcctcgtcttgttgagaaattactgatgaatgccaatattgacctttcattcaaggataaggttgtcgaaatgttaagttcaatttcgacttataaaaatgagtacggcacatattccgaaaaagccatcaaaaaactattgccattccttcggttgggtaaatattggaatcaagaagaagtagaaaggataaagaccaataaaccaattaagccggaggtcctagaaaaagaaaacattcaaggaaaaatcgcagacttacaaggattatgggtttcaagtgcttgttacattgtttatggcagatattctgaggtcggcgaagtgaaaaggtggtctcaaccaaatgacattttgaattacctacgaaatgatttcaaacagaattcgttgaataatccagtggttgaaaaagtcgtgcgagaaatgctacttgttgtccatgatatttggacaacttttggtgatgttgaggattgtatcataaacgaggcaggtgaagatataaaaacatataaaaagctctttgaccaaatcaatattgaaataggcacttcattaaagaaaaacaacaaagaaaaagatgaagaaaataaaaggaataaagaaaacagactggcaaatgagcgtgcaatagccatgcttaaagagttgaaatcagtttataagacggctgatatcaaagaaaaatcgcctttccaacaagaaaaaatgaaaatattggaagcaggagttgttgatgccataaaatatgataaagacgacaaaacttacaactacgaaattgaaacttctgaagcaagatttacaaagaaagagattaaggatttgttgaaaaaagaggttccgaaaatttcaaaaaaagacattgaacgctatcgcttatggcttgaacaaaggtatctatctccctatacgggcaaacctattagcttgtcgaatttatttgacagaacaaaatatgaaatcgagcatgtgtttccgcaagaaagagttactttaaattcatacaaaaacaaagtaatttgtgaaaccattgtgaacaaggcgaagggcgcaatgacaggttatgagtttatcttaaaccacaaagaagggaaatgtatttatcaaggacatgaaatagcgttactaaaacctgacaaatatgtagagcatgttcaaacatacattactgacaaagaaaaacaagaaatactattaagcaaggacattcctaataaattcggcaacaatcaattaaacaatagccgatacatcgccaaattggcgatgagtttattgagcaatcttgtaagagaggaaaatgaaaaagaattcaaatcgaaaaatgtgcttgtcgtttcaggaagggtgacatctatactaaagcaagactggcaattggatgaaacgtggaatgaacttataaagccaagatttattcggatgaatgaattgttgaacacaaatgattttggagaagaacgattgatagatggtcatcctgtatttgttccaacaatacctgataacgaggtaaacaaaaagaggatagaccacagacaccatgctttagatgcgctcattgttgctttgacaacaaacaatcaggtcaattatatcaacaacattagttcattggacattaattccgaaagaaagaaggagcgttgggatttaaaagcaaaatacatgggaaacaaaaagaacagtgacaattcaaaagaacagtttttcttgcccccaatgcagtacaaacaaggagatactattattacatataagtatgctttcaaggattccgagcctcacgacatattaaaatgtgaggtgttggaggctttacaaaatacgcttgtcacattcaaacaaaagaatcggattttaaggcaacgaaccaactggatacaacatcctgactgcaaagacgggatgaaagaaaaagacattaatctgaagaagaattattcagttcggcagtcattgcataaggcaactttttatggcgtgagagatattatgccgaaaccaatcgaagatgcttttgataagccagaaaagattgtggaaaaccgcattaaaatgttgattaagaagtacacagaggaaggtaaatcaaaggatgaaactattgcggagttaaaaaagaaagatgcggttgtttatgtgcgtgaaaaatgtgccacaacgcaatggtctcatactttggattattttgccaacataaaggaaaaagaagacggaaaggataaaaagaaagtgaagtcgggcaaaagtacgataacaagagagattgaaaccgtagcagacataacgatacaaaatatactaaaaaggcatttggcaaaatacgattctgtaaaaatgtctgttgctgaagccgttgagttttatgacgacatcgtgaatgaggaacaaaaaagcattgtcgccaaatacataaaagatggtaaggattctgatagtttaatagatgtgttcgttcatgggagaagtattgaagacaaagaaataatgcaaaatcctcaaattgctttttctgctgatggaataaaggctttaaatgaaaacattgaggaacttaataatggtgtaagacataagcctatttataaggttcaaatggttcaagcattaggaaaaatgttcccggtttccgagcccgatcccaagaaaccagttgttgcaaaaaacaatcagtatgtaatttcagagtctggcagtaataattattgtggaatctacaaatcagctgtaggagatactaaaatttatgtaccttcattaagaatgacaattgattcttatggaaataatgagaatctgttcccggaaaaacatccggatgatatatcttatttttatagatttactttgtctcctttggatttggtatatatgccaacagaagatgagttagaaaacaatcaaattagtggtgtaattaattattcgagagtatttgtggtaaatgattttaatgatgctggggtagtgtattttcgaccatatagttttgcaaatgctatcgcagaaaaggaggtggattatagaatggataaaaaagggaaattaataggttctttctctgataaaaccgcaagttttgagggacgctctattagagataactgtgttcctatcaaagtggacagattaggtaatatcatcgaactaaacggaaagaaactatgagcaacataaaacttttccaagacaagagaatccgttccgcatggaacgaagaagaggagcaatggtatttctccgttgtggatgtggtggaggcattgactgactctcctaatccgcgtcagtattggagaaaaatgaaagaccgcgacttaaaggaatatgaaacgtacccattttgggtacagttgaaattgataagtcctgacggaaagatgcgtgctacagactgcgccaacatcaaaggcctgttccgcatcatccagtccatcccctcgccaaaggctgaacctttcaagcagtggctggcaacagtgggttatgaacgtatgctcgaaatcgaaaacccagaactggctcaagagcgtatgaaggaactctacgagaagaagggttatccaaaagattggattgacaagcggttgcgtggcatggccatccgccaaaacctgaccgatgaatggaaacggcgcggtatcacagccgaacaggattacgccattctaacggcagaaatctcaaaggccacctttggcatgacaccttcggaatacaaggagtttaaaggcttgaccaagaagaaccagaacctgcgcgaccacatggacgacctcgaactgattttcaccatgcttggagagcgtgtcactaccgaaatctcccaaaaagaagacccagaaactttcgagcaaagccgacaaatcgcgaaaagaggcggcaatgtggccggggtggcacgaaaggaaacggagaaggaacttggcagaagcgtgtccaatcccaacaattatctcccaacgcaaaccaacttggaattagaataaacaaccatgatcaaacgaaccctattcttcggcaatccggcctacctttcgctgaaaaacgcgcaactcgttatcaggctaaatgatgcgcaaacacaagaagaagtgaccaaaaccgtgcccatcgaggacatcggtgtggtggtgcttgaagatcggcaaatcaccatcaccaacggggcgatggatgccttgctgcaaaacaattgcgccgtggtcacttgcgacgaaaagcacatgcccgctggtttgctgttgccattggaaggccacacggtgcaaagcgagcgattccgttggcagattgaggcttcgctgccattgaagaaacagctttggcaacagaccgtccaagccaaaatccgcaatcaggcctcggtgctgaaacggttgagtggggcagaggtgggttgcatgatagcttgggccaacgatgtgaagagtggcgacagcgagaacctcgaaggtcgggcggcggcctattattggaagtcggtctttcccgaaatggaacgtttcgtgcgcgaccgcgagggtgaggctcccaacaacctattgaactatggttacgccatcgttagggcagtgatagcccgctctttggtggccagtggtttgttgcccaccttcggcatccatcatcacaaccgttacaatgccttttgtttggcggatgacgtgatggaaccgtatcgcccctacgttgacgagttggtgattgatattttgcgcagtggcgtggattgtagcgagctgacaacggatttgaaacgcaagttgttgggcttgcctgtaaaagaagttgtcatcgacggtcgccgcagtccgttgatggtggcatcctctcaaaccacagcctcgttagcgaaatgctttggcggggaattgcggaaagtggtttatccaatgatggaaatatgatggaccgattcagtgaatacaggattatgtgggtgcttgtgcttttcgatttgccgacggagacgaagaaagagcgtaaggcctacgccgatttccgcaagcgcatcatggcggacggcttcacgatgttccagttttcgatttatctgcgacattgcccaagctatgagaatgccgaggtacatatcaagcgggtaaagtcgttcatgcccgagtttggcgac

SEQ ID NO: 4091 - DNA, 23189 bp, synthetic construct
  misc_feature 1..23189: note = Synthetic
  source 1..23189: mol_type = other DNA
accaagttccttttccgccaatgactctttaccaagcagtttcaaggcggcggcggcaaggatggaagcgggtgtgtccttgacctcagcattgagtactggaggaatcaccgggcggcggcgggtctcagcgagagctttcgcggtctcaagtggcaaccggttttcgatggcttgcctgaatgtgctcatgtcatctccgcacacagagagtaagtccaggatatatttcgcctcgatcgtctcaccaggtgacgagttctcagggggagctggttggtgtgtcatattcctcactcctgctgctaacgtgaccatcgtctgtttgtccgctcccagcgggacaactgaaacttcccggaggattccaccctcgataagaaaagtgtctgattcgacagtgattgtttgcccgttgaccgtgatggtatccccaggcttcaacggccggtattggttcgtttcaacacccacactggcctgcaaggggacgtcatctttcagtagagcaatgacgagtttgccggcgtccgtggcttctgttaccgtaccgtcaatcactaaggtttttccgtcggttttaggtattccccaaccaatggtggcttcggtacggccttcgtgatccaagagcagagtaacccgctgcggtaaatcaaggccctgcagatcgatgatgaccggtccccaccccggcacagtcatgatgcccccggtgtaggccgtgatgcgtaccttaactggcttcttttccttttcggcctcaacaattaacggggcggcttttagttggagggttcttgttgcggtcgtcatttctcagtttgattttgcgttggctagttgcaaaatccggtttttgtattgggggttttgttctaagaggtggttcacgagcgtgggctttgcccgctttgttttcacgcaccattcaaaaaagcactcggccagagggagggagaaaaaggtgttttcgggcgtcactggctccccgtcgctccacttccctcccgtgatctcacgcaaccaatcctcaatgtcctggcgggtgatgatcaatccacgcccctcagcctcactgataagacctgttcccaacatcggccagcgggcagccaacaaggtttgaatctggctttgcgtcaacccatagcgttttaatgctagggtggcgatggcttcgtattcttcattgctcaggtactgcattggctttctccttgctctcaccgtcattgtagtgggcctctgcactgttttgcgggctgttgggggagtcgcattgtacgggtacagtgtttttcttcccccatccgcaactccgacacttcagatagcggatgcgatacaggcccacttgcttgctggttctgacgatcacttcggcaccacattgtgggcatacccgccaggcgtagcgggccaaaacgatggggatgatcggatgggacatgagagggctcctgatgctgtttttccaggggcgtttttttgtgcgggaacctagcttcccgatgcaaaataggggtatccatggggtcctttttcagcctcgcgccggccttttcggtcgggggcactcttcccggcggagtgccgcttccctcacgaatctttcggcagccttcggccaatccatgggatcgatcttgagcaaccggcaggcgtccagtagcagggcaaccgcggagtcgtggaaagtgtcgtagagttcaaagagggccgggaagtccacgggctgcgacggctttccagtcggaatcagaacgtatcccgggccgtattcgctcggttgcagccggagtgaatatcccgcttcccagagtttgtggagtaacagccagccgccgacttcctctttgtgcgcgagcaagatcgccgcttcgtcagccgacaacgccccgggcttcacaccaagccggagcttgccgttttcccataccaccttaacaccaggacgattcagccagtgaaggaagtatggggggctttccggcctggtttcggggtgattgctaatgtccagggtgttcgggtgcttcacgtctattgcctccgctcatgcgaagtccacccaagcatcgccgccggcttcggccgcttccgccagtcggcgattcagttcaccaatgtccaccacgggacgttgaggccgtccagattgcccagaatccgtcccgccactttcggggggtgtaggtgttgggttctcgctgggtttaggtttgaggtcattgagcacatggtcaagttctcctataacttggacatcttgaccatctgcccctctagagcgctcaaaaagcccgtttttgaccacagatggaccagatggccaagttttttgtgttaggggattttgactatctgcttgaccatctgccctgtcgggcagacgccaccaccatggtccaggattttctgggcggtaagacacaacaccgatcgcatttttggcacggtaaagagtcttgtcgctcccgcaatgagcctcggcccattcttgcctaacgtctttggccaaccgcgggccggcactcaatgccgttagcaggaatgccttcgcctcttccagggcgtcggcctcggggccggggcgtgacgcctgccgctccgcttcgaggccctcatcggcgctcatgttcacgggttcgcgttcccattccacacgcgtccacggagagtcaccgacaatccgaaaagctaagccgggcagctcctccgcgagattctgtttcccgggtaggaatagccgccgctttttgtcgttggcatccctggacacatgccaaacacttcgggcaattccagtgaaacctcgcgaacccatggccgtttcatcagccccaccctcacctgtagatttccggcggtgcatgaccaccaggacggccaccttgcgccgccgggccagctcagccagcggagtgagcacttcccggacttcgttgtcacggtgggaatccacttgcctgccaagaaaatccccgatggggtcaatcaccagaagtcggcaatcggggagtgattccagggccttttcaatcacgggtaaatcagccagcgtcagccctcgttgacgccgggcaccgtctatatcgcggtagtttacagccttgagaattcgcactcgcgtcacgtcggcgtgcatagcgtctagtcgcgggcggatagtgtccgccgggtcatcttccagtgtgagcatgagaaccgaacctttctgacagggtgaaccgtccggccacggcgtcccggtggtcacacgggccgcaaagtcacacgtcagaaaactcttgccttggcctggcttgccaactaagagtgtgatccggcctaacggaatgcgtttatcccagagccattccaccggggtcgctacaacctcttcgaggttgatgatgacgggttgaaaatcaaactccgattctgtgttgttggttttaggcgggaaatcggccggcgtatccacgggcggggattccaccgggggatccaccgggtgggcatccctgccctgtgtttttgcctcgtggaccgcctcgaggagtacattgagtgtgtcgcccatatcgatcccaaattgacggtggaatcggtccgccaattcacgccaggccgttcgatccttcactggaacagaatgagtgataggtttgggaagaggaccgcctttcagtgttaccacaatttcgccgttgcttgctgtggccttgagagttgctgggtagtgatcaggcattcacaagactccgtatcaaagtggcatactcctgggcatccagaaactcactcggtgtaaccgggcggagattgtccgacgcgacaaccgccgccgggagcagaagatcgtgcatggtcttgggaatctgttgcgtgatgaaatcttcagccagcaactccgctcgcgggtcatcgaggaatgcgatgggcggaacgacaatccgggcggtgacgacctcccggggtgcccgcacctccagagtccaagggccgttctcgcggatcgggggccatgctaccacaagcaccggcacccgctggccgtcccggggctttggcgatgcttggcgaattgcaacgtgacgctcagccatcggcggtcgcgcctccgtgttgtgcacccggctggctttcaacggtttccgctgattgccgggccatttcggccacgaagttttccaggtcttgcgggcgataaaaggtcttccggccaagcttgacgaccggaattggcccgcgtgggctggtgaggttccacaaatgccgggtgctgattccaaggcgataagcggcttcccggggggtgagaagaagtctttccagcatggttctgcgctcctttgtagaaattggttctggaatgccgcggctggcactgtgccgccgcttctacaaaggaacgcgttacgtttgacgtaacaaagttacgttttgcgtaactaccgcctgtctaacccagaaaccatgggaggggtggggaagagaggtagataaaagcatcaccctggcagcttatgcacacctttaggtgatcggccagctcaggcatattgccatcatgcaaaatttgatacgcccgcgagagcgcgttggtgatctgcgaccgcatcttgtctacgctccgggcaaactgccgtgacttcccggtgggcgttgtatcgacgcggagatgatttgtcacttcgcgaaattctttgcggagcatctcggcaagtgtgacgtccccccgctcttcggcttgcttgatgtccgccgtcaatttgacaagatgatctttcaaactctttttcgcttccctgtccaggaccggttgccaactttccgccagcaatgttcgcttcggatccggggagtgcccttcggccttgccgaccaactccgccatcgggacaggttttcccgctctttcgatcaacacggccaggtaaatgaagcccttccgattcttgaagtgcccttctttgccaaacgcgcggataaaccagccatccccatcccgatggaagcaaaaatccggttccggtttcccgggaggcttggccagggcgtccgtttctgtaggttgggccatccccacaccagccagtcggcgctgtgactccaccaacgctaagttttgcagttggagttgcgcgctaatatctttcagtcgaagcaaataaccctcgataatcggggccacctcacttagtgtccattcgccgcgatagaccgtctccccatttatgccagcgcgagcggctagctgttgccagtcctcaatggttcgcggatgcgggcagccataaatttgctgccattgtttcttatagtcctcaatcttcttacgagcctcatcctcacattgcttataagcctggttatgagcctcaaggatgcggttcaaatcctctttatacttgagatttaattgtgaaaaagtctcgttgataatcgtcaatggttttgcgatcgcccgattgattgcgtcgaaggtttcgacggcacggtaaacagcttctctaacttccggctggcatgtacgcctcaccccgggcgagtgattaggaacagagccttcggacacgtgcgccactcccacgtgaaaggacaccacaaaagagaaaggggcgggcagcccgtgtggcggcgggggttcggggctagcttccctagcccgcccttatggatccacttttattgtagcgtcatgatccacgatcggaagagagtgtgccggattttgtgccaccagagtggccggacttgtcggaagtattttctatagcgtcacttaaggaatttggttcgaatctttttcctccgcttgttttttgagcatggtttggcacgcgcatcaagcaggaaagactgtaaatcctggtgttctccgccaggtgattcattggtgtacacggtggtacgagcattcgctttgacgcttatcttgacggtacctcgtagtgtccacaagtacacttctgtcccggattggttgcacctgctccgacagaattcgctgttttggctttaggctgtccgcatcatctctgagcatcgggacgatgatgcaacgcgatgtcaaagcaggcggtgggccgttgatcgaagcgagggccttgggaccaaacacctcgacactcaccggtttgaacatgtcccccgccagttcgagccggctagctcttccccttctgtgatagccagcttggagcaatgccagtaactccttgaccgccgggtcggtggtggccttgagtctctcggcttcgtctcggctgacacattcaggccggccagttaggatgggcatcctgggccccggccgcagaggatgcaaccgataaccgcaagcaagatagtgggccaggagctgatcgatagcatacccctcaaccaggctgaccaaactgagggttctcaccttcctccggggcgctcacggttgcttgaccggactggctggcaactcttattcaattcacttctcgaccgtgtgacgtggaaagcgaagacaacggccaatccgcagcgatgggagttttccgagccgtttgtgttgtaaactcttttagcgagggagtaactcaagaaatcgaaactgggcgaatcaggaagactcacagaataaggttcaagctcagaccgggcacgacaagcgtgcccctccggttcacgtccgccttcggagggacctgcttgtcaggtccgcttatcaacgttcgatcatgaattccatttcagcggggactgaagtcccgcgctgaaagcggggctaaagccccgcactccatggagtgcggcgattcatcgccgcttttcggtcaaggctttagccttcacaaccgtgccatcggcccggctggaaccagggtgaccgttcgggaggcacccgatcctccaatccacacaatggagggacctgcttgtcaggtccgtctgttgggacttggacggacaggctgctccacacagaactggagctctcaatggtcactggtaggggcgattcatgaatcgtcccgaccgattatccgtcatgaattggtcgtaccagatatacctatccaacagtcatgaattgccgccgggcccgcgcaaaagaaccgcccgcggccaacccgagtggagggattggccgcggatgttgtcagccggtttcgattcagcatttttgcagttcacataagtgctcccgccgccgcgccaagtgtttctgacatcgtcttgccgacggcattcttgtcggatcgctgataaggcggatcgctttccgcctcgccaatcaattcaccaccgatcagcgcaagaagaaccaaagcagttctcatggtttctccgtcggttgcggtatggatgcagtgggcgatcttctcgaaaaacgcctgccaaaataggctctcacttcgtcaagcgtcagtatgccgtcactgtttgtgttaacagcgtttgcccgcgacacagggggcgcaatcaactttttctcgaaggtaccatcgctccccaggattttctcgaatccaccttcggccagccactgcctggctttttcgtccccgcggagataagcgtcccaaaaggcagtcgtggcggcacagatcaggcgatgaaagacctcgtctttctcccgtgcccgacgaagagacagcaaaccgcctcttgtcgttcccggcgtcccaaaaaggggacgctcgcgtcccgaaaagatcatatgatcacccccggcaaagatcaccaaatagcgatctgccaaatcagcagagagatcgaacgggacgcggcggtcctccttgcgggtttcgccgatcggactgtcgtcctccgtgccggtcatgtagaaacaggggatggcgatttttcggaaggccttttcacgctgacccggttgctggggcacagggggactgaggaccacggcggctttgatacgcggatcggcctgggagatttcccgtcctccgggcaacacggcaacctgaccggccacgatcaaggtggtatgggccccaaaggagtgccccgacatgccgatccgctccagatccaatcgaccgttcaaagggccgggttccctctgaagttgttccagccgatcgagcacaaaccgcacgtcggctattcgctccagggccgcgcgggggttttgcgccgcttttcgaagggcctccatcggttggcccttgtcccgccagatggactcgtcgcttccgggatgttggagatggatcgacacatacccgtggcttgcccagtgacgaccaagataggcggcagcctcgcgactcccgcctaagccgtgggaaaacaggatgacgggcatcggtcccggtgccggttggccatgctccgtcggataatacaccttgaccgggatggttcggtttcgctgttggtcgtaccagtcagccagaaggctttccacgaggaacggcccggcggccaagtacgggggcgtttcggggtctgtcgcggcagcggcggggcctatcgagatcgctgcctggaagccgccgaagctggcaaggcccaccgagtcggaaccggtatcctgttgagcaacggacatcgcgacgcacagcacggtcattgatgaaatgacgacgcttctcatggggtgcctcccgcggttacggactgggtttggcgggtgatcttcctgatatcctcattcccggtcagtcagcgatggccgtcgccgccgatttcccgcaattgccttcgcaggcacctccgcacgatctcttcaacatcatcatacacttatgcggtggtcgtggttgctgattaaaggacacaaagcgagaggatatcgccagtcggacaggacggaacggtggcgagatgaaaaaggaccagcggcggacgtgggcaacggcaggtttcgacggcttggtgaatatgccgatatgggtgtccggctacgatggtaaccagatcgtggggcagttcgacacggaactctcaggcgtagcgactaatcgggatcggagccatcgctacctgggggaaccggattttgggtatcaaatcctggacgacaaaacgaattcctcatgcgtgatggctcggcaaggaagcgcgacagcgtttattggtcgtttacttcaaacgaaaactttatctcgcttctcctgaaacccgtaacagctcacgttcattaccttgggaaaggtggctactaccgtgcttcaggcgtcacatgcttatatttttaaagtttaactgtaaatgatggatatattgtatttctacctgcgatcggcttgccgtttgacatgttcttccgtgttgctacatctcatgcgttccgcagcaaccgagcggcggcgcgatctacagtaacacattgcaggaaattaactcgtctcggtctatttaacgattgatggtcgctttccacatcggcggattcctttttaatagagttgaaaggatcacacacaccgaccggggtttgcagcatggaattaaaagccgatgggttcataagaactgagtacagcaacgaatttgcacggtttgtgccacttcatccgtgaagacacaacggggtgagcgatggtctaaaatctccccagggcctaccacggcgtgttgaatagagaccgggcgggacgtcggcgttaggacggaaagactcgaatcgtgccgtcacaaagaagtgtgatgatccccgctgttgagttacaatagacgacggccagtgagcacagtcttgtatatcgggaaaattgccccttctcaaataggacggaccgaaactgttcgcgttgataagcgcgagctgaagcgcataaaaaacgcccccgccacaggctgagggcgttaacggcacccagcatgctgggtttaccgtacggcgattccacacggaatcaccttactgtgatttgcgtggaaccgtcgctcggatacactggattccatagtaaaacgaatcgcagtggttgtcaactccccattgagctaaaatgggaggagtttttcagtaatgtgagttgatagaggaaatgggacaatcatgaaaacaaagaacggccaggtagactacgtcttgggaattgacctcggggttgtatccctaggttgggcagccattgaaattgataacgatggtgggcagtcgttgctcggagcaggggttcggtgttgggaactcagcaacgcgagtttggaagaggtcgaaaaaggaaaagaggaaccacctggtcaatcgcggcgtcaagcaaggcaactgcgccgccaaatgtttcgccgggctcagcgtcttagacgaacatatcgggtgcttcaggaaatgggcctctttctaaccgggccgcggtcgagtaccgctcgcaaagcgtatcttgaaacgctcgatcaaaaagcccaagaatggctgcggacaaatgttccgggtgcaaataacgacggccttctagctcacacgttcatttaccgtctccgagccgcagcacttgatcatccactgccacccgagttgttgggccgcgtctttttccaccttgcccaacgtcgcggatttctcagcaaccggcgcacacttgagaagaataaggatgaagaactcggcgtcgtgaagcaagggatttcgcagcttcaggatgaaattcagaaatcgggtgcgcgtacgctgggcgagtttttctcgcggctcaatccgcacgagcaaagaattcgtaatcgttacacctctcggaaaatgttccaggacgagttcgaacagatatggaacgcacaacgttcccatcatccgaattctcttacggatagcaagaaagcacgactctacaaggcgatcttttttcaacgacctctcaaattgcagcacggccttgtgggacgctgcccattggaagtgctcccgcggaaacgtcccaacggacaggtcgaatatatctatcctttcaggcgtgcgccaatggcctctcttgaagcacagagaattcggtatatgcagcgaattaatgatcttgagttcaccgatccacaaggtcagcgccgtgtgctgtcgccggaagaaaggcagaaactctatgatctggcggaacgaaacgaagacctgagtttcactctgattaaaaagactctcggaattcccacgggcaaaaaaggtgaaggttgggaatgcaatctggaacgtggtggtgagaaaaagctgccgggtaatagaacttctgcccaaattagaaaagtcataggtgatgctacgtgggaggatttgggtagggaaagacaaaaagcgctggtagatactttgatagcatttcttcgcgctgatacccttgaggagcatctgcatagggtttgggggtttaaccgcgaagttgcgtctcaactcgctggactgccgttagagcaaggctaccacagcttcagtcgccgggctattcgaaggcttctgccgttactggagcagggcgagcgtctcaatgcagcgatacaaaaagtttatggtgggacacaacggaagattaatcaacatgctgagctaccgccggttcggcaggttctaccgacggtgagaaatccgctgctgatcagagctctcaccgaactgcgcaaggtggttaacgcgattatccgcaagtatgggatacctcgatgcattcgagtggaagtggctcgagaattgaaacgttctcgcaaggagcgtgaggagatttcgaagcggatgcgggagcagcaaaaacggcgggaggaggcggcgcagagggtgctgcaggaactcggtcggacagccgcgcccagggatattgagaaatatctgttggctgaagaatgcaattggatatgtccgtacacgggcaagcagatcacaactcaagcattgttgggggatcatcccgagtttgatgtggagcatatctggccgctgcatcgctcgcttgacgattcgttcatgaataagaccctgtgctatcaccaagagaatcgttcagtcaaggcgggccgcactccgtacgaggcttacgccactgatccggtgcgctggcaggagataatcacccgagtgagaaactttcgtggcccattcgcgcggcagaagcttgttcgctttcaagcagaagaaataccacccgacttcgcactccgacagctgagtgatacccggtggatctctaaggcagccgccgattatttaggacatttatatgggggaagaattgacccgaccgggcaacagcgggtctttacagttgccggtggtttaaccggcctcttccgacgtgcatggaatctcaacgcgattttaggagggagtcccgaaaagaatcgttacgatcaccgtcatcatgcgattgacgcgatagttgtggcactcacggaaccctcaatgatccagcggttcgcccacgaagcatcgcgccttttgaaggcctggccacgagtggctgtccggcttgatcccccatggagtactttcctgagcgatgtgcaacggcatgtggaggggattgtggtttcgttccgagtcagccggcgtctttctggagccctccacgaccaaacatattacgcaccgcccacggaacaggggaagaccaaggttcgcaagcctctcagggaaatgtcctcccatgaagtcgaaaggatcgtcgatccaactgttcgggacttagtgaaggaaaaattgaagcagcttgggacatcggatcccaaaaaggcgtttgccactgacgccaacctcccgattattcgcggaaaaaataacaccgctttgcctgttaaatccgctcgaatttgggtgagcagctccgtcattgcggtaggggatggtcctcgccaacgttacgtcgtgcctggaaacaatcaccacatcgagatttatgctttgctcgatgggcaaggtcaagaggtccgttggaagggcaagatcgtcagtttgtacgaagcatacgagcgtaagaaacggggtgagccggtagtttgccgcgatcacggcccaaacacccgattcaaattctcgctggccaaaagcgaatacatcgaatggatcaacgatgatggccaaaagcaacttctccgggtggttggaatttccgacgataatttggaattgcgcttgcctcacgacgctcgtccaattaccttgataagagagcaacgggagcgaatacgcgctacgtatcgtcagcttttccagcgtcgcgcacggaaggtgatggtgacacctttgggcgaggtccttccggcgaatgattaatcacgtcgtcgaactggcaaacaaaccggcgaaactgtcggtccgtcatcgacaactcgtcatcaagacgggagatgagctggaggtgactctgcctttggcagagcttgcggttctgattgcggccaacccgtgcatcacattgacccagccggttctggcgggccttgccgaggctggggctgtctgcgtgatatgcgatgcgacgagccggcccgtgggaacaatgttccctctcgtgaaccatcatgttcaaactgaacgactggcggcccaggcacaggcctcgttgcccactcgaaaaagattatggcagcaaatcgtccgcagcaagattcaatcccaggctgctgttcttcaagaattgcacgggcgggattatggcttagcgcgactggctgcgagagttcggtcgggcgacacctcgaatgtggaagcaatggcgtctcgtcgatactggcaataccttttccaggatcgaacgtttcgcagagatcccgatcggaatgatcagaatcgctttttgaattatggttatgccattttacgggctgtaactgcgcgagccataacaggagtgggcctccatccaagtttggggattcatcaccataatcggtacaatccgttttgtctggccgacgatttgatggagccgtttcgccctcgcgtggatctattggtggttgcgttattgagggagttcccagcagatgcagaactcacaccagaggtgaaatcgcgtttacttgggtttctcgaggagcgatatttcttcgagggtgaaagacgaacgctgtttgatgtactcagtcgaattgccgcctcgcttgcggacgtgttcttaaaaaaacgccgtgacttgctgttgcccgattggagctgccatgcctcgcggtgatctcccgtcaggttacaagatcatgtggctttttgttttgtttgatctgcccatggacgaccggaaggcgaggagggagtacacacgtttccgcaaacgtttgctggaaatggggttttgtcagttacagtactctgtgtacgccaggccatttccaagtgaagaggcaatgcatccctatcggcaggagatccgagcgaacctaccgccgaaaggcgctgttcggctgttacccgttactgaccggcaatttggaaaaatggaaaactatgtgggaaaaattcgccaggagaatgaaaaagcacctcggcagctcatgcttttttgagcatgggcgtgtcgcaagttgtgttcttttaacgaagttggtcgcaggtagtgtatccgagcgacgattccccgcaaaccacagcaaaatttcgccactcctccaaaaaggccaaagtgtatccgagcgacgattccccgcaaaccacagctaagagggcgagtcgtgtcatttcgcaaggagtgtatccgagcgacgattccccgcaaaccacagctgctttgtgagcaattcttctcgcaggattaagtgtatccgagcgacgattccccgcaaaccacagccgaaagagtagaaaggtcagtccttccgtgagtgtatccgagcgacgattccccgcaaaccacagccaaagacgtgcttccccttgtaggtgcgggagtgtatccgagcgacgattccccgcaaaccacagcgcggttgcgcgggcgctgaacacgggcattagtgtatccgagcgacgattccccgcaaaccacagcctcatgggaagccgttaaacggggagatcgagtgtatccgagcgacgattccccgcaaaccacagcgccccgggagttccccatcacccatcccctagtgtatccgagcgacgattccccgcaaaccacagcagatttccgtcccctccaccagaatcagctagtgtatccgagcgacgattccccgcaaaccacagctttctccgcggcaggtgacggcgaaaagatagtgtatccgagcgacgattccccgcaaaccacagcgggttgacctcacccttgacctcacccttgagtgtatccgagcgacgattccccgcaaaccacagccagatctctgaagcgctggagtatcctgaagtgtatccgagcgacgattccccgcaaaccacagctgccagaccggcctgttcactccccccttcagtgtatccgagcgacgattccccgcaaaccacagctaaacttcagggggatacaggaaaacgccagtgtatccgagcgacgattccccgcaaaccacagcgagtagacgttcctaagaacaagtattttagtgtatccgagcgacgattccccgcaaaccacagcctgcggcgtggctcgacaaaatcgacgagtagtgtatccgagcgacgattccccgcaaaccacagcacgataacgtcgatgagggcatcgtccctcagtgtatccgagcgacgattccccgcaaaccacagccgaacagcgaatcgaagtccagtgctcccagtgtatccgagcgacgattccccgcaaaccacagcagtacgtcgtaggattcggcgctggggctcgagtgtatccgagcgacgattccccgcaaaccacagcgacactgaccacggaggcccatgcgaccgagtgtatccgagcgacgattccccgcaaaccacagcacggtctcgtcactgtgtccccagagtgttagtgtatccgagcgacgattccccgcaaaccacagcatgggcctcatcaacatcccaatcggccttagtgtatccgagcgacgattccccgcaaaccacagcgcacttccacgaacttgcccgtgttgatggagtgtatccgagcgacgattccccgcaaaccacagcaagccgcaatcaaggccaacatcaagcggcagtgtatccgagcgacgattccccgcaaaccacagcagcctgggcagggacaaggacagccgcaggagtgtatccgagcgacgattccccgcaaaccacagcattgtctggtgcgagcgctgcggatggtttagtgtatccgagcgacgattccccgcaaaccacagcacagcctgtggcagctcgacagaggggagcagtgtatccgagcgacgattccccgcaaaccacagcgttgaaaagcgtgtccttccatggcggcgcagtgtatccgagcgacgattccccgcaaaccacagcgccgccagattgagcacggcccgggtgcagaagtgtatccgagcgacgattccccgcaaaccacagcacaacgtccagtccggcgtggaacgagtaagtgtatccgagcgacgattccccgcaaaccacagcaatccgttgtcgcaaatcgaatggcacgcgagtgtatccgagcgacgattccccgcaaaccacagcgattcccattttgagatccctggatcgcggagtgtatccgagcgacgattccccgcaaaccacagctcgtcggctgcgaaccggtgaccggcacaagtgtatccgagcgacgattccccgcaaaccacagcgatcgaagagcaatctctgcacggcggcttagtgtatccgagcgacgattccccgcaaaccacagcccccccggccgtcaccgaaccgggcacctagtgtatccgagcgacgattccccgcaaaccacagcaccctggggtgccgccctattccggttcacagtgtatccgagcgacgattccccgcaaaccacagccaccgggaaatcttgttcgcaccacgattcagtgtatccgagcgacgattccccgcaaaccacagcgcgctgcatttcctggatgagtgctgccatagtgtatccgagcgacgattccccgcaaaccacagctcaaattattagacgttccgatcacgcgatagtgtatccgagcgacgattccccgcaaaccacagctccagacagtgaatgccagcagttcgcagtgtatccgagcgacgattccccgcaaaccacagcgcactgtcggaagcggtcacgtcaatccatagtgtatccgagcgacgattccccgcaaaccacagcgtcaaggtttatccttgaaaaaagcggcaaagtgtatccgagcgacgattccccgcaaaccacagcatcatgccctccaggacttcccgggacacagtgtatccgagcgacgattccccgcaaaccacagctgttcctctatcccccagacgttcacgttagtgtatccgagcgacgattccccgcaaaccacagcttttctcccgccctgcgtcccccttttcaagtgtatccgagcgacgattccccgcaaaccacagcaagacctacgtcatctgggggaaaagtataagtgtatccgagcgacgattccccgcaaaccacagctcttcggcctcttccaagaatcgcgggctagtgtatccgagcgacgattccccgcaaaccacagctcttcggcctcttccaagaatcgcgggctagtgtatccgagcgacgattccccgcaaaccacagctgccccagtttcgatcatctcgcctcagccagtgtatccgagcgacgattccccgcaaaccacagccttgtgctttgccagccagagcgcgaaataagtgtatccgagcgacgattccccgcaaaccacagcaacgtcctgtgtctcgatcccgatagccaagtgtatccgagcgacgattccccgcaaaccacagctggcagaaccggttaactacaaactcaaagcagtgtatccgagcgacgattccccgcaaaccacagccatcgctcgaaagtagtggatcacgtttcgagtgtatccgagcgacgattccccgcaaaccacagctttctggtaggcacgcaaacgcatcatgcgagtgtatccgagcgacgattccccgcaaaccacagcggtattcggcgctaacacacgcaagataatagtgtatccgagcgacgattccccgcaaaccacagcgtagggcaggcgcactcgcgacggcacaggagtgtatccgagcgacgattccccgcaaaccacagctaaaaacacagcgattgacgacagtaaagagtgtatccgagcgacgattccccgcaaaccacagcacgcgcgatgagaacgggatcgacgaaggagtgtatccgagcgacgattccccgcaaaccacagcatcatgccctccaggacttcccgggacacagtgtatccgagcgacgattccccgcaaaccacagctgcagtcaatcctggaacgtcgggctcacaagtgtatccgagcgacgattccccgcaaaccacagcggatgcctatcccattccaagaacgatagaagtgtatccgagcgacgattccccgcaaaccacagcaacaaaagaccgacgccgcacatcgcgtgtagtgtatccgagcgacgattccccgcaaaccacagcctttcggatgaacaggcgaaagtcattgaagtgtatccgagcgacgattccccgcaaaccacagcctttcggatgaacaggcgaaagtcattgaagtgtatccgagcgacgattccccgcaaaccacagcactgattcgtcgtacgggagcatccggccaagtgtatccgagcgacgattccccgcaaaccacagccgatgcgaccagagcaactcccgcggtacagtgtatccgagcgacgattccccgcaaaccacagcctcaccggcgcccggtcgtagattagcgaagtgtatccgagcgacgattccccgcaaaccacagcgccagctgacgcgggcggagtacgccgcgtagtgtatccgagcgacgattccccgcaaaccacagcgaagcggcgcgacaagctcaggaagcccaagtgtatccgagcgacgattccccgcaaaccacagccgcaatggccgcagcgagttcagagccgtgagtgtatccgagcgacgattccccgcaaaccacagcgcgtacctatgccacgagtgcagcggcgaaagtgtatccgagcgacgattccccgcaaaccacagcattcggggcatccttcaacgaatgggagatagtgtatccgagcgacgattccccgcaaaccacagctttgcgcccgcagtagcacaattcggagtaagtgtatccgagcgacgattccccgcaaaccacagcttggtcgaggcctttccagagacatccctcagtgtatccgagcgacgattccccgcaaaccacagcgcgtacctatgccacgagtgcagcggcgaaagtgtatccgagcgacgattccccgcaaaccacagcttggtcgaggcctttccagagacatccctcagtgtatccgagcgacgattccccgcaaaccacagctttgcgcccgcagtagcacaattcggagtaagtgtatccgagcgacgattccccgcaaaccacagcttggtcgaggcctttccagagacatccctcagtgtatccgagcgacgattccccgcaaaccacagcaacaatcttgtactatttatgggaaagtgagtgtatccgagcgacgattccccgcaaaccacagctcgcttgtaacgttcaacttgacgctctcaagtgtatccgagcgacgattccccgcaaaccacagcgtagaatgcgttctcgtaatgacgcgcgcgagtgtatcgagcacttgttcactatccagttgtttatcgagagtaatggtcgccatgcttttccacctatagttgtgcgattacacgactaataccagaaacaggcagaccggagtcaatagctcgatcagggggtgtgcttttatcttccaatgtccacccttgggggcagccaggaagtcgccaggctcatggggcgaaaaaaagaaccgcctgtgcacggggggcacaggcggccttcgtggagggcaacacgaacagagaagttcagtttcagcttgctggatcactcatacgaaaagcaccgcgtccccaccttcttcctcttctcgctcctcttcggcaacctcggcctcggcctcctcttgtgttaagccttcccagagcatcttgttaataacatctattcgtcgctcaagcggatccgctttcgcgaggatacgctccaattccttatcttcttcaggagttaataggtactcgtgaatgaatgtatgccttagggcggatttcattgccttgagtttaggttcgtcgtcatctttgatttgccaaaaccaaggattatcctcaaaaaaacgcatagatttgtgaatatcatacattggattcttttctggatgaggattcctcacaactggcttattcccgaccgaatcaagaatggactggacatatcgtttggcctcttcgttaatagcaaaaattttttcccacaataggtcgcgttccttttcaagagctcttatctgttcagcgctgagtatgttccgtttgtggtttctgttactcatcggttagctccccggttttgtcgcatttttctgtgctaattgggtaaacacttctttcgggacattatgggataccagctttaagtaatattcggccttactgccggctatggccatgatgttcttgatgtaggtttccgcagcgtgctccctatcgtcctccccgatatagtgcaatttgccaccatatttcttgagtttgctacctctgaaattctcttgaatatccttttttgccacatctagttgatctttgtcggcacacaaaacaatctcaaagaaaccctcatagggcaccactgtccagccgtaaatccccgttttctcttggacttcccgcatgaccttatcaatctcctctagcggtttggcaatgcgggccgtcagcatcccgtatttccttagcctgggaatccgctcaaacatggccacgccgagctgcggcttttccgataccaatcccatcgtacatgccgccagtgtcagtttgtccttttcaaacttcccaaaagtggccatgaatgagtgctcgggttcaccgaattgccccaccgcgtcatgcaccgtcgtgggatgcaaatcggccatccccaggatgcggtgatacttctgaacggccttctggtgcgtttccgacttgatgccctccaacgcctcctgggctgtctttttcccctccaccaccggcgagacgaacagccgatgctgcatcgcctcttgcagggattgccagcggaaaacttcaggattcttcttgctgggcgcccaaatatacgacccttccttcaaatggacaacctgcatgggatgggggttcggtgggagtcccgggggaagagcatactcaaccgccgtagccccttcgcgttcgtactgaaaaggcagcggggcctcctcgccacctgcttgccccggcaactggagtacttcatcatcgggccccggcgcggtcagtcccaccagcttccgcacctcgtcggccttaatcgccagcaccgtgccacgatgatcgtgtgcagtgacctggaggaggtggcccagtgggacacacacttgaaagacgtgttcggaaaaaacgtccagcgctccagcctcggagggtttgttcgatgggtggaaaccaaaaagaagcgcgattccgcccagtgggaccagactcttatcccggtattcagaacacggtgccggtcgtgtccactcgccagcgctggatcctccgctctcatctggcgggcacgatgaacgcgcctcccaggaaaagtcaccatggaaccggcttataggtgccgcgatcacccttttttgatctgttccttgcagtccggagtggaatgaaaacactatacaagtgcggcgacggccttcctgcaaactttattcagttgcagaaaatacgcacgacgagcaagccgtcctggttctcgcaggagcgtgcatttttcgtccgcctttcgacgttggataatccattgtcttccaacgagcacacgctctgttgatggaggcctttaatcgctgtgcatggagtagcgcaagtaccgaactatgatcggtccacttttggcagcgatctgtattctttagaataacagcggcgattaggagcggctggttcagcattacggtcatctagaggagcgaaagccatgagacttgcaggatccctcaccaccatcggcttgctgtgcacactgtggacgccctggctgaacggggtcgtagccgaggtgtgggtcgaagacgtccacacgaaggttttgcgagatgcccgaccgtcagacaaggcgtcccaggaatttcagctcgaatccgcccgcaatgagtatgaatcggcacagttcgtggtgaggactcctgaacctgtcaaagagcttactgtcaagatttccgaccttctgcatgaaaaccagatagaccgaatttcggcagagcatattcgtgtacgattcgtgggctacattctcctcaataagaataccccagactcggaacttattcgcgttgccgcagcaccgtgcgagatacctgatcccctcctggaagactccacgatcgcactgccgcccggtcaggcacaaccgatctggatcacggtgtttgtgcctgaagatgccaagcccggttcctattccggtacggtgactgtttcgctcgataaacaggaaacacaattgcccatgactttgagggttttcagtttcgctctgcctggggaaaggcatctttttgtcacgaactggtttaatctgggcaatattgcaaaggcccatggtgttgaactgtatagtgacgcattttggtcgattctggaacgatatgcccgcgacatggccgagcatcggcagaacgtcgtgctcactccatggtcgctcatcgaagttgttcgtcgggaagacggctcactctccttcgattacagccgcttcgatcggtttgtggaaacttttttccgagcgggggtcagcgacgggattgagatttctcatgttggttacccagagggaggttggggcaatcgggtggttctgtcgcggcttcgtgcgagggatgccaagactggatcctatgtaacgcttgagtattcagaaggactgaagccatttt

SEQ ID NO: 4092 - DNA, 6656 bp, synthetic construct
  source 1..6656: mol_type = other DNA
  misc_feature 1..6656: note = Synthetic
taatgatacggcgaccaccgagatctacacagagtagatcgtcggcagcgtcagatgtgtataagagacagggcggcaggggtgccaggaccaaccacgtccacccgcactccgtcttcaccaaccggcggatcaacggcgatctctccaagatatccgcccggctgttccgtgtcgcagtagcgcaggctactcatctcaattgagactatggcggccccgcggctggacaacgtcaccaacatgcgatacggtccgtccggctcgagcgatccgagagtgaggtaacgcaacggtgctttcggaatagactccggctgctcggaacttgcggcctccttttgaggttccggagttggcttctgactgtcctgcgcttcctcagctatcttaggttcttcgacccgatctggactttgagcccccagaaccggtggtggctcatccgctttggtcttaacgtcgtcctttgccgcagactgtgccaacgggtttttctcaccttgcgactgaggtgcaaaaattgatgagagataaagattcaggacgatgatggccatcgaaatggccaaaaaggcgtaataccttgcccaaacccggttattatcttgtccaagcatcgtaatccttcaagttttttctcgttacacaaaggaccgaactcctggcccgcacctgcaagaaatttccacagttatttgaacccgccttcggaggggattctgttagtaggtcctttatccgacctgctgggccaacaatcatcgctctcttttcgcaaacaatgtccttgagcttaattgtgaatgattcccagaattccgcaaggtctggagcatttgggtgatggcacaaactgggctatgttgaggtgatgtccttcagatgctgtaatgggccccgataccggaaatctgatgatctcctgcttcgccaagacgtcgcttgagtaaagcggcctcagggacaggtctcggacagaggcttggattcctccgcgaaaaggcattcaacgtcaatcaaggtaccgcaggggttttggttatttactgctttctcaccgcttctggatcgcaagcctacttcttcgggtttagctggttcgagcgagctggcgcgacaagatattcacgatgccgatcgtagcttaacggtcaccggcgcaaaaaagaacgccccgccaatcggctgagggcgtaccggacccaaaaacggggacccgttcgcgagattcccagaggaatcaccttactgtgatttaccgcgaatcgccgctcggatacactgtcaacatgataccaggccaaatcgtaacacgtcaagacccaaaccgaaaaaaggaaaaaaggggtgtgcaatgtcggcagaatgtcaggttagagcaaacgaaaagaattacgtcctggggattgatttgggcgtgttatctctagggtgggctgtcgtcgaatatgcgggagacaagccagtcgggattctaaaaacgggggcccgtatttgggaatactcggatgcttcgaccctgacggtccaaaaaggtcaggaaacaccgccgggacaagagcgtcgccaggcacgtcagcagcggcgtcaaatctttcgccgtgctcagcggctacggcgcacctgtagcgtgctgcaagcaatggggctccttgatcctggcagaagaaatagccgagcccgtaagcagttgtgggaaacagtcgatcagcaggccaaggagtggctcaaatcgaacatccctggtttggcagatgatccccagttggatcataaattcgtttaccaccttcgggctgctgctttggatcatccccttccaaaaattttgttggcgcgcgttttcttccatctggcgcaacggcggggctttcaaagcaatcgacgcgtcgtaagccgtagcgaagaagaaggagaagtcaagaaggcaatatctctcctagaacacgagatttccgaaagcggttgtcgcactttgggagggtattttgccacacttgacccttacaccacccgtattcgaggtcgttggacttcacgaaagatgtaccaagacgagtttgagcggatctggagcgctcaaatcgcaatcaatcctggcatcttagacctgagtcagaaatcgcgacttttcaaggccatcttctaccagcgccctcttaaatctcaaaagaggttggtaggccgatgctctctcgaggtgatcgttcgtcgggggccagacggtccgcgcgaagttcgtccgcgacaggcagcccttgcgtctttggaggcccaacgtattcgctatatgcaacgaatcaatgacctcgaattcacggatcccgagggtgagcgacgcacacctacgcaactggagcgcgagcagctttatcaattggccgaaacagtagaagaaatcagctttagtcaaattagaaaagccctggggattccaacgggaaagaaaggggcagagtgggaatgtaaccttgagcgaggtggcgaaacgaaaattccgggcaataagaccgcagcacgtttgcgcaagatattggggaacaaaacctgggatggcttttcagaaagtgaccaaaagaagctagtagatacgatattggcttatttgagtcccgaagctcttcaaagccacctggagaatgtttggaaatttgattctgacacggccaggcaactgtccaatatcgagcttgaacagggctatcacagcttcagtcgccgagcgatcagaaaactcttgcccctcatgcaccagggcaagcgactcaatgaggcaatcaaggccgtttacgggcacacgggacgactccgctccgtacaagaacggttgccaccggtttggaaggtaatgccagagttgcgcaatccactcttggttcgggccttaaccgaactgcgcaaggtcatcaataatttgatccgcaagttcggcaaaccccaatatatccgtattgagctgggccgtgagttaaagcttggcaaaaaaaggcgacaagaactggccaaagaaatgcggaagcgggaagccgagcgtgaacgagcagccaaggtaatcgaggaaacacttcatcgcaaggcgcggccaaatgaaattctcaaataccttttggccgatgaatgcgattgggagtgtccttacaccggtaaaaaaatctcagtactgaccctgttgggcgatcagcctcaatttgacgtggaacatatctggccgttcgatcgaacattggacgactcattcggcaacaaaaccctttgctatcatgaggagaaccgccaggtcaaagggaataaaacaccatttgaggcatatagtgactcaccggatcgctggcgagagattctcgaacgtgtcaagagatttaaagggccttttgcaaaagaaaaactgaggcgatttctcgcagcggacatccctcaggacttccccatgcggcacctgagcgatacgcgttggatcaccactgctgcggcagattatctgggttacctttacgggggcaggattgattctgaaggacgccagagggtgttcacagtcactgggccgctgacggctctcattcggagagggtggaatctggatggtatcctcggcggtcctgaaaaaaatcgttttgattatcggcaacacgccatcgatgcaatcgtcattgccttaatcgatcaagcaatcgtccagcaaatctctttgttatcgagtcgtttatggggtaccgataggccaaccgcggtacaactcccggaaccgtggccttctttttaccacgatgcaaaaaacgctatactcaacatcgtggtgtcacatcgcatcagtcgtcgactctctggcgcattgcacgaacagactcactatgcaccgccagacaataatggcaggaccaagatccgcaaaccgctggcagcgctctcggccaaagaggtggagaatatcgttgatgacaccattcgaaagtatgtccagcacgcattggcaaatgcggaaaaaaagtcaccaaaagagttcttcggaaacccagagaacctccccgtgctcaagggtaagaataaccacgtcgctgtcgtcaagtccgtccgggtctgggtatcagcaaagcccgtggcggtgggcaacggagatcgggtacggtatgtcaaaccaggcaacaatcaccatatcgaaatctatgcgattgtggacgaacatggaaacccagtcaagtacgatgggcggtgcgttacccttttagaagcggtacaacgcaaacgacgtggcgaacccgttgtctgccgtaaccatggcccaaacacgcgattcctcttttcactctcaaagaacgagtgtatcgaatggacgaacgaaaacggcgaaaaagaactgctccgtgtggttggaattgccgataacgacatcgaatttcgcttgctttacgatgcccgtccaagtaacctagttagagaagcaaaagatcggattcgcggaggttactcgaagttgtttgaacgaagggcacggaaggttttggtcacacctttgggtgaggtccttccggcgcatgattaaccacgtcatcgacctgaccacgcgtccggctcgcctcttcgtgcggaaccgtcagcttgttattgaaggggccaagggcgagatcacgatgtgtcctctcgccgagatcgccgtccttgtcactgcccatccccagatcacggtcacgcaggcagtactggccggattatcggaggcaggtggagtttgtgtcgtgtgcgatgcgaagagccgtcccgtcgctacgatgctccccctggtaaatcaccaccttcagacggagcgcttgcatgcccaggcgtccgcttccctcccaacgaaaaagcgattgtggcagcagatcgtacggaacaaaattgcgtctcaagcccaggtcttgcgggaacttcacgaccacgattttggactatcacagcttgcggcgcgggtcaaatctggggaccgcagcaatgtggaggccatggtatctcgccggtactggcgacatcttttcggcagggcctttcgtcgcaatcccgatgccgatgatcaaaaccgtttcctgaactatggctatgcgattctgcgggctgtggtgtcacgggcaatcacagcagttggattgcatccgagtttgggattacatcaccacaaccgatacaatccgttctgcttggccgacgatctcatggaaccgtttcgccctcgaatcgatcggcgagtcgttcaaatcgttaggacatgccccccaaagtccgaattgacaccggagataaagttgcaacttctcgcgttcctggaagagcgttactccttcgaaggccaatcacgaacgatttttgacgtgttgacgcggatagccagctcgctggccgatgtctttctgaggaggcagaaggtgctggccttgcctgactggggcgatgaaaaaacgaagaactagttgtttaccgtcaggttatcaaatcatgtggctactggtcttcttcgatcttcctgtggatgaccaagcggcgagaaggtcgtacgtacgctttcggaaacaacttttgcagttgggctttatgcaacttcaatactcagtatatggccggccattccccagcgaggaggcgatgaagccctatcgaaacgccatttgtcaggccctgccgcccgacggcgaagtacgattactaccggtgaccgatcggcagtttggtcgaatggagagctacattggaaaaacacgcacgaagaatgaagaaactccacggcagcttatgcttttttaactcgattcttgctccaacctcctttcactaccgaacttctggcagggctagtgtatccgagcgacgattccctgcaaaccacagccggcgataagccgaaacctaagaggtctgagtgtatccgagcgacgattccctgcaaaccacagccgaaccccgcggggtgtagagcgtcgatgaagtgtatccgagcgacgattccctgcaaaccacagcctacacgctacagtcaaagccagtcgtcaagtgtatccgagcgacgattccctgcaaaccacagctcgccgtgccacacagcggcaatcgatctaagtgtatccgagcgacgattccctgcaaaccacagctccagcggatcatagagtcagaggactatagtgtatccgagcgacgattccctgcaaaccacagcgcaaagcaacgtgcggtcgccggagtatgaagtgtatccgagcgacgattccctgcaaaccacagcatcggcgcggatgttcttccgtaattcctcagtgtatccgagcgacgattccctgcaaaccacagctgccgaagcacttggtcaaaaccctagccagtgtatccgagcgacgattccctgcaaaccacagctgaaacgagcacacatagcaggaggcctgcagtgtatccgagcgacgattccctgcaaaccacagcggcttggtccagaagccgagaagaaggctaagtgtatccgagcgacgattccctgcaaaccacagcttgtagtaaatcagcaagttctgcgatgtgagtgtatccgagcgacgattccctgcaaaccacagcttaattgataggttgcccattcgttgaaatagtgtatccgagcgacgattccctgcaaaccacagcccctcgac

SEQ ID NO: 4093 - DNA, 23237 bp, synthetic construct
  source 1..23237: mol_type = other DNA
  misc_feature 1..23237: note = Synthetic
ccttgtgagctgcatccctccttcgtctggcgaacttcgcctgcagccgcgcgacgcgccgcagggccttagcccggttcttcgatcctttccgcctgcgagccacgctctgctgcgcggacgccagccggcggcgctcgtggagcgagacgcgcggcagcgcaaagaccgtcccatccgagagcgtgatcggctgctcgacgcccagatcgacgccgacggccgggccgtgattgagggcaggctccgcgacttcctgctcgacctggatcgagacgaaccagtcgcccgcgatcattgagaccgtggcgttcttgacgtcgccctcgaccggccggtgctggacaagcttcacccacccagccttcggcaggaagatgcgctcctcctccagcttgatctgcttgggatcgggatagcggaaggactcgttctcgcctttgcgccggaatgaggggtagcgcgctcgcccctcgaagaagttcgtaaaggcgcggtgcagatcacggatcgcctgctgcagcgggtggtgaggaacaaccctcagccactccacctcgcgcttcagttcggtcaggccgtcgcactgacctgcgtagctcaaccgccgcggcgcgctgcggtggtgttccaacgtcttctggtcgagacacaggttgtagaccagccggcagcagccgatcgttcggcggaacagatccgcttgcgtattgcttggataaatccggaatcggtaggcctgctggcgcagcatagcgtcgaagctatgcaggatttccgggcgacacaaggatcgcctgacccggccctgaaggaccgggattgtcgcgatcgaaggttagaaccacgccgtcacgcacgctgcagatgccggcgttgagcggcgtggatacgctccatccgacgcaggtcttcggggctgagtgccatggctgcctcgatccattgatcagcgacttcgtagagctcgctgatcggcagcggcgccacccgccggcgggcggcctgcaccaggctgcgtgttggcttctcgcggcgcaggtcggtattgaggtagcgcaggaagccatcgataccgctcccgggctccagaaggacgtcgacgacgcccagcgcatggagatcttcggccagcatgacctcgcctccgatcatcaggcgctgcacgacggtccatgggacatgcctagtgagcagcgagatcgctccgatcgctgcgaaaagaccgaacttgacctctggcaggccgaggcgtgcaccgcgctctgcgacgacgacattgcacgcccgggcagcctcgaagccgccgccgagtgccgtgccctcgacgaaagagactgtggtcacggggaggtcgaagctcgaccacatgtcatagactaggtcgcatgagtggcgtgcgtatcgacgaagtgcgggtgcgtcgccctcgcagatagcgcgcgcgaaggtcgcgagatcccctccgaggttgaacacgccgggcgtctcgctatggaggacgcagaactccaggccctgtgccagcccctgctccgccgccagccgcacggccgtcgtcgccagcctcatctcctgcagcatcgcaggcgcgaagctcggaaacgggttgtcgagcatggttgcccagagaatgcccgtcgcctcgtcgaagcgcatccggaacgctgtgaactcgcgacagatctcgtcgagacgaacggcgagtgaagcggggcggccggtcgcgatgtgcggaagcgtgaaagtgcgcgccgggacgtgttcgaccagttccatactcagcctgctaacccgagagcgaggggatcatgatttgcatcatcattccttgagaccgactgatatccaaggatcgtgacgcgatttcccgtgggcgcctgcggagacgggcggtttgttgtttgcaggccactccactaggttcctgcctaccgaattcgcgatggaatcagcggtgtcgtcgaagctcaaagtcacgttcacggtcggccaatccgcccgcctcgaccagcctggcgtcgtcatcccgctggagatcgaactccccgagaagacaggcgagatcgcgctgcgggcaaatgccgtggtgcagcttggcaagttcgagatgccccagctcgtcgaacgcctgctcgtcgacgacgtcctgttccgtcctctcccgcttgaggaagcagccggacgcagtgtcgccgcggccggcgccaaggccgtgagcgacttcatcatctcgaccctggcctcgcgcggcacccacgatgttgtcgccgcggcgaagaagaccgcggttcgctacaaggacgccagctctgaggagaaggtgtcagctgaccggtatgtcgccgagatcgagcgcatcatcgcggacgagacgctattcaacaggaaccgcgtctggggagcagccccgccgccggcgatcgtcgtcaagcatccgatctacccggcgtataaccagggcgggcctcgtatggggtggagcgagctgacactgaacgatctcggagccgacccgggcgaattcgccttcgggatcacccgcctggatgtcgccggcaagttcctggccgactatgccaacatcgacaagaacgagaagcggctctccgacaacttcgttcgcaggctcgaaatcgacaccatcaacgaggacgtcattctgttcgacgagcagtccgtcaatgtcgcggcaggtgtccggatgctcctgaacagtctgaaggagcgcttcgccatcatcggagtggacggccgcgccccgctgatcgaaatcgccaagctccgggaggccgcgctcgccggtgagccagacggtgccgcgcggctcctgcgcgccttcagggatctcgggagaaatcgcttcaatctctatgacgagttcactgacaaacgcaggcgttttctggagaagtcgctggtgctggccgagggggctttcgagatctcgcagcctgccccggcgccggcagccggccgtggagttcgcccatgaagaccatgccgatcgacattcaggtccgcgtgccgttcaaggtgctgcgtggtcgaagcaagaagcctgagaagatccaggtgagggttccgctcgctggcgaaatcaagctgatcgagagcctcgaccaggctccgatcgccctgcgggctcgtaccgtcgaagggcctcgcagtgacgagtatgagcgtcgagtcatcgaggttgacggtaaagaagtgctcgtccgcccgatcatgcgaagcagctgggaaaaaatcagggctcgtatcgccgacgcgcgtgcgatgctcgcggacggcttccaccattctctcaaggttcagacccctctccatatcggatggggaaacgatgtgttcgacgtgcttccgctcgatacgcgagccgtcatcgaggaccataccgactccgcgatgaagctggcgcgggatacgctggatcgcgttttcgccatcgaggatacgctatttctcagatcagctccgcccgctttcgatctatacccgccgaccaaaaccggtggcgatcgagggcgtttcaacgtgagcgatcaagtcgacctggcgcctggctaccagagcaacggcttcgccttcatgctcgaccgggtggatgacgctgtagctttcgccaagcgccatggcctcaacgatatccctccagagttcagcagcttccggatcgaccggccagatctcctgacgagcggcgagaccctggcgaacgcctacatgggcgttcgaaccatcgagttcgagctgcaggaggcacttgcagatctctcggcagccggtctcgaacagctcgggcgcctgctcacgcagcgcgagaggatggtcgaggagcatggcggtgacgcagtgtgggcgattatcgacgagctcgatgacgcggtcgccaaccggttctacaccccggcgctgccccctcgcatcttcgaccggatcgccaaggtcacagacatgaccaaggacgcgctcacgatgtctcgtgatctgccgcctcgtcccgtcatcgaattcggcgacgatccggagctggcgaacctcggcatgtagtttaactgcgttctagttgcaggatggtggatagtgctttggggaataggtgacacagcgcttgcccgtgagatagcctcggtcctatcggcagtccattccgctagggtccttgaatgcgcaggcaatcgatcatcgcactcgcgatagtcaccggactttctatacccgcggtggggcaggacgatcaacccgcgcctcgtccgccgaacatcacagtaagcgccgaggcaactcgcgacgtcgtcccacgcatcgcaatgatccagctcagcattgttgctgaaaagccgacatctagggctgctacggacgaaatggcgcggctctcggcgcctgtgattgccgagatcaggtcccagggaatcgacgctctcgacctgaagacggatttcgatctttcgttggtttgggatgacacgcgtggcgtttttctgcagtccaaggagacgctgcgcggatttcgcgctcgcaataccttgaccataaggctccacgacattgctcgggccggcgcgctcgctcagatcctgatcgacaagggtgcgaaccacttcgagggcatttcatacatggtgggcgatgacaagcgccagtcggatgaattgatatccgaagccacgaaggaggcgacgcggagagcggggatttatgccgaagcagctggtgttcggctcgggcgcgtgcttcagatcgatacagctcccgttgctcccggggccaccgagcctcccgtgctgcgaaagagcacgctaagggaatctattccgacggtggtgccgttcaatcccggatctctgcagatcaggtcgcgggtcaatatgacctgggaaatcctggaccgataggaagcaggtcatgccctcgatcagaagatcgaagacatgacctattgcctcatcaatcgcatcctctgatcatctctgcatgaaaggattcctcacctcattccttttgctcgccggcgtttctttcgcgcaggcacagctcgcgccgattgaggcgtaccgacaggcgctgctgccctgcctgcgtcaggcgaagtcctgcgatctcgccaagctaacggcctcggaccgggactatctgcgctacgagctcgggcgctcgaagctgtcggcggcagacgtcgcggccgttgccgaggcgcgcatgacgcagttcaggtacggcccgatcccgtcggaagacaaggagctgccgagtcggctgcgtaaggcgacagtcatgatcctggcgcgccacgccacgacggtgtccgagggatctgggtttttcgtcgcgcctaatttgatcgtgaccaaccgccacgtcatcgatggctctccgcagacgatcatggtgctgtcgagcgagtcgaggctgccgctggtcggccaggtcgccgcaatgacgccggatcatgtcgtcggcaatcccgacctcgctgcgatctgggtgagccctgtcgaaggtgtcgagatcctgaagttcgcgagcccggacagcggctcggtgattgcggccggcttcccgggcaaggcaatcggtccggagggcttctggaggcgcgcccaggtcggtgacttcaccattccgaccctcaccctgtctcaggggctgaccggcgccatagagatgtcccagaccggcgtggagctgatccgtcacgcagcggtcctggcgaaggggaattccggcgggccgctgatcgatagctgcggccgcgtcgttggggtcaacaccttcatccgaggctcgcagtcctatgcgctgtcgacaccagtggccatgaagttcctgcgcgacgcgaagctgcccttcgcgcaggatgagagcgggtgcaagccggccgccgtcgccagcggccgataagggctcaaccctgcgcggcgatcgcggcctcgaagttcgcgatcggccgggcgccgacgagacgctcggtgccgacgaagaatgtcggagtcgagttgacgccaaattgggactgggcgcgcacacggacctgactgatgctcgtcagcagggcttcgttcttcaggaccgcgtcgaattcctctcgcttcatgccgagttgggcggtgagagccggcatcgtgtcgagcggacgaccgttgaacgcccactctgattgcttgcggaaaaacgcgtcgacgtaagcttcacgccggtctgccccggcggcgcgagccaacataaaagcggccagcgagagcgggtcgagcgggaattcccgcaacacgaagcgaatcttgccggtatcgacatagcgcttgcggagctccggccagacgtcctcgtggaagcgcgcgcagtgcgtgcaggtgagcgaggcgtattcgacgattgtgaccttcgccgtcgggtcgccgatccagaggtccggcacgtcggtggcttccagaagcttgtcgagcgtgaccgccggcgggtcttcggcctgggcaagggtcgtggatgcggtgagtgcggcggcgatgccggcgatcgcgccgcggcgggtgagaactgcaaaggtcataggcggtccttcaagaatagctcatcgaatccatctggatccgcgttgaaggatggatcgcgcatggcccatgccgctgtccattccaggaatgcagatttcggaggatggcgagatcacgctggcgtgagagcaggcatcgccaggtggacaagatgctcctgggcaacctcgcttgcctgctggcagaggatatcgaagtggaggcggtgggtcggatccatcgcctcgggaaagcactccaccaggtgggaaaagagcgccgcggaatccgcgtgttcgatgactcgggcgttgcgccagatcgttccggtgttggcgagaaaggtcgtctgaacgccgctttcatcgaagaagccgccagcgtcgaagccctcgccgtcggggctgcggacccaagcatgcacgacgtgctcccgccacccggtgggagagtgatccgagcgggtcgaaaccgtcagcgtgacgacaggcaatgacagcaggtcgctgagtgcggaggccatcggatagcagcggccgtggcgccactcttcaggaacaccggtcgcgaggagcttgtcgagcatgccgacctcagaagttaaaattggcgagctcgggatcgtcccgggaaatcagcgaaaggtcgttcgggctgttggctgcggcgaattcggcaagcgtgaagatcccggagatggcccggaatcgctccggcttggccttgatgacgtcagcgacgctgtcgagcaggtccttggcctgatggaggaggctatcaggctcacagtcctcctgaagtacgagggtgcgcagccgggcagcttccttgatcgctgcggacagcttcgtctcgcgtacctcgcccggaaaccttggaacgctcgtcggggtcgagtttagccggacgttgagctctgccagcgcggctctgatggcgtaccgggcctgatggatggaggcaggcacgtcatagcgctcgatttcgatcgtggcattctcggtgatcgacgctgatgggacgaggtgccgggcgaacaacgcgagctcgctcgcctgctctcgatgagcaacgtcgaagagaaaggtaacccgctccgttgagtcgcccttccccagcccgagagtgatctctccttggggctgcagccccccggaggcgaggaatgcccctcctcgcagctcgacgctgactgcgggcgcgggcgtgcgctcgtgaagcacgccatcgacgaagagcaactcgcttgccttcttcagcagaaacgcttccacgccttcgcgcgtgttgctgtggatcgtgcgggccttcgcaggaagggcctcaagcacgtcggcctcagcgtgatgccggctggggaagtgccgctcgatgaccttgcccagataccggagcgccgcggcttggccggaaaagccctcgtcgacagactcgaacaagtggaggccatgatctcggcgagacaggtcgacccgcctctgatgccggagcgtcgccgtttcgccggaaaggctccagtcgacggcctcgaacaggtgcaggccgtgtagtcggcgagagaagtcgatccgttcgccaaattgcgggaggtaggcgccgcggatgacctcgggagcgtccgtcagcgaggcctcctcgatctcgacgtcgaacatctccctgatgggataggttcgcggatggcggccatttttgatgtcgcagacgacttcatagattgcggggacagatagcttcacatcggcaccaggttagcgagatcgggttcctcggcctcgacgagcgcggcctcaatgcaggcgtgatcgacggcggcggtcgtcagatccgcccgcaggtgggcgaaattcgagaacagccggtggtgggcgctgtagccgttccagtgctgctcagctgctttctccaccaggcgtgcggcacggccggctgcgtagctgttgcccgcgatgatgtcgttgcgggtctcggcgagctcggcccccagcctcagggcctcaggcgacaagttcggggaaccaacatgcgggccgccgagccggccaagcagcatgtccatggtgcgattgatggcagcaagggccgcgacccgtgcctcgggaaagcttggcgtgacgtcgtagcgatcgatctggggtgacagcgggttgaggatctcgacctcagagcccgggattgcggacttggccttgcgcgcgatcgccgcggagaattcgagcgcctggtcgtaccttgagacgtcgaaggtgaattcgaggttcgactcgacctggagccgcgagcggttgaaggcatggagcttgatctcggcctggcgctggccgagcgggcaatgcagggcctccgacagggtaagcccgatcccaggcggcagcgtctggaagtggacgcggtcgtcgaccaggacgaggcgcgcgaatgcatcccggatgcgctgcaccatctcatcccggccgtcgtgaacgacccggtcgatgccggcggggcgctcatcatggatcttcggcttgtaggggacctccccgccgatcacgcctgcgaggagtttggccgtgttctccgggctgttgaggcgccgccgcagcgcctcgacggtgtatccttcggtccagcgccagccctcgcgccggtcctgctcggagaactcgtaggccgcgatcgtcggcgtcgaatgggtatggaggacctcgaacaggcgcccatcgaaaagacgacgctcgaaaggctcgtgctgcctcgtctccgggcccaggcgctggtttgccttgaagcacccggcgatgaccacaggcgcatcgacgtcgccgaccgaccccatctccacgctcacgcgatctgcgatgagcacggtctgcggaatgcgacctcgaggcttgaggtacgcaagctcataggcgaatgggacgtcgaagcgcatggcggattccttccggtcgtgaaggtcgcctagtggaatgaatgcgacaaggggaagagggagaactggcgggaggccttacactcctcccgccagattggagcgcgggcttacacctccgcgatccagcgcactgacccgagaaagggccccgagtgaaagccctgaattatcgtgcgcagatgacctggatggcgccgtccagatcatggatcgacattcgaatcctaccggcgggaagtcaacttggtcgagctgcaatgcggtggatggcggatcaaagactaacgtgagcgcaggctgcaaaccgaggtggacgcgttttcggaacgctctgaaggcgctcaccgggtcgggtgatgatctggaggcgacgagagaggccttggggttgccgcttggggcacttctcgcgagatgcgaaggcggatggcgccgaggctctaggacgagaaagggcggaccggagcccgccctcattttgtgggatgaacccttactaacggagggaccacacctcgttccttgctagaacccgtggataatgaagcgacgtgttgccatcagtcaaggactgctgcagcatttctacatgggcatcagattttctttcgacctcggcacaaactcgattggctgggcggtatggcgcaccggggtagaccccaggggcatctttggggtcgacgctcccctggagatcctcagagcgggtgttcgcatcttcaaggacgggcgtaatccgaagtcgaaggcgtcactcgcgtcagagcgtcgcgcggcccggctcgcgcggcggacacgagatcgcttcaagctccggcgcgaagacctgctcaaggctctcgccaagcatggcctctttcccgaggcaggcgaggagcgtctcgctctggcgaagctcgatccctacgagctccgtgcgcgcgcggtgaatgaggcactcgccaccttcgagatcgggcgggcccttttccatctccaccagcgtcgaggcttcaaaagccagcggaagggagtcgcccaagacgaggaactcgggaaaatcgctgcgggcaccgagcgtctgaagattgcgctcgcagcccttgggtgcagcacgctcggagagttcctgtggcagcgccgcggggagcggaaaagcacccgcattcgcctggacggcgccggtaaccaggcgctctacgaattctatccgacgcgcgagatcgttcaggacgagttccaggcgatatggtctacgcaggcggcataccatccggcggcgttgaccgaagtggcaaaggcggagatcgaagcgatcctgttcaggcagcgtccaatcaagccgccgcctgtcgggaagtgctcgttcactgatgagcttcgtgccccgaaggccctgccatctgtcgccgcccgcgagatctacgagcgcctgaaccatctccgcatcggctacgacgacggcatacggcgtccgctgagcgttgctgaacgcgatttgctcgctaccgagctgctccggtcggcgaagctgaccttcccccgggctcgcaagctcctcgggttgaaggcaggcgtcgcgttctcgctggaagaggcaggcgagaagcacatccccggcttcaaattcgccgaatgtgtccatatggaaaccgctttcggcgggagatgggactcactttcctggggagagaaagacgccatcgtctcgatcgtcctcgccgaggaagaggatctcgatgctgctgagcggctggtggcggaatgctcggtgccggcgcctgaagcccgcgcgatcgcggcgatgatccgcgtccttccagacggctattccaagctcggcttgacggccaacgccgcaatccttgaggctctggcaacggaggtcacagcagacggctctgttgtgaccttcgcggaggccgtcctgcgcgccggccgcgccattggctatgactggcatcattcggaccaggtccgccgaagtggccggcccgcgccggaagtttctcgtcagctgccgaattacgcagtgatccttcccgatcaggtaatgcccgcgcttccaggtgaggaattcggccgcttcacgaacccgactgttcatatcgggctcaatcagctccggaaggtcgttaatgagctgctgatcgagttcggccatccctcgcagattgttgtcgagctcgcgcgcgacctcaagcagacggagaagcagaagaaagcgaccgccgcatcaaaccgcgcgaacgccaagctgaacgacaagcgccgcgatctgctccagtcgcttggggtgcgggtgaacggagactcaatgctgagacttcgtcttctggacgagcaaactggcgcagatggtaaggcgcgatgcccgttctccggccaggagatcacccaggccgccttgttcactggcgaaattgaggtcgagcaccttctgccgatgtctcgcacgctcgatgatacagcggcgaacaaggtcgtctgcgtccgggaaaagaaccgggagaagcgtgggaggtctccctttgaggcatttggcgaccgtgctgaatggccggagatctggtcgcgagccaaggccctccccgcgaataaatcctggcgcttcaagccggacgccatggagcggtatgagaaatccgatggcttcctgggtaggcaccttggcgagacccgtcacctttcccgtatcgcgcagcagtacctccaggccatctgcgttcggttcgacggggccacgggcgagcgcgtctacggcgatgttttcgtcacgcccggcgagatgacggcgctcctgagggctcgctggcggctcaacgagttattaggcgacaccgggagcaagaacagagacgaccatcgccaccacgcgatcgacgccatcgtcatcggaaccatgactcgaggctggctgtcccacctcgcttgcgaggccgggcgctacgaaggaggcgagcgcgcagacctcgtcaaagcggtggcagagccattccctggtttcagggatgtggtgaaagctgccgtcgatcgagtagtggtctcatacaagccagagcacggcatcgagggggctctgttcaaggaaaccgcctacggcctcgtttccgagaagcattctgatcaccgggctggcaatgtcgtctatcgcaagccccttgcttcgatctctgcaaaggaggttgcaaagattcggggacaagagctgagggctggcgcgctgggcgccatcgacggcgtcgacccagagaacaagaagctgatcgccgctcacctgaaccgcttcggcgaggagcaaggtgtcaggcgtgcgcggctgctgggggtcgaaaatgctgtggtgccaaaggcagacgcgcaaggccatgagttcaccgcgctgaagcgtgacgggattcatcacatggacatcgtcatgctgcgcgatggatcctggaaaatgtaccctgcgccgatcacggacgtgaaccgcaggggcttccggcccagctgggaggtccagaaagtcgggggtaagctcgcgatgcgtctgcacaagggcgacatgatcgagcttgatggcgatgagggccgcgtgattaaggtcgtgatcaagttcagcgaaagcggacagattgtggtcgccgaccacaacgccggcggaaacctcaaaacgcgtgatgcggacaaaagggacccgtttcgctaccaatcggcaagcgcggagaagctgagaggtctcaacgcgatcgcgctcaacgtcagtccatcaggcgtgatgcggccaaggcgaatcgacgcgggggaaatttgaggtcgcgtcgatcatttgcggcggaggtggattcttagttggtccgggaacggaaaaccctgacgaatcagatggttgcggcagggtctattctagcaaggaacgaggtacggcccaaccgcagctatgaggcggcaaacaacgagggcctgctaattctagcaaggaacgaggtacggtccaaccgcagcatatcgagatcactgaatagctcggcgggaattctagcaaggaacgaggtgcggtccaaccgcagcaggtggacttcgggctcgccggcgacggcaattctagcaaggaacgaggtgcggtccaaccgcagcaggtgatgacgattacgggccacagcacggattctagcaaggaacggggtgcggtccaaccgcagctcgctgcggagctggtcaatcatcgcccgaattctagcaaggaacgaggtgcggtccaaccgcagctgcatcatcgcaggcgagacggttatctgtattctagcaaagaacgaggtgcggtccaaccgaagctcgaaagccagaaggtcaccgaggtgaatccgcacgtaccaatagaatgcgagcatccgccgttcaattcggccatgtttatcgttcgagccctgccatcaccggtggggctcgctgcttttatggcaccggccgaagcactggggcctcgtcgcgatcttctgccagctcgttcggcgtgatctctgcgtgcatccaatgttcgctggtgattacgtgattgggacgcacccacttggcgacgtgcttgcggaaatcccgatatgcgaaccccgcggccgtccggatcacatagccttcgcgctgctgcagcggccgacctgtggcttcagcctgggcgatgtcgcgcgcgagataggcctgccaagcttcctcgatcgcctcgggggcgtagatcccgtcgtaaattacaggcactggcgtaaccgagagcccggcgctgctgcctatgagagcgaaccattcgagggtctcgtcccagctcaggcagaagttgcgctcgttccagagcccgaagccctcaaaatacgacggcagatccgcgtaggctatcgagtgcctcgcgtaggtcccctcacccacgactctccacagctccgggatatcccagcgaatggcgctccaatacgcgcgtagccagtcccgcgacgggtggtgccggccgtccagggagcgtgcatgcgtgtgatcgcggtagagcgagctgcactcgccatcgcgtttttccgtcatgatgacacgctcgccctcgaaggtgcagaggtccttgagcatgcgatcgccgcggcctagcccgggcgacgttggcatgtgccaggtcttcgggtgcttgacgtgcgtccggaacaggctgagcacgccgccggccgccaatgccttctgcacaggctcctcgtcgaagagctcgccgcgcagtcgggatccattcgcgagcacggggttaccccacttgtcgacgagttcatcgtcctcgaattggggcggctggaccaggcgcttgatgccgagccacgcgcgcagctcgctcggcgaaatggtggtgtgctcggcggcgagatgatgggcgtcgcaaagaggcgcgccgttttcgatgtaatagccgccgtcggtgaagagccgtcgctcgatgatgtggtgcgccgccgtcgcagctgcctcgcacccaggcgcgcagcagcatccaccggtccttgcaaggacggcagcgctgaactcattgcgggttagcaggacaggcggcttcatgccgacaaactatgaggtccgagcccgaggaacaaggaaagcacctgaaattctggtgggcggatgcgggaatagcgatgacgacgcgccgacttggtgtgtagatattctgtagttccgatgtttgaggagtcgatatgtcccgtgtgatcaactcgctgaaggtccttttctccgatgccgggtccaacaccgtggtcatcgcagctctcctgccaggcatctacaaaagcattgtgcacctgggttccgaggtcgggattatcgatgcgggcggttcgatcttcgaacaggtcatctggtcgacagtcctcgctgcggcggccttctcaggcgggagcacaagtcggatgccgatggtgttttggtcgtgggtcgtcggggtcgcggtgctccatcttctgatcgccgtcaacacgagtggactgggcgcgatgatctcgtacgccttcgccgccgcggttctcatgggcgcgttgtccggccggctttacgcctcggcaatgcgtgcgcgatccgtgcgaggcttcgccgtcggcatccttggtggggcggttgctgcgagcttcgccctcgcacccatgtggaatatttcgagccggtttcaggaggaagcgagcgcgatcacggccgctggcagccgactgcttgacgagtatcgcgagatcgcaaaggacggggcgccggagccccgcgcacacttccaggcgatgaatcgcttcgcccaagcaattttgaagtcgcccttcaatgatcaaaccgcggtgctccgtcggcacatggatttcgatgctttcgagcgctttcggctcggcgcaatagaatgcaaggcggtcggggggggcgagcgagccaactgcttggaaaagctgggtgctttggagggcctgcacggcccctccgacacccgaaccgcggtgctcctgaagaccttcaagatcgcgctaggcaaggcctaggacttgaccacgcgcgcgatcgacgcgtctaggccaagcgggcgtgccacgctgcgcacccaatcggcctggttggcatggagacgatccttggctttgacctcgacgaagcgcaggctttcgccgcgtagcgtcaggtcgaagtggccgctgaacacggtcgctccatggacgtatctatgttcaacgcaacgcaggatatggtccggcccgactgtggcgatataggcctcgatctcctcgattggcgccttcagcaggccgaggtagtacgactttcgctcgttgtagacctcgcgcacgttcgcgagcacctcacgggcggagagaagcactttggccgcgtactcgggtcccggctgatgctgccgttggtttgtctcatcgaacccgagccaatggccgaagcgcctctggaagacttggccgttcatcaggttgatgccgttgagcgccttgccctcggaggcggtacctgaatagccgcgctctcggtagtgagccagggccaggtcctctaccgtcccgaccggaccgccgggcaggacccacatgccgcgacccgccctcgacggtcgtcccgcgatctcctcgatctccagcccgagcatggctgcctgttcggacaggctcaactctgcaaagcagccgccggcgacgcgatacatcttgtcgatggtctctggccgcgtgtgcttccaccattttctgtcggtccagaaccatgccttgggatcgacgaggatcgtctcggtcttagggttgacgaagagctctgcgagatcgtcctcgtcgaagccgatctcccgcatcagggcgcgcgtcggcgccaggttcgggatctcgtgggtgggcagcgtgctcctcagatcctgctcagaccagggagaagccagagttggcatgaaagcgggaatcgcgtgcattcgcgacaggacgccatccggtggatgagcgcaagcccggcgtacacaaccaaggatcggtcatgctatccaatgagggcgcggcgattgcttcgccgctgtgaggaatgcgatgagcaaccatccccgaaccgtctcgatggagttcgatatcgccgatttggcgatgatggcacacgcgcttcgcatcgaacgaaacagccagctcggaactcggaatgatatcgcccgccaacgggccgacacgatcgcaaagcggctttcggctgcggcgccgacggtttcgcgttacttcgatgatgccgtcttctgcgagctcgtgatcgccgtctacgagacatccgagccgaccgtcgagatcgagcggccgtcgtggcgcacttggggcaaagagggcttcatcactgtgactgccggcgatcggaagtaccggtccgcaaactccgatcacctcccggaatgcgctgcgctcagcgaaatccgggatttcctcgcagaagtgtcgccgatggtgacgccagcaaccccagggccgtgagcgcagcggcatcaccaaacgagcaaaagagtgagagggcacatagcatgaagatcgaattttacggtgttacgccagaaggcctccgcgaggtcgtgagagtaggaagggatggcctctacaggcttacgccggcaatgagcgtcgttgactcaattgtggatgaggtctccgaacagatacggcagttggtcgtacgagagatcgaccacaaggacttggagcttccaaagcgcggggagccgcacaagtgcttcgcgatcgagttgcccgcggggcagtggcggatcatcaaggacgcgataatggcctttgggttcaacgacaatatcggaagtaagttgctgatcgacctgaagaacgtggtcatgtcgatctcgcttggtctcgaaggcgctgaagccgccccgtcgcgagctgtggcgcgctgataggcgcgacggtctaatctattgtctgctggacgccgaaaagaggcactttgaggatgcggctgtacgtgtgcgccactttccggggaggatttctgcattgatcaccaggcgcgagctcgaaatcctaaggacgatggcggcagctgaagcggaaggccgctacgaggaggcagagatcgtcacggccggccgcgaatgttggctcgatgttgagctgatctcgaagaaaacggtgctgggtctgctgcgctgcatggccatcagcgtggatacctccggaggcgccacggagcgctacacgatcaatgcggccggccgggccatcgcgcgacgcccggagctcgctcgcgagatccaggaggcggttgtcgtcggacgaccgtttgagatcgaggacgatcacgttcgcttcctgccagaagcgggcgtcgcgccctgaataaaggatttctccgctcgattcctgcggtcgctaaagatcgagcgaatccaattcatgcagatttaagccgcggttcgatactgtttcgaccgttctgttgtgcaaggtggtcctagtggttggtggtgagctcggatttctcgcgtcgtggcgcctgccggacgcgttcacgacacgccagatcgacaacgtcttcgattggatgaggacgcgagcgatcgagcgcgtgccggcgctggcccgctcattcttcgtccccggcaagccgcccaaggacgtggcctacagggctgcctccgagccgaccaagatcgggttgagcgttctcgcctgcgatgagatacgaacctggatgtggctcgcggctcagaaaggtcatgttgaagccatccagcagatggttgtcatcacccaggcctgcgcgctatcgaaggagttcgcggaacaacggctaacgctggacaatttgtcttccgagtggatggaaacgctcgggcgcctgacggattccggtcaaggtacgaaaagcatggcggacaagcacagctcgaccctcgccccggtcgttgacgacgccgaagagctcgaagaaatcgggttcggcaccaccgtcatcaccaagatcggagatcaggactcccgcgaaggcggcgagatctccaagcggtatcgagctctgattggtcgcaagcttccgttcctcggagagctgcccgagccccgtcggatcggcgatgccatccgtcagcgctggccgtgggccgagatggcagccgagcgcatcgagaaccggtttgcggtgctgcgcgcggcggagggcgatcgcccgatcacgctttcgccgatgctcttcgtcgggcctccagggtcaggcaaatccacgcttgcgcgcttcgtctgtgaggcgaccggcctgccgacgacggtgctgccgcttggcggcgtcgcggatggcgccggcatctccgcggtgacgcgcagctgggcgacgacgagacccagcgcgatcgtgctcggtatgcacgagcacaactgcgccaatcccgctttcgtgctcgaagagatcgacaaaacctcgcgctcgaccagcgcgaacggtagcgctgccgacgctctgctgcagctgatcggctcggggacctatcacgacctctgcctgatggcgccggtcgacatctcgaacgtgacctacgtcgccaccgccaacgacctgaggaccgtccaacccgcgctgcgcgatcgcttctctctgatccaggtcccggctccgcgtagccaggacttcgagatcctgctcgacaacgcacgcgaggatttcatgatctcgcgcggcatccgtccgtcgcggatgccgcatttgacgtccaaggatcttcacgcactgcgttcctggttcgcctcgaatcgttctgcgcggtcctttgcagacgcatacgagaccttggtttcagcagcgatcgccgagttcgagaacgcggcgcccgagccaggaatgctgccgcactgaaggatcgcgccgtagcggaagctcggtccttcaaagatcgttagaatctgattgacactccttgaaactggcctgcttatttaatgcgtccttcatggccgcgctggattggcatggattcgtaaggatcggctccacgcggacgccgcttgttcaaccaggagaccccgcagatgacgtcgatcactgccaactcgttcaaggtccgcgcacgagccaccgctcgccgcgttcgtcgcggcctttccctcatcgaagccgctgccgttctcggtctgctgatgctggtcgtcgccggcgcgatgctgctctaccagaacgccagcaccaacagccgtgtcgccgaatccgcgagccagctcgcgacgatccagcagaacatccgctcgacctatgccggcgctgccggtttcaccggcctgcagaactccacgatcgccaataccctgcccgcgaagatgaacgccggcggcggcgcgctgcgtcacgccttcaacggcaccgtgaccgtcctcccgaccaacaccggcggcggcaccgactccggcttctacgtctcgttcaccggtgttccggccgaggcctgccagaagctcgcgaccatggacatgggacgcgcgatcgtcggtctcgtgatcggcggtgccactgcttcgaccaccaccccgccgcccttcacccccgcgaacgcccagaacggctgcggcaccagcggcaccaccacgatggcctggaccgtcgccggctgatcggactctcgatcgagacattcgagaggcggagggcatcgctctccgcctcttttttatggcgaagcctgtgaacgagatggcgacgattactgaaagctatgaccgccttgccgaagagacgcagcgtccctgcaactcggtgtccttctggaagaccgtgaccggccgctggggcgctcgggcgggcctcggccacaccgagttcggcgacacgatcgagagcgctatcgaggccgctgttacgagcgcgatcgctgtgcagctccaacggagcgagcaagatctccggagccctgcgagcgaggtcccgccgagagggcagatcctgaccctggtcaaaccggcaccgaagcggcccgacccggaacaggtcatcaaggactatctcgccgcgtttgctgaggctaaccccgacagcgtgccgccgctggtgcagccctcgaagggcggctggtacctgatcaggagctacggtgttgtcggaaacggcacgccgcatcggctcagttcgttggaggctatgaccgctcgcttgaaggcgcgcgcaaccgcgagctagcgaggatttgaaacgcgccttcagaattgcgtttcaaattcattcaagcgattctgttgttcaagaagaatcgtctctgaggactcttgatagtgctgaaaattcttgaccgggttgatgcgtacctgattgatcaggtcaacgcttgggtgacggagctacaggaaaagcgcggctttacctggcccgcgatcctcgtgggttcacacttggccatgatcgcgattctgggtcttcttaccctcgcatccgccgtcttcagtggcctgatggaggcgttggtctgggcgattgcaacggccgtagttggccccttcctctggttgaatgtttccgacttcagggaagccggcgtccggagagcccagtggaaggatacggagatcccgagccttctgaagttcgctgacggctgccgcaaacagatgctttcgctccggaggcagctgatggtcgctgggccggtaattatcgttctggcgctgcgggagggtggcgggctcgcggtcgcagtcccgttggcgatcgtcatgttcctcaatcagtatctgctttgctcttacgccacggcgcctggcggcaaggccgaacgcgccgtgttggatacctgatcgcatcgaagcgccatgagatccgacgttcggagccggcgcctgtgtcgaaatcgtccccccagcaccgagatcataggcggctttcatgacagcaatcaccgacatccctgcctctgacgacaagcgggtccgccgcatgaagcgctccgacctggtgtggttcctctgcttcttcgtcccggtgctggcactggtcatttacgggttctggtacgtctggggcgaatatggcctcctgccgtgggattattcggtccgctacgaagccatgccggcaaagcggatcgtcgagatgatggccgttccctttgaagcgctcgacaaggagtttctcggtcgcctcatcggaagcacggtttgggcaattgctatccccgccctttccctctccgctgtcgtggcactgtgggcctgggaaagcaggtacggcaagcctctgcgggaacacctgatcctgctggtccttatggtcttcgttctgagctcgattccgatgttccagacgcaaatggcggtaagcgaagaacaggcgaccatgaaggcaattcgggtgacatctgaccagatccgcgacgccctcaagtctgccggcatcgacgcctcggggatcccacatccattgcttgcggcatccaagccgtgaggcgagcgttgggcaaatcgtccgcgcatgcaggccgtggatgggcaccggtctaggggttgccaccagggatcagttccgcccatcctttgctgatgaaaacggtcaccttcaagtccatcgacacctacctcatcaacgaggctgatgccttcctggacgacctccagtccaagcatggcatcagcttgccactggtccttctcctcggattgagctcgctgatggcattgtttgtcctgtacgcaatcgttgcggcggttctgctcggtctgacgatttggacagtcgtgatgttcgcattcggaaccttcttcatcggactcggctggaagagactggcgagccgatatctcgcggatatccgcggggattggacggaggcgaagacccggaagtacgcgggggtcgccgtttacaatcgtgagaacctggcatttcttcgtatggcggccatctgtttgaccccgcctatgatgctctgcgggctgctgcttggaggggagtacgcagtcatggtcccgatcatgctcaacctgctggccaacatgtatttcgcctgcgccttcccgcggacgccgaccaaccggacagagcatcggcttgcgccctcgccggccgccggctgatcgaaaggaaacgcgatgggctcgaactcgatgctcggtttcgtggatggttggctcgtgaaccgaacagatcgagccatcgctgtggttcaggaacgcgccggtgtatccctgccgatggtgcagatcgggttcgttctggtgagcgccgcgacctactggttcttcatgatccacatcgccgtgcatctgggcgacgtgctgccccgctgggctgcgatcgcatcagcg

SEQ ID NO: 4094 - DNA, 23969 bp, synthetic construct
  misc_feature 1..23969: note = Synthetic
  source 1..23969: mol_type = other DNA
  variation 20597..20615: note = note, n is a, c, g, or t
ataaatacaattgaataaatacaattgaataaataggattgaatagaaatttcaatgagagattttaagattattgaatgtctgcatgaaatgagtgatttttacggggtctttttgatggtgattattttcaagtgttgaggagacatcgagggcgtaaacgtttttctgaaagaaatagggcaatttttctacagtaataccgcctgctagtacaaggttctgttttagtgtcaaccagtctgttaaaaatgaagtctctaatggatgtcctgttcccccgtaggcgtttggatcgtagctgtctaggagaatagcgttaagaatgtgtttattttctagaacatgggcgtatgatttctgggcggtttggaaggtttgtatgtttttgagacgaaaggccttccaaattataaggtgatttagcgtttttttgagtgattttaataattcggacggttctgaaccacacagctgcacgccatctagatcggctatacgtatcgtttcaattagtgtttctaatgatggattgacaaaaacacctataaatttggggcggtgctgtgtatgactttgcgtactattatcattattactattactattatgagaagggagagagaggttttctttaagtgaccgtacttgggttggggtgacgtagcggtgtgattttttataaaagataaatccaatataatcagggttatacgtcaatgctaggttaagcgaagagcgttctttaaatccacataatttaatcttcatgacgatagctgtcaatttttataacgattggggcaatctctttattaagagagttattaggatacatggatgtttatatatttgagataaatagtatttctgggcatcattttgtatcattgggtgtctttggggcgatctttttattttatgaagaggaggagcactcgttgttaagctggggggtgaagtaggtttgtgacggctgctttgcagtcagattgtcctagaagtgaagagccaatgagcgcaccagcaaaatggtaatctttaagttgttgtatatcgtgatatgtcttaattcctgattcgctgatgattggaatagccatttgtgaagggaaatgtttagtgatgtggtctcttagaccagttaaagttgcgaatgtttcattcatagtaacttcaaatgtttctagattgcgattattgatgccaatgataacttttgagctaatattcatgttttttatacttgttagcgtagcaatcccttcatttaggttaaatatttcaataagcggagtcagaccgagcttcagtccataagcgagcaattctgctagaagtttttgcgagagaatgcgcttgataagcagaaataaatctgccccagcaatgtaagcttcataaatctgataaggatgcacgataaaatcttttctgagaacaggcacggctaccacctttttaacagctctaaggtggtctagtgatcctttgaagaaatgcggttctgtgactacggaaatagcatgtgctccaccgtcagcgtaagctttagctatacgactgggatggtaaggactacggataattccttttgatggcgaagcgtgtttgcattctgagatgagtgtaaatgtctgagctagcgttggcagaatggaaataggcttgcgatttaaaggtggaatgcgggcccctgcgatctcccaatcatgccatttcttcgcttcgtgctgccgtgttgttgtgacaattttttcaagaatattatcgctatgatttatgctggcggacatatagaagagatgatagttggcaggcttattagtaatattgttaagatattcgtttgagcaggtttgttaagacattgcctggtcctacttctatgaactttgtctctgggtgggtttgcttgatatttaagatggtttcacgccacttgactttatgggtgatttgattagcgagaatgtctttaatgctaggttcatcttgcgggtaaggttgtgctgtgagattggcgtagacggtatgattgggtgggttgaaggtaaatttttcaaaaaggtctttcatggtctctaatgcttgttgcatgtaggaggaatgaaaagcaccgcttacttttaagggaatacatttgcgtgcgcctgctttttttagaggttcttcgagggctgttaaacttgctacttcccctgataaaatgatctgctcggtagcgtttaaattggcaattgttacaggggttacaggagtaacaggatgttctaaatgattactttttgctaaaacgtcttcaattacttcttctgttagaccgagcactgctagcatgccgcaaggtctattagcagtcgttcccgcttgattcatagctagcccgcgtgctttaacgagtttaagtccaacttctaaagaaaatactccgctagcgtgaagggcattgtattcacctaagctatgtccgatgaaaatagtatcacggtcattggtttcagccttgcgtttgaggttgcttagggcattgactaagaatagcaagggctgtgtgtattgggtttgattgagagtggctgcattttctttagctagacagagtggtttaacgtcataacctaaaatatcattggctaaggctgtttcagtgggaaatgagtcgaagaggtcggcgcccatacctggttgttgcgacccttgtcctgggaacatgataatggttttcatcggtggtcttcattcaatttttataaaaaggtggttatatatccattaatacaggcataggatgctataagtgctatggcatgtgctaataaaatatcaatgtttataaatactgccatcgacgatataaagaatatcttcagcaatatttttacagagatcgccgacgcgttctagtcgttggataatacgaataagagcgtaaaaagtatcaaatgagttagattctttttgaaattgggaagcaacggtcttaatggcattgtcgcgtagaagattaatacgggcgtcgttttcaatgacagcaatagctttcttagtgtcttcttctagaaaggcttcacgcatgagcatatgaattttaagggtttcattggctagatcacttagaaaatctttggtgagcggctgctctttatttagttcgataagttcaatgttatgactagcaatgctcatagcaagatcacccatccgttctatatcgttattgattttgatgagcatagtgaggcgtcttaaatgtttggctcgaggttgatgaatggcgattgtttcaatgcatttttcttctaaaatgacttcaagttcattcatccgtttttctagtgtatggatgacgctgctagacatatgtctgtcgctagcaaaaaatgctttaatgctctgggctagcatcgtatgggaatggtctagaatctgttcggtttgattcatgacgttactaagtgatttttctagcaaaaattgttccatgtgggcgtgcgaatgctaaggggcagcggttaataaagaaaaacggtacttgaaaaattaaattttatcttaaaatggttgctatccgaatcgtcccataagataggcttccgtccgtttatcgctaggcacggtgaacatgatcttagttttattgtactcgataagttcgcctaagtaaagaaatgcggtataatcggagatgcggcttgcttgggcggtattatgtgtgaccatgataatgggaatttctttttttagcgtttgtaacaaattttcaatgcgtgtcgttgcgatcgggtctagtgcagaagtcggttcgtctaggagcaggacatcgacttgcatagcaagtgaccgtgctatgcagaggcgttgctgttgcccgcctgagaggaaagtgcctcgttcatggaggcggtctttaacttcatcccataggaaagctttttttagattttctataacgatttcatttttctgttttttattgaggcgcattcctgttaggatatatcctgagagcacattttgaaaaatggtcatattgggaaaggggttaggacgttgaaaaaccatcccgatgcgctggcggacggccattgcgggtagggttgtgatgtcttggtttcctaacataagtttgcctgtaacgttagtactttggtctaattcgtgcattcgattgatagcacgaatgagcgttgatttgccacaccctgagggtcccatgatggctacgagtccttttttaggaaaattgatattaatatttttaagtactttagttgcactgaaataaacgcatagatcggttatagagagaatggtttctgcgtgtgaaaattgttgtgaaatattttttatctggggacgttttttagcgatagacggtttgcggatagaaagaggtttaagacgtttcatcttatgaaatacggcagcctgcttctgtgacgggtcttttttatttaggttgcttagtttattaggcgtagaagtttctatcatggtgaagatgctgtaaaaaaatcaattgtagtcattagtaaaaataaagtttattattaaaagctatcttttcttggtcagtaacttggtggtaaaattaacaacgataataaaaagaaggaggataaaagacgctccccatgcggtttcttgccagttttcgtagggactgattgcaaatttataaatagtgaggggaagggtgctggcgggatcggtaacggttgttggaatgaagggattgccaaaggctgtgaaaagaataggtgctgcttcacctgtaacgcgagcgagggcaataattatccctgcggcgatcccaggtgttgcaatcggtaatacgactttcataatcgttttaaagaaagaagcgcccatagcaaaagcagcttcgataacttcatttgaaataagcgagatcacttctacagttgagatgataataataggaaacatcatgaaagcacacgccacacttcctgctaaaattgaaaatctgcccatcggagcaacgatccaaatataaataataagtccaacgacaatagcaggaatcgactgcaaggcactgcacgagagatagacccattcacttaatttcttctttctattaaaagcaatgtacgttccagcagcgatagcaaagggcgttgcaataaaagtagcgagaaatgtaatagccaccgtgcctacgatagaattgacaatgccgcctccttcggtatcaggaggtgcttccgtagtcgttaaaaaatcccagtctatagctggaattcccattttgacgacatgataaacgattaaaaaaagcggtacgagggctaagaccgtaaaaaaaagcacaatcccattaaaaatatgatttttaatgatgcgataacgggtggcatttctttgaagtgcgaacatgggaccttggcaaaatacagacgaatggaagatagcgttattttttataagcagtggataagtaatagaactttcattacttaagtatagcacagttcttaataaggttagagaatgaagtgttttataatgcgtctggcaaggtaagataggacaatagaagagataaggagcagcagtccaatgccaataagagcagcgtagtagacattgtcagtcgcttcagcgaattcattagcaatgatactagccatcgtgttagtcgggcttaggatatgggtagggaggtgattgacgttgcctatgagcatagtgacggccatagtttcaccgaatgcgcgtgcggtggaaataagaaatcctcctataataccagagcgtgcgtaaggtaaaatgacatatctaatgacttcaaatcgtgtggcgcccattgcgtatgcggcttctttgatatgagtggggactagtgtaataacttctcttcctagtgtggctgagaacgggatgatcatgaaagcaagaacaatcgttgctgttagaaaccctgttccatagggaatagcacctataaggatttgtagctgctgcatgatcggaatgaagacaaaaatcgcccacagtccaataacgacagaaggaatagctgagataatctcaactagattagcaataatgctagcaagtctagtgccgtgtatgatctcgcctgtaaaaatagaaatagctatcgagaatggaaatgacagaatgagggcaaggactgatgttgctatcgttcctactagaaatacaactccgccgaattctcttgtttgcgggtcccaagtagcgctccagaaaaaactaagccctgtctcattaaatgccgggataaagccgctacttaatgtcaataatgaacctatgataagtaccggagcaaagcaggctgctatcaataaaattattctaaaaaatgtgtcttttacttgcatagcaaatgccagagaatcgtttatttctgcaaggctttatcgaggggcgctattaataagaaaataaatatctgtaaacaaacaccagcaaaaaatatctacaaaaattgatctgcaaaaagaatatctgcctgagaacatctgcgtcatagtggttttttgttaaatttcatttgcttaacaatgtctaaagccacttttttagcagttgtagataggggtgcataatgaaggggttgtgtttcagattgtccgtcggtgagcatccaggtgagcaggtttttaagtgcctgtgcttggtctctagttctatttaggtaattttggtcttgataaacaatgatccaagtgaatgtagatatagggtaaccattagcgcgcgtaggttgttcgctaagtgagatgcgactgtctttggggagttttttagcggcagcgctaacagtggcgaccgagggagcaataaattttttatcagcattttcaattgcaataacaggtaatttagcggctagggcataattaagactgatatatccaatagcccctggaatgcttttaacctgtgcggtaacaccttcattgcctttagcgccaacactgcctttaaaccagtttagcgactttcctgtgcctaattgcttcttccatgcagggctcgaataggcaagaaaaccagagaaaacagcggttgttcccgatccatctgatctgtgaacaacaatgataggttgattggggagagaggcatttttattgagggcaattagtttgggatcattccatttggtgattttacccatgaaaatttctgctagcgtgcttccgtctaggttaagttttttggaattgttttttagattgaatgtgactgaaacagcgcctagtacaatgggaatgtggagtgctttttgtcctttagcggtgatttgagctaggtcatcgtcatttaaaaaggtatccgtagcaccaaattcaatgaccgatgctttaagttggcggatgcctccacctgaaccgatggattgataattgatcttagtccccgtttctttgtagtaacggttaaacattttagcgtacagtggatatggaaaacttgcacctgctccaatgatgtttttgctttttacttgtagtgacgaaggtacaagtaaaatcgtagttaagaagagcagcactgcatttagagcgtacaatttcttagagaataaagtcattttaattagagttattttcatcattgataaactcaattttgttaaatagttatttatttcaagtatttatttatgataggtagtgactagtaataatctaataggagaatgatagaaaagcaaggcttttaaagatgatagaaggtcaaggcttttaaatttgtggtttaaaagcaatgtagcagatatacagaattacaactgaggtggtgaaattttgggaataaagttttgggaataaagaacaggctaaagatatgaggttctagtgaaagccggtactaatatttaaatgcttttctataaaatacttttctcatagcaaagtcatttataggtacccacgcatgataaacaatcgaagaacaaaaagcaggagtagagaggagccgctctactctactcccattcgcggcactacggcggctactaccttatcataaggtacctacaatccttattacttatattataactcttttttcccgtatcggcaagtagttttatcaattattttatttttatcaattattttagctgcaattattaattacatgcttaaaaaatgaattacatgcttaaaaattcactcaaatagctaagtttttaagcttgatagctaagtttttaagcttgtttgtccttagcaagttaacttgcagaataattttataagaattgtcgtcaatgtataaaataatgcggttttataggtgaaaatcgtgaaatagtacgctcaattgaaggattgtagcgtaattatggtgtgagaattgtatttagggcattgagaagtgtagctagggtgtaaaaaatttagaaaaaaaatttaaataggtatcaaatttcaatgaaattcaaaaaatcatcaaatttagaaaagttgattcaatgaaactcaaaaagtcaccaagtttagaaaagttgattcaatgaaactcaaaaagtcatcaaatttagaaaagttgattcaatgaaactcaaaaagtcaccaagtttagaaaagttgattcaatgaaactcaaaaagtcaccaagtttagaaaagttgattcaatgaaattcaaaaagtcaccaaatttagaaaagttgattcaatgaaactcgaaaaatcatcaaatttagaaaagttgattcaatgaaactcgaaaaatcatcaaatttagaaaagttgattcaatgaaactcgaaaaatcatcaaatttagaaaagttgaggtgaataaaaaaattttaatagctgattaataattgaattaggattgtgattgggattgggttaaggttgagattgagattgagttaagattgagactgagttgtgattgggattgggtcaattaattaattaagattgagactcagattatggttggaattggagtggaattagggttggaattatgatttgaattggattgtgattgaaattgggttaagattgagatttagattatggttggaattggagtggaattgtggctaaaattatgatttgaattagagttgtgattgaaattgggttaagattgagactgagattgagttaaggttgagactgagattgggttgtgagtgaaattggattgagattgagttttaaataatttaagttattgaaatagataaaattgtaacgaaaatgtaacgaaaataagtgtgactgcagtaaaagtaacaatatatcaatgtaaataaatcatcatatatcagagtaaatcataaaatattagcttaaatcataagatcttaatgaagattataagttataatagtaaataatgtgcagattgctcactaatactaattagcctatttaatgctggaatatcaatattgattaatttattcaaagttggaatattgacgctggttaatttatttaatattgaaatatcaatgctggaatatcaatgttgattaatttattcaaagttggaatattgacgctgattaatttatttaatattgaaatatcaatgttggaatatcaatattgattaatttattcaaagttggaatattgacgctggttaatttatttaatattgaaatatcaatgttggaatatcaatattgattaatttattcaaagttggaatgttgacgctggttaatttatttaatattgaaatatcaatgctggaatatcaatattgattaatttattcaaagttggaatgttgacgctggttaatttatttaatattgaaatatcaatgctggaatatcaatattgattaatttattcaaagctggaatattgacgctggttaatttatttaatattgaaatatcaatgctggaatatcaatgttgattaatttattcaaagttggaatattgacgctaattaatttatttaatgttttaataaagaaaaatttaaagaggacttttcaatgaaaaattcgcaacacgatgaaactattgctaagttgccaatagacgaacatgatgaaggcgataaagtactgggtctggatattgggatagcatccgtagggtggtgttatttagatatggaaaaaagtaacgaacgtatcgtagggataggatcacggacatttgcagcgccacaggacggaaaatctgaaaaatcagacgcccaacaccgcggcgaagcacggcgaacaagacgtaccctcagaagacgtaaaaaccgtatgaaacacattcgcttgctattagaaaaatataagatcgcttctaaggaatttctaagagcccactatctccataagcctaagcgtgtatctgaggatattgtccccccctgtaagctaaaagaaatacggagcggagcagagacatataaatataacgaatatgaaaatccctggaatttgcgagtcagggcactgatcgaaaaactttcatacgacgagattgcaattattctgcttcatctagccaagcaccgcggcttcaagtctatgcgtaaaaccgaattgaaagatatagaagacacaaaaaatacagaaaatacagaaaatacagaaaatacagaaaattcagaaaatatagaagcgaacaatggaaacgattctaacaacaaaaatgactccaacgacgaaaatgaatccaacaatcaaaacaactcttctggtaaaggaaaaaaagacgaacaaaaaattcttaatgccattcaaggcatgcatgaccatagagaaacattacggaagcaaagacaagagaagaatcctgaggctcatcccccaacaccagcagaactggttagagcacttagaaatgataattttgctcttaatatccgtaatcgcctgggcagttatgtcggtgtcttcaaacgtgaatggattgtcgaggaagctaaactcatcatcaaaagccaacggaaacttaaaaatgataaattgactgaagcgttcgaaaaagcctatttagaaaaattagaattttttaatggcgttcaagacgtttatcatatggtggggtattgccagcatgaaagtatgcaaagacgcgggccgcgccaaggattttcaattgaactctttaatgtctatatgatgcttaataatatcaaattagacggaaaaaacctcacagatgagcagaaattcataatctttgagaaacttactgagcagaaaaatatcacatttaaaggactccgtaaactattcaaattagataaggacgttcatattaattttaaagaagataaaaatgaaaaattaaatagttttgaaggatatcatgacattgaaaaagcgtttactaagggtaagaactctactcaatgtgctgagatatgggaaaaactcaatcctatgcctgaacttcttgaatttttaaaacaagaaggtaatgacattaaatcgtgggatgactttacgcgaacaagccgggaattatacaataaagttagcgcagaaactgataaactgtccccaatgttaagcattgcgttgaaaattcatactctggatctcatcgcagaggctgttacgtactgtaaaagtgatgacaatatcgagaaatatctcaaaggagagagtcctacgtggaaagaggcacataaaggcgatcaaacgccaccattctttaaatttttagaaaaattaggtgtaacccttacagatgacgcgaaagataagattatagaacagatatgtactattgaaatgtccggtacagccaatctctccaccaaagcagcacgaaaattgactccttaccttatcgaagaaaatatcacttatgataaagcggttactgaagtttatgggatgtccgagagaaatgtaggaacacttaatataattccgcccctcgatgagtatgaacgcactgagattactaatcccgttgttttacgggcgatttatcggtgccgtgaagtcgtcaatgcgatcattcgacaatacgggatgccgactaagattaacatcgaactcgcacgtgaactcgcccatggcaaaaagaaacgagctcagatcgagtatgttcagaataaaaataaaaaagataaagaaaaaattgctgaagaatttcaaaataaatttgacggagagcttaacaaagaggcatttcttaaatacaggctgtttgtagaacaaggcggtaaatgtatatacagtgggcaaaaacttcatttagaaaatctacttgatgaaacggagatcgatcatatcattccttacagtcgttcttttgataatacgttcaataataaagtgctctgtttgccatcagtaaatcaggataaacgcgatcggactccatttgagtatttcggtcgtgataaagaaaaagaagaatggaaagagtttgagacacgtgtcaaggtgctcttgaatgataagaagaaaaataaagcgaagttaagtcgtctcttaaaacagaactttgacgaggaaaaagaagaaggatttatgcaacgcaatctaaccgatacgcagtacatgtcacggtttcttaagaattactttgaaaaacacttaagctttggtgatgctagaaaagacagtgtgaatgttatcgctgttaagggaagagttaccgctaatcttaggagaatttgggggcttcaacaaggacgatacgaacaagatgaaaaaaaacaagaaaataagacaaaacaaaaagataacacaaaacgagaaacaggagacacccatcacgctatcgatgccgccgttatcgccgcagcaacgacacgtaatatccagcgtgtttctaaatattatagggataaagaagaacataaacttaaaacgggaaagaaaggtaagaaactctcatatgttcctaagccgtggaaaaattttacaaaagacgttttagatcataaaaagaagcttacggtttcacggtggtttaaacctaaatataaggcggcgactaacgaagagactatttataacgaagaggagggagatgatggcgtattactggtttgttataagttcttaaaggatataaagggtaaggataaaaagggtaagagtaatcttaaaaaaacggtagtcgctaaaaaatatgaaaaagtggctaaaaaagataaaaaagtatatagtgctatagaaaagcattttgagaataatgactataaattcccgcatggatgtttcgcctggaagtcggtagagggtaatgttatagatgtaaccgatgagtgggctaaactctcaaaaacagatcaggaacagaaaataaagaatgagcgtgttaacgttattcgaaagcttaaaataaccaaaaggtcagactcacacatgccattacgtgagcgtggatacgcagcgtacggagatatgctgcgcatcgatgtttttgggaaacttaataaaaataaatacgagtactacgccgttccgctgtatgctcataatgttaccgaggaaagactcttttctaaagcctgtactaaaggaaaagaagaagactggctagagatggacgatagctttgagtttttattttctctgtgccgtgatgagatgatagaagtagtgcgaaaagatggagataaaaatttcttatttagagggtattacaaaaaatttaccagatctacagctgcaataaatattgtgggacatgatcgttatactatccatgctgctgaatttacggaagactttaaagatcggcttcctgagaaagatgaattcgtgttaagaacaacatggcttaataaatacgataaaaaaggagaaaatgaaagacttctcgataaagctgggctaatgactagtattggaattaggaccgctaaactctttaggaaggttaggatttcggttctaggtgatagagtcgaacgcgtaaaatgggaggaacgacaaccgcttcgaagagggcagatcgtcccttcatatcaaagaccagaggatgtttgatgacgtgacaaacggtatgaaaggtttcgcaacatctttcagattaaacgggttatggtgagttttttttagggggagagattattataagatataggtactcgtgccgatactttaaaagtaaggaattagggcatgagttggcgaactattcttatcagtacgcccagctatctaagtctcagaaataggcagctggtgatcgcacaggcagacggaaatgtgagcgttcctgtcgctgatcttgcttttatcgtcatcgagcacaaacaggtacggatgagtgttcctttactctctcatttggccgaagaacgtgtcggtgtcctatttttagaccaggaatacctgcccgtaggcgtctatcttccctataatggctcgttcgagccacttagacgctatgaactccaggctaggctctctaaacccaaacgaaagcagctgtggaagaccattataacagcgaagatcagaaatcaaaggcaggtgctcgattactttaaaatagaccatcagctaagcaaactactcaaagacatcaagagtggcgatgtgagtaatagagaagcggtagcggcgcggcaatactgggaccttatttttacggggtcatttctgcggggagagcgtagtgattttagaaacattgctctcaattatgggtatgcgatagtacgggcgctcacagcacggcatctggcaggacaggggtattttacgccgttaggcattcatcatagcaatcggctcaatagctttaacctagccgatgatttcatggaaccgcttaggccttttgtcgatatgcgggtaagcgaactgcttttaacaggaatgctgcgttcaagcgatatgggagttaaatttgcgctcacaccccatcacaaacaggcgttatttgaaatactggaaagtgaggttaaactgggcggtgaagtatttaatttcctcaaaggaacggaaacaatgatcgagtcttttcaggatgcgttagcaggaacaggaaaattagtcattcctggattaaatgtatgagtggatatcggtatatgtggacgatagtgatgtttgaccttcctgtagtctccgatcagaataggaagttagccacacagtttagaaataatctcgtgaagagtgggtactctatgctgcagttttctatttactctaagatctgtagcagtgaaaagtctgctgagaaagaaatcaggtatattagaaggttagttcctgaagaagggcatgtgcggatcatgaaggttacgcataaacagtatgcgagtatgaagatcctctcaggagagaggaaaagtcatgaaaaacactgtggaagacaattatttttgttcgaaacgtgaattttatgaatttttttcaaaaaagtaccttagatagcaaatttctaaaaaattgacgattaaaaggtaggtcaatgttaaaaaatttgtttcaggtaagaaaaaggcatgaaaaacattgttacagccagtttttttatctagaatgtggattttatgaatttttttagagaaacattgaatttagccattctttaaatcttaatttcaagggtagtgtaaggaatcggtactggatttttttaaaaaaatttaaaatctagggctcaataagccttaaattttcatttttttaaaaaaatgaagacgatattaacaagcatttttctttaaaaaaggcttttttctcagtaaaaatgggcataaaccccatgatataagcaattttttaaaggttactattatatcatgggattgtttgtaggtaccctatgacgcattagaccgctagtgctgtgcattagacattatatcatgggattgtttgtaggtaccctatgacaattaggagcgtatgcgaaagggcttgaaaattatatcatgggattgtttgtaggtaccctatgacaattgactcttcaaaagccgattgctcgtaattatatcatgggattgtttgtaggtaccctatgaccttttgacaagggatataaccaccagcaaaattatatcatgggattgtttgtaggtaccctatgacctcttcattaaaactttatgcgttaacgggattatatcatgggattgtttgtaggtaccctatgacgctgatcacttgcttggtactctgtcgataattatatcatgggattgtttgtaggtaccctatgacaaagcaaatcgtcatcggagtgttcaaaatattatatcatgggattgtttgtaggtaccctatgacagattttagcaacgggaatgttacagggacattatatcatgggattgtttgtaggtaccctatgacgcatggagacattactaaaattaaaacggtattatatcatgggattgtttgtaggtaccctatgacatgtttcaattcctctgcaatttgcttttcattatatcatgggattgtttgtaggtaccctatgaccctgcattgtcgctaattcttttgttaaaaattatatcatgggattgtttgtaggtaccctatgacactaaaacttgtttatgtccgcatttcaaaattatatcatgggattgtttgtaggtaccctatgacgctaacatctagaccacagataaacacagattgagttacacgaaagaaactaaccgcagataaacacagatgaacgcagattgaattttataaaaacaattgaccgcagatgaacgcagataaacacagattgtaccgttcagcgaattaatcgcagttcaatgcaaattaaatttcacgaaagaaaattaactgcacagatgagagcggattgagttttataaaaagaatgaaccgcagataaacacagatgaacgcagattgagttttataaaaacaattgaccgcagatgaacgcagattgtaccgttcagcgaattaatcgcagttcaatacaaattaagtttcacgaaaggaaattaactgcacagatgagcgcggattgagttttatgaaaacaattgattgcacagatgaacgcggaacaacacagactgagttttctatgacgaaaaaagatcggaagtgaaagcagggttaattgtatcatgggattttttgtaggtatcctatgacagaaataatagtaatattacctttaccattcaagttctagactaagatatttttatattattttctaccaaattatatataaaaatgttaaaattttactaaaattcgttgattgatctaccgatttttaatataaattcattcataaaaatacttccatttttacaaattccaataattattaaagaggatgcagtatgaacaattataaaaatattccaaacctagaaggcaaagttgccattgtctctggagcaaatagtggaacaggttatggtattagctatcatttagcaaagcataactgcaaagtaatcatggcttcccgaaatgagagcaaactgcacgatgcaagaaaaaaacttctaaatgaaattcataatgccacacttgaaattgagattgttgatttatcaagcctagatagtatcaaaaatttttgcgatagaattaaaagcaaatataaaaaaattgactttttagccaacaatgcaggcggtggtaattcaaagtatttagaaactgtagatggctttgaatacacttttacaatcaattacttatgccattttgctttgactacacaactattacctgttctcaaggatggaagtagaattgttaccttttctagcattggttataaacaatttttaaaacaaaagctagatatcgataatttgatttgtaacgattcggctaaatttaatcagatgcaagaatactgcaaggcaaaactctgttcaatactgttgggtgtgaaacttcagagtgagttcgaaagaatagggtcgcattcaatggcactatcctgtcatccaggttatgcgagaacaaacctaatgacgaattcaaacaatccaatagttacacgcatattgggaatgttaatgaacaccatatcaagcgtgtttaaaatgagccatagtttatatgacggtgcattacctgcaatcgaagcacttattgctgataatgttcagcctaatatggtttactccccaaattcaaaaaatgaatttacaggtactcccataccaagagaaattgtccatacacactatgaagacgaagacatagataaactatggattaaatcacaagaactattaaatataaaggttagcaaatacttataagactctttttgcattgattactacaaaatttgagttttataaaaacaactgaccacagataaacacagattgagttacacgaaagaaactaaccgcagataaacacagattgtaccattcagcgaattaatcgcagttcaatacaaattaagtttcacgaaaggaaattaactgcacagatgagcgaggattgagttttataaaaataattaactgcacagatgaacgcagattgaattttatatgactatatcatatcatcaatgataggcatattccatgactgcccagaggtcatccacaattaaatcatttcagcaccaatcataagtgctccgtggcaaagccatttaacgaatcataatccaacacaacttgtaggaataggcgtcacatattgacgattggcacaaaccaccgttttaagtcgtgggtactgatcatcaggggtgaattcccagatattgccatcccaccctgtacttgtcgcagttgcactttgaagtaccattgttgtttgtcctgttagattggctgttataattgtagctgtatcagaacctacgccttttttatccgtctgttcagttcctcctaccgttaacgtagcatcactattaaagtaggaagctgttacgccattaccagtaggaattatattgggcgggttcacagggtctactactccattagtaccgataaagagtcctgttcttgttgttcttgctcccgaaacactggcggtcgcataggcattggcaatcatagaactatcattatctccaaccaggcctccaataacattttctcctgaaacgcttccaattgcataggcattcgtaatcatagaggaattataattccatccagctaagcccccaatactagcacctgttcccattacggtaacgttcacataactactggcaatcgtagaagaattgcgattccatccgactaaacctccgacaacatttctacctgaaatattcccggtcgcataggaattcgtgatcatagaattattatcattgtctccaaccaagcccccgacattaagacctgtccctgaaatatccccgttcgcataggaagtactgatcgtagagttgctattccatccgaccaaacctccaagacgagaacttatccctgaaacagtgcctgttacgtaggaattatggatcgtagaaccatcccaatttcgcccgaccaagcctcctacattcgaacgtcctgtaatcttaacattgatgagggcgcagttttgaaccgtggctctatttgaagtgatgcccactagtcctatatcatcagtagtccttctattaatataaagattagcaatctcattgttctgacagtcaaatgtgccttggaacctagcactatctgtaccgataggactaaatcctgagccaccgcttgtttcactccagggcgcttcggctatgccaaggtctatccgctcagtcaccacgtaataacctgattgataaccaccttcattagcattgactaattcagcaactaagtttaactttctatcgttattgatgatataaggatcattttctgttcccattcctgaaagacctgctgctgtactacaagttgacgtaattgccatccgcagtgtaaaagcctcaatatcagtattaccctcttttaaaaccagagaaatatctattggatcgcttgctacatatggatcagtagtaggaatggatgtaggcgtagtcaatgtataaggtgttgtacttagtattccgcctattaggacttcatatggcagtggaaatgaaaacatagagcattcttttaaagtacccatgtaggtatcagaaatgtcttctgataagattagctctgttgcaagagcacctgtacttccgccaagtagttttaattgtatcaaatctcctaacattaagtgtacataatactttacagaagtactttctgcggaagttagggtaaaggtgagtgcttcattgtttgtaatatgggtgctagagacaccgtcaggattgagttcaatacccggcaaggttacggtattgccttcgccgcctgtgattgtgtaggttgtaggtattgtgaaagttagatcttgattaaacccatcttccctatttttaataccacctattgtgatgatattatcattgaccgataaaatagttgcctctttgtaagcgttgtgacgttcagcagcaaaggcaatgtccgttactttgagaggagcaggtgcattaagattagcgttgctcgttgttcccgtgcaattgacgatgagcgtcgtagaagtaatgagagttatgaaagcaaaaatagaaagcaggacggttctaaatttgcaaaaaagtaggggggggggnnnnnnnnnnnnnnnnnnngggggggggggggtagcagtcaattgttgtgcccttccgtccacatcctccctgttcatgttatgaacattgagatacgatttattcgtttctagtgttgatttatgcagtgtattcataagtttttattcccacatacattaaattttaattcattgattaatcaatgggttgatttttttataattgatcggctaagtatttatatttacaaattcaatataggtattgtactattaaatgcagcctattacggcaaaatttataaaaatagctatttttgaggctatggttttaaagaattgttttgttctttattgtctttaatcgattataaagtataagtaggcacttgaaattcgggtcaatatttacaggttcggtgaataaattgatagcattgagatggtgttaattatacgtaatcatacggcacaattaagactatattataagactatattacttaaaaaaattatacaatgggtaaagaataaacaatgttaatatttactaggtcagtaaataaattgatggtatgaatacaatataagactgtaaaactataagaaaactataacattagaatacttgaaaaaattgatatcaagagtggagaagacatgatggaatacgtaagttttatggatatctttaaggtatgtataggcccttctagttcgcatacattgggtccttggttagcagcaaaacattttatggagacattgataagtaaatttgataataaccaggatcaagcaaattatccttatcaaatcgatgtgaaattattaggttcattggcaaaaaccggagtaggtcatcaaacggcactgggtattagtttaggcctcatacaagaagacccaggaactatcgcagcaaagagtatccagcccaaaatagcaaaactcaaagaaagcagcgccattttgtttaaaaacaatcaatgtctcaaattccacccacaaatgagcattgaattcaattttaaagaacaaacgcccgtacatcccaatacacttgtgttaatggctaaaaataaagacggaaagattgttcaccagcaagaatattactcaatcggtggtggcgaagtactcctagcagaacctgtcatagaacaatcccaaccatcaacagatataacccattctaaaacgaattctcccacccaactaagtggtgaccagcagaataatataaccattgatcctaaatcacgcctcaatcaattacaaagcattcgcgctggcaatcaaaaaaaacgctccttcccctatccaatcacccacggtagccaattaatacagcatacaaaacaactcaaatgctctataagtgaagttgttcttatcaatgaaaagtcatggttgtctgaacatgaaattaccgaagaaatagctaaaatagcctggacaatggtagaatgtattcaatatgggcttttttctaaagaaataacactcccaggtggactaggagtacgcagacgagccagtaacatggctaaacaattacttgcaacagagcctgaatctgtaaaaaaggctatcgaagacttgtttgcaacgggcgcagaagtagacccacgcacctttcttaaagcaatgcggcaattgacattgcctgaacaaaaaaatactaatcggtggttgtccgcctttgctctagcagtcaatgagcagaatgctgctttcgggagagtcgttacagcacccacaaatggagcagcaggtgtgattccagctgtatttatgtattacctttgttttgaaaataaaaatgccggtgaactggaaatacaaaaatttttcctctgcgcatctgaggtggctagtttatttaaaaaaggagcaacactttctgctgcaatgggcggttgtcaagccgaaataggtgtttcttctgctatggcggcagcggcgttaacagaattaagtggcggaacggcagcacaatcgctggctgccgctgagattgctatggagcatcatttgggattgacctgcgatcctatatccggtctcgtccaagtaccttgtattgaacgcaatgcaatgggagctgcaaaagccatcaccgcttcacatctggcattgatgagcgatccttcacaactcatcgtaaacattgacgatattatcaaaacaatgtggcaaactgcactggatatgaaaaattcttataaagaaacatcagaagcaggtcttgctaagaacgtttcggttgccctaagcgaatgctaataaaacacgaatgctaataaaacgcgaatactaataaaacacaaatgctcattaaatgtgagtgtgagtgctaattataataataaatcatgtctcaaagaagagaaagtagccactattaaggattttcacaaattggaataatagcatcgataggctgctcattaggacaagcgacgtcattgagtgtggggtacaaaccttttataagagcccagacggcagtattccatccttcatatgtataaggaataggattgccggcatctaggatatctctataattgtcgttaataagtgtaagttggtcgcttgtatagccgtaaccagcaccaaagctagtggcttgttgggtggtttctatattccagtaagactgacttgtaatatcaaggctattattaccactgcctataagacctcccgtattagtaataccagtgataagaccgagtgcataagaatttcttataaatccattgaaattaaaaccaaccagtccgcctattacggtaaaacctgagattgtcgacgttgaataagaatttacaataagcgcatcattgttctgacctaccaatccgcctaaacgggtgctacggagtcctcctataatatttcctgtagtgtatgattgagaaacggtagcctggaaattttctcctatcaagccaccaatattctgatttcctgtgataacttctccatgagcaaaagatttttgaatatctccccgtgaaaaactgcccacaagccccccaatattctcagtccctacgatagaagcacgataggaaaaggacttttcaatagtgctattaatagcactccccgcaaaactaccaatatttcgtaaccccgttattttagtattgataagaccacaatttttaatagtacctgtgataagaacaccaaaaagccctaaataatgcccatcaatattactgctgttattggtattactgatagcaaggttagagataaaatttccgcgacagtcaaatgtgccactaaatgcatttgtttgaaaatgaagattagaatggatcgtttctaaagtagagccaataggtatgaaatcggtagtcgctgaaggggc

SEQ ID NO: 4095 - DNA, 23411 bp, synthetic construct
  misc_feature 1..23411: note = Synthetic
  source 1..23411: mol_type = other DNA
ccgaatttgcggccgatcttggtagacttcccgtttgccggtcagctgcaccacggttcccgttgtgaagtcctgagtggccttctccgccgcatgccacagcttagccgtgatttcccccgacgtatccgtgaagaccagggcaatgtacttactgccgtccttggcctcccgcacgtcggcggacttgatcaaaaccgggatgtcgagttgttcgttgggttgaaaatctttgagtaattttgtcataaatcgccaaacgcccagccggtcagtccgtctgggcgctttctgcgtcatcctctcagtattctactggaacagacctttgaggctattataccattcactggccttatccttgagcccattgatacctttctccacgttggattgaaaatcattcagccaatcatccccagaaccgctgctggtgccggtgctgccgccattattcgccgcatcttcctgggcggcatcttggaccttgaatggtgtctgtttagtgttgggcagaatattttgcatttcctgcttaaaaatcggcgcgaccccctgctcgctgatgcccttcaggaagtgattggcatcagtttggtcaaagccgacccatgtggccacggtgacatccggcgtgtagccaacgacccattggtccttggtaccaaatccccaactgctgtcgccctcggtactgccggtcttgccggcaatcttatacccgctaggcgccgcggaggtcccggtaccgctggaaaagacggacagcatcatactggtcatctcgttagccgtcttggcggtgatgatctgcttggccgtcgtgttggtattatccacgaccacagccccggtggcgtccacgatttttgtaatgaaatgggtgtccggtaatttgccgccattggcaaaggccgaatacgcccgcgccatctgcagcggcgataccccttgggataagccgccaatgccaaaggctaagttttggtcactcttaggaatattgatcccgaagcgttctgccgaagcgacacccttttgcaccccgatctggttcaacagccagacggcagcggtgttcttactttccgccaaagcctcatacatcggcacctcgccggcatattgttcatccacattgtggggggtgtatttatttttaccgaaactctgcagcttatcttccaacattgaatccggatgatagccggcctcaatcgccggggtataaattgccagcggcttcattgcactgcctggctggcggcgcatctgggtggcccggttgtaaccccggaaaacatgcttgccgcggccgccgataacgcccagcaccccgccggtattgggatccacagccacactggctgcttggaccggcgtcccatcagcagcgttagccgggaaggcccaatcttctttgaaactgccctgcatctggctttgaatcgtctggtccagcgtggtgtaaatcttgtaccccttattcagaatgtcttcttctttaatgtcgtacttgttgtaagcttcatctaagaccgcatcgaagaaatagggatagcggtactcgtcagactgctggtaattattcaccagcgtgagctgttcgttcttggcgctgttagcttcagcttgggtcaatttgccgttgtcgaccattaagctcagaatcaggttgcgccggccgagggcattatccatatggtctactggattatagaaactgggggaacgcaaaatcgccgccagggccgccccttgagacgcatccagatccttggcatgcttgccaaaataccgctccgatgcatcctccacaccccacacgccattaccgaaataggcgttgttcaaatacatcgtgaggatgtcgtccttagaataatgccgggtgatttccaccgccagaaaaatttcttgaaattttcggacaaaggtctgcttctgcgtcaacagcgtattcttggccagctgctgagtgatcgtactgcccccgccgctgatctggccgtggtgaatgacataactgaccgccgcccgcgccaggcccttaatgtcgaaccccgggttagaatagaaactgcggtcctcagtggagatcaccgcgttgcggatctggggcgaaatctggttcaattccacaaacgtccctttattggtgatcgtccccgctttttcgttatgggtgtcataaatctgggtgacggtcttcaggttggtcttcaagttctccacgtcggcggtcttcgctttgtacgtgaaaaaggcggacgcggccaccgcgactgttagaaacagcacgatcgcccagcgtaccacctggtagcgatgattgaagcggcggataaacacccaggcccggtggcaatatggatacaaccacgaggcaaactggagccaatacgcccatacacggcgccaaaaacccatgacgaggatcccttctacattggattacagaaaaacgatgcattacaattgttaacatcatagcacacccgcggattagctctgcaggcagcccagcaaaattaggaaaaagacaaggatgacgacttgatgaccgcatatcagcaccgcattgtattgcccccggattatcccggccgcactgttcgagaacagctccaagcgtggtggatccccaaaaagtggcagcacttcctgcgcattgaagatggtgtgctggtcaacggccgctatcaatccatgaacacgcggctgcacgccggcgatctcgtcagtttggccttcacccatgtggaccacccggtgcaagattacaatgtaaccgcccgcagcagtctcgtcatttgtcacgaagatcccgatgtcctcgtggtcgataagccggcgggggaaaaaatgcatccgaatcacgccggcgaaagcaataccctgatgaacgccgccgccagttacctcgcagccagcggcggcgccgccttcatggttcaccggctggatcaagccaccagcggggccgtactgattgccaaaaacccagccgtggtgccgccgctgaatcggcaattggcgatcaaaactctgcatcgggaatacttggctgtcgttcctggcacaccagtgctgcctgaccacggccatttcaccggccccatcgcccacgccattaacgacgtgcgccgccggacggtggataacaaaaacggccaagccgcggacacagaattccgggtcttggaccgttcttcagaaacacaacttttattactgaccctgcacagcggccgcacccatcaaatccgggtccatctggcccacgcgggtctgccgattatcgctgacccgctctacggccccgctgccgatcaaattccagaagacgaaatgctgctccacgcgtggcgcttgacctgggcaacaccgctgggctttggtacacagaccgccacagcccctattccggcgcgttttcgtccgtatctgcgggcgtggccagcgtatcgctgatggtttgctgaaaagccttggccgcatcctcatcgggacagatcaccagcaccgtgtcgtgccccgcgagagtcccgataatatccggccggtggacgtcatccaacgccgcagcgaccagattaccgctgccggcttctgttttcaacaccaccgtgaactgcactgccaccgccgttaaaacttgcgttgcgacagcctgccgcaaattctccggcagggttggcgcctggtgatcggctacagcataataggcgtgaccattgcggtccttgtacttgcgaatccctaattcccgcatgtcccgggataaattaccctgggaaatcataataccgcgatcatggagagccgccatcaggtcccgctgccgctcgaagcgggtgctggtgaccaactgacgaatggctgccttgcgctcttcccgtttcatcagcccatcacccgccttacatttcggccggtgcgccgacccccagcagggccaacgcactctggagtaccgcactgacggacgcaaccagcgccaaccggctgtcctggtcggcgtcaccggtcaagaccttagtatgggcataatacttattgaaggccttggctaaccgcagcgcatacttggcgatgactgacggttcgtattcccgtgcggctcgggtaatgatttctgggaagtcccccaaggtccggatcacttcccaagcccccgcgtcatctaatgcggctgcatcgatcaggtcggcttccgtcttgcctgctttgcgcaaaatactttgtgcccgggcattcgtatactgcacatacggcccagtctcgccttcgaagcgcacgacttcttccagattgaaatcgaagttgtccatccgatcgttcttcaagtcatggaagacgaccgcgcccacaccgacctggtgcgccacttcttctttgttggccagcgtcggattcttttcatccacctgcttttgcgccaagccaacagcatcctggagcactttctccaacaaaatgattcggccggagcgggtcgacaatttcttcccgttttccgtgatcaaaccaaaggggacgtggacgatctcgtcggcccagtcgaagcccattttcttcaaaacggccttcagctggtcgaaatgttccttctgctcaccaccgacaacgtacaaggacttaacaaagttgtaggtccgcttgcggtagatcgccgcggccaagtcccgggtcatgtacagcgacgcgccatccgacttgcggatcagcgctggattcaggtcttgatcactgagatcaacgatatcagcgccctggctcttttccagcaggcccttttgctccaagatttggatcacttcatccatcttgtcgttatagaaagcctcgccgttgtatgaatcgaaggtgacacccagctgatcatagaccttctggaattctttgagggaaatctcccggaaccacgcccagagcttggttgcttctggatcgccctcttctagtttcttgaaccattcccgagcctcgtcatccatctcaggatgatccttatcctcctgatggaagcggacataatacgccagcagattcttgatcggattctccttgacggcctcttccgacccccacatcttgtaaccaacgatcagcttgccgaactgggtgccccagtcgcccaagtggttgatcttgatcggatgataacccaattttgagaaaatattagccagggcattgccgatcaccgtggagcgcaaatggcccatggacatgggcttggcgatgttgggcgaagacatatcgatgggcacattgccgccgtgtccgatatctgcggcgccgtaaccggcaggatcgctcaagatggcgtggaacgtcgtgtgggcgaagaccggctggtccaggaacacgttgacgtacgggcccttcgcctcgaccttttgcaacccatccgcgttcacgagcggcgctaattgctgggcaatttgcaccggtgatttgtgcagcgtcttcgccagttggaacgctgggaaagcaaagtcgcccagatccagcgacttaggtacttccagtaaatcggccacttggtccgtcgtcagtgatgcgtcgatctggttcaaggcctggctgatcttttcggccacagtatgacgtaagtccatgaaaaacatcctccttaagatagaaaaaaatcctgccgcaaaaaacggcaggagagacggacagtgacgtccgcggtaccactctcattcttacgaatcgcaccgccgaagcggcgcaacgaagcgctcgagaaatgcactatatggttgtgtgcctggggtgcgccggccagcctgttgatccggcttgcaccattccggactcgctcggcaatcagagttgacctattcctcagttcaaagcgggtgacgagaatcgaactcgcgacttcagcttgggaagctaatattttaccactaaaccacacccgcattacaagataccagtatagcgaattttggcggcaatggcaaatgaatttcacaacggttaattcaaatataccattcatttctctttaattttttgacacaggttgttatactaggagtaagaaatccatgttggaggagccgcgtatgaaacaagcagaaaaggtcgatcagttgatctatggcgtcgtgagtgagcggacaccgcgaggctacatcttgcgcctaagcagtgatccgcaggtctttgccaaagggacagtcttcgaggaggctgtttattacttctaccgggtactcgccgagtttctaaaaaagcagcgagacgccggccacgatatccacgattacacctttcaacagttcgattttgccgcattagataaagtgcattttctcactttagtcagtgccacgaatgatctcgacccgcaccatatgaatatgaccatgacttttccccaggcccggctgattgatctgccggagacctttgatcaattgaaagctttgttaagctaaccggttgagccgcagggtaatgcccgtggtgactaggacaccggcgatggcaatcgccaggtcaaaccacattaccgtggtgagctgctggctccactgggccgtgatcagcggcaggataaattgagcggtggccccggcggaatagtacaggccggtggcgatccccttacccagcggcagcgtttcacccatcaccgtcagccccagctgcattaccccgccggccatgcagaagccgatgaggaagacgctgggaaacaggatggtgggtggtgcttggctgagaattggaatcagactgagtgtgccgccaatggtgaacggaactagtaattgcggcggggtgaagcggcggctgaggataaacacattgaccagcacgcaaatgaatgagccggtgctgtaccaactcagtaagctcccactggtgctgggggtcaggtgcaggatttgaatcccatattgcgtgatgttttgggtaaagacccaaaagacgccttgagagaggaaaccatagacaatgaacaacgctaataacagccacggcatcgtggcaaacgagacagctgcggctggctcgttttttgttggggctgattgcggctgttgcggtttggtgcgcttggcaccccaccagggggtgagaaacacgaccgcgttgatgatgaggattgctgcgagaaatgcgtagttgaggccgaaccaggcgtggctggtgatcgtccagcccaccagcagcggcaggatgaactggccggcggacatggcgcctttgatcaagacgttggccgccccggcctgcgccggataaatatccattaaggccggataggtaccggcatccaaaaatgaattggcacagccggcgaggaagctgaaggcaaagccccaagccgccgttggactccacaaaatgcccaggaaaaagagcaagtagctgaccatgcccaggcccacgaagaactgccgcccccagcggtcgctgagccaaccggacaggagcagcacgaccaagcggccgatccccatggcagcgatgacggcgccgactgcggcggcggtggtgtgccactgagcggcgaggctggtcatggattgggcaaggatgaggacccctgcgccgtgaacgatgtaattggtgtaaagaccgatggcgatgcgggtgcggtggggtttggctgtggacaatgtgcggcgttcccttctgtggatcgatttgcgtgctctggttcttagtttaccaaaaaagccgcgggttgggcggcttgcggggaagattattggtgtttggggtgtttggggtgttggtcggtttggtcatcgtcggggtcgtcccattccttatagtggggcaatggtttgtgcagttcacgaagctggctgcggtgttcgtagttgaggtaccagaccaatggcacaataaacagtattgcggcaatgatgaaaataccggaaagctcaaacagattgacgaaaaagacctgcacgttgtcccacgaccaatcaaagaagaaaggagaactggcaattttctggggaatgtgccggatatactggaaaaattcgtccggattatgcgcaaaattgaggaataacacggtgattaagaacgtagccaaaaaagaatgccagggtcgccgccggcgcttagtcttgggtgttagctgtgcttgttgtgctggtgtctttgattgtgcgctcacggtcgtcaccccctactcaataatcatcccagtgaccgtcgtcgtcacggctgtcccagtcgtcataccagaacattccgccgccgaaaccgaaaaagccgaacggtaacgccaggccgccggcacttaacgttgaaagaatcagcaggaccaccataccaacgacagtcctgatgaaggccagcgctgcgttctgaaatacatagaagagcaagccgaccatcactccggccagccggagactgcgcttttgcaactgccggggagtccgtccggcttggcgctgcgtcccataggcggttaccaaaaaccagacgatcagaatgatgccgacgtttagccactggggcaagccaaaaagaaatgcactgcaagtcatgagccagtgcttaaaaaggtctcgattgtcccaaaatgacaagccgcctcctgcaatcatgataacgataaagaaaataatgcccgcattgttgagcgattcctgccacttgggcatttggtgacttgttgcgggttgctttgctggtttgtttgtcatcgctgtgtcccctcccaacccgctgccattaagaacgcggtgggtgattcttagtctttgtggtctgctcatgctccggcggaaaatgataaggtcgaagcatttctttcaactgagactgatgctcccaccgtacaaacaaaactatcggaccgccaaaaataattgctgcgataatcactaaaccaatcagttccaccgagttaacaaaaaacgaaatgacattgtcgacagtgattcctgtatcgatacgccaatcgaagattgcccgtggaatacctcgaatatactgataaaagctgttgggatcacgggcataattgaaaaacagtactgtgatcacaaagctggtcaaaaaaggatgccgccgccaataatggggtttggacggttgcgtttggtccggcttctgggccgcaggctttactggcttttccattgctgcgtcctcctaatcaataatcatggcgccgaccatagtcgtcataccggtcccaatcgtcatacagcagccagccgccaaaactaaatggcaaggcgcccgctgccgccccaagcgtggaaaaaatcaaaaacaatacggccacaacaaccgccttgataaacccaaatatggcgtcttggaagagaaagaacagaaagccagcaacaaatcccgacagccaataccaacgggttaactgttctggtgaagtgatatcccgccgctgtcttaatcccatcgtcacaactccccaaaagaagatgatgacactggcattaatccactgcggaatgctcaaaagcagtgcgctgcagaacttcaggaagtgttcagtcatccctctgttctgccagagcgaccaaagcccccagccaatcgtgaatgcagccactactgcgtctaagttggagcgccattccggtacttgcttatctttcgttaagtgtttcgtcgatttattcgtcatcagccgttttcctctcctcggcttattgactttagtatcccgcagattggtgtaaagtcaacggatacggattacttgaatactacctaatcaagcatactgatgcatccgattcacctcgccgtcaaaccccagataaaagggagtggtcgagttgcaagaaggaactgaaagaaattgccgcaaaaaattcgtgaaaaggttgccaatcaaattggaatctgctattctaataagtgttcagagacgtctgaacaccctccgattttagccgattctggagggatccaatagcaaagggattgtcttcggacaatcgcctgtcaagctctgacccccatcttcgtgatgggggtcatctttttgtacgaaaacattgtgaaaccgttcccttcacgttatgataaagctatcatgaaacgcttgaaggggagacaaaccatgggttatatcttgtcattagacattggtatcgcttcgtgcggatattccgtattggaaacggacgcactcggtgtgccatacaaaattaagacgttgaactctatcatttttacacgggcagaaaatcccaaaaccggagcatcgttggctgagccccgccgaaagtatcgcggtgcccggcgacgtaagcggcgtacttccttccgtaaacaccgtacccggcaattattcatcaccagcggcctattgagcaaacaagacattgctcgctatctaaatcaacaggaacctcacgacgatatctgggaattacgggttaagggccttgatgaaccgctaaccaacctgcaactcttccaagtcctctattatttcgtcacccaccgcgggtttaaatcgaatcgaaaggctgaactcaaggacaaggatattggtcccgttttgaactccatcaacgcctttaaggaagaaatgcaatcccacgattaccggacaattggcgaattatatgccaatgatccgcgttttcgtgaccgtaaacataataaggattacaccaatggcttcttggggacaatacagcgctcttggttggttgatgaaatcaaaatgctgctgacaaaccaacaatccttcggcaacacgcagctcacatcagaattcattgaactttacctcaatatttttacaagtcagcgaaactttgatgacggcccggccagcggcccctattccggtgatttaattgacaaaatggtcggcccagacacttttaatcgttcccgcaagcgtgctccacgggcaacctacactttccagtatttcagttttctctcaaaattgaattctttgcgaattgcgccaagtattagtgcgccctttgaaaccctcactgttgaccagcgggcattgataaccaaacgactctggggacccgatgttaaatccgccgatcttaaattcaaacagatccggatggtattgtccctgccggagactgcacgatttaatttggtcaactacggcaatacccctgaaaaagcactagaaattgaggacaagactacgtttatttccattaagccgttgcgcgaaattgaaaaagcactgactggcaccactttgcccgttagccatgatcaattggatgcaattgctcgcattcttaccgtatacaagagcgatagtaatcggaaaactgcattccataatcagacggttctctctgatgaagtcatcgagcaattgctaccactgaatttttcgaaatttggtcatctgtcagtggagacgatgcaagaaatcattccctatctggaacaagggatggtttacagcgacgcagccacagccgccggttatgatttccgtaataatcaaattgacatggaatacatccgcgacaacgtgacgaatcccgttgtgcgccgtgctgttagtgtggccaataaactggtgaaggctgtggttcgtcggtatggcaaaccggacagcattcatatcgaattagcccgcgatttgagccagaacttccaggaacggcggcaggatgaagtacggcaacagaagaatgctcgggacaacgagaaaattgcgaagcgcttggaagagctgggcattcctgtcaacggtgtcaatattaccaagatgaaactgtacgatgaacagcatggcatcgatctgtatgatttaagcacaaatgccagcatggctgtgacggatatcttctctgacgaccgctacgagatcgatcacattattccatacagcgtcagctttgacgacagctacaccaacaaggtgctggtgagcgccaaggccaaccgggaaaaacgcgatcgtattcccatggaagtcttcggcaatgattccgagaggcgtcgccaatttgagaaccgggtcaataccaacatcaccaacctccgtaagaagcgcaatttgcttaaagaaacgttttccgacgaggataaagccaagtggaaatcccggaacatcaacgatacccgttatttgaaccgtattctgatgaactatctttcccaaaacgtggaattcactgatgtgttgagcgatgcgaaacacgtcatcgctttgaatggcgcagtcaccgctaagatccgctcccggtgggggattactaaagtgcgggctgctggcgatttacaccatgccgtagatgccgttgtgattggctgcgtcacggatgccttgattcaagcggtcacccggtatgccaaatatcaggaacgacgagacaacaaggcggccgctgaacaagatttggctgaaaataaccccgaggaactggacgctaagcagttccgcaaggtattcaatgactatcccctgccctggccggaattccgggaagaactgatgggccgggtctcttcagatcctagtcagatcatggctggacggcagtggagccactataccgccgaagaaatttcagaattgaagcagcccttcgttgttcgcgtgccgaaccaccggattgttgggccggcgactttggacactgtctatgggcagcccaaccctgacgatgggttgattacccaacgtgttcggattactgatctgaagccgcagaagaataaagacggtgaagacattatcaaagccggtgccaacgtttatgagttagcggctgatggcggaaataaattagtttatgagtcgatactggatgctttacaggttgccggcggcgatggcaagaaggcgttcccgactgggcgtttgcttgtgcggtctccgattcaggatattcctgtggaacgggtacgggtgactagtaaggcgacattagtggtccctgtggggcctaagagcgtggcggcgaatgggtcgatggtacggattgatgtttataagacacctaagaagtatgtttttgtaccgatttatgtgcgagacacagtaaaagcggagttgccagatagagccgttgcacctgtaaagccatacagtcaatggtatcagcttcaacctaaagatcaatttctcttctcgttgtttgccaatgacttgattcgattcaaacatccgcgaggggtttcgactaaagaaatactcacagacggttctcaggagaagggaaaacgaacggacgttgttgggtactttactggtgcagacattgcaactgcatcaattgccattgaaggcccagatcgctcattctcggctagaggtattggttttgccagtttaaaaaacgttgagaagttaaccgttaactatttcggtgaactacattcagttcatgaaacacaaccgatgcagtttcgtggtcaaagaggctagctgatgggataccgaaatctttttatcgaaagtcctgcagagctttcgattcagaatggtcaactcaagattaggactaccgaacaatttacttttcctttggatgacctgcaaagcatactaattgatgactctgccggatttaaaattgaagtgcaacaccgattgagttagaccaatcgaccgggttgatttaacaaaataggccatgaagacctatccttgaagcgactaaactaccaagaaaggtgaccttcatgacccacaatcagtctaacagtctcggctcgtacactcaactcacagagggcgagcgcggaataattgatgcgctttggcactcccatgaatattccattcgcgatattgcacacatcatccatcattcccctagtacggtaagccgtgagcttaagcgcggccgagtccagcaacgggattcgaattatcattactacaaggattacttctttgatgctgcccaacgacaacacgaagaacgacagacccattcccacgccaagagcatgttggagaagtgtacctacttctttaactggctgaccgctcagatcaagaagcatgcgtatcgtgaacaaagtattgatgggtacgtgcatcagttccagcaactctggcctaatcgttcgtgcccctcaacgccgaccgtgtatcgctacattgatgccagactgttgtcagtgaccaacatggatctgcctgagaagttgcggcgtcgcgagaaaaggccaggccgtagtcatgcgcgtaagaataaacgcatcgctggaacgtccatcgacaagcggtccaaacaaatcaataaccgctggtttgttggtgactgggaaggcgacctggtgaaggggaagcgttctgccgaccaaccagcattactcaccctgacagaacgtgtcacacgttatgagctgatctacaagatcccaaactatcacgcccggacttgcttagaggccatgccatacgttctgaacacacatgatccttatctattccactccatcaccttcgacaacggttctgagttcgccctcttggaccaactcagaggaacaaagatctactactgccatccctatacacccagtgaacgtggcagtaacgagaatgccaacggcttgattcgagaattcattccaaagggtcaatcactatgggaagtctctaaggagaagattcgtaagatccaagatgtcttaaaccaccggttaaggaagtgccttggataccgcagcgcaatcgcggcgctccaggcctccccctgggcctggaggaatccctgcccactacctaaaccaattcacatggatgagtcttcactgttgcacttaatttgacaattcgggaattgatgactctcgttcaacggtctcaatgactgtgctctctcagttggggaagtataatattgccgtcattgtttctgatgcgcaacatttacccggctcggtactattaccactccaaggatactaccacaagcttgccacccttaagcaacagctcagcgtaacaaagcgattcaaaaaccggctttggcagaaaaacattaaacaaaaaattttaaatcaagccgctgttctggattggcaaaatctccctgggatgcccgaaatgaaacagtatgcagcaaacgtactcgaaggcgatcggacccatcaagaaggatacgcggcggcattctactttaggattgcttttggcaaacactttgtccgacgtaacgatgacaccgtcaacgcggcattaaactacggctacgcaattatccggagttgcgtcgctcgagaattaagtgctttcgggtttgagccatccctgggtatttttcacaagaatcaattgaacccattcaacttggccgacgatttaattgaatcatttcggccaatcgttgatttgcaagttttgcaaatgaatctagatggccaacccatgctcactccggatatcaagaaacaactgctcaatttgcaaagtgcagatgtcaaagttgacgattcctttcagaccgtacgcaatgcgattcatttaacgattgaaagtattggtgcagcctttacccaggaaaaaatttctggcgtcactctccctcaagtgattccattagcccccatggattctcctaggttcatgcgagtaattgtaatgtttgacctaccggttgtcgcgaacgaggatcgaaaggcagcaaatcggttccgtcatgacctaattagcgagggattcgtcatgatgcagtgttcagtctactaccggatcgtcaatggcttagacatggcagccaagtatgaaaaacgacttgagggttacctgccagaaaaggggcaagtccgctctctagttttgacggaaaaacaatttgcacatatgaaggtgctagttggagacgtcagtccacaagaatcagatgtcaccggcaattcactgaccagtttatagacacgaaaagaggacgcaaaccgcgaggttgcgccctcttttctctgacctgtcccattttagccgattctggaaggatccaatagccacggcaacagcaaccggcaagcggtatttgtcccattttagccgattctggaaggatccaatagcaaggggttaagcaattacctcaatcgctgagtcccattttagccgattctggaaggatccaatagcgatgttgataaaagcaccgttggtcagtacgtcccattttagccgattctggaaggatccaatagccagcggcgcattgacccattaccgaagccagtcccattttagccgattctggaaggatccaatagcattccctatgcttatgaaactggcagtgatgtcccattttagccgattctggaaggatccaatagcagatggcattggctggtttgaaatttacaggtcccattttagccgattctggaaggatccaatagcagttgggactagcattgtacgctatcaagagtcccattttagccgattctggaaggatccaatagcattccctatgcttatgaaactggcagtgatgtcccattttagccgattctggaaggatccaatagcagatggcattggctggtttgaaatttacaggtcccattttagccgattctggaaggatccaatagcagttgggactagcattgtacgctatcaagagtcccattttagccgattctggaaggatccaatagccgacccgctaaaataaacacgtcgcctattgtcccattttagccgattctggaaggatccaatagcgcagaaggccattgaggacgtcaaggacgagtcccattttagccgattctggaaggatccaatagccattgatgttttacagaaacatctggatatgtcccattttagccgattctggaaggatccaatagctgtcattaagtctcactcctccaattgaatgtcccattttagccgattctggaaggatccaatagccaaaattgtactatgaatacagtcttgcgggtcccattttagccgattctggaaggatccaatagccggccacgtcatccacatccgttacattgagtcccattttagccgattctggaaggatccaatagcggtcatgaatttggctggcaatttacaggggtcccattttagccgattctggaaggatccaatagccgtcaaccgcgcgccgttggctatggttatgtcccattttagccgattctggaaggatccaatagcagcgatgaaaatggtacttggtgaaccccagtcccattttagccgattctggaaggatccaatagcggtcaatgttacggatgacgcgataaatcggtcccattttagccgattctggaaggatccaatagcagcacggattgtatgtgtaggtaacgccatgtcccattttagccgattctggaaggatccaatagccgaggaatacatggtgattgcattggaggagtcccattttagccaattctggaaggatccaatagctgatcgtcgcgcggccggtcgcataatcgagtcccattttagccgattctggaaggatccaatagcatcgcaacgcctgctaacatccaatcgctcgtcccattttagccgattctggaaggatccaatagcgtcaccgcgttcgttaaaaacgtcattttcgtcccattttagccgattctggaaggatccaatagctctactgcttgcatgtctatagtcctccttgtcccattttagccgattctggaaggatccaatagcaaaacagccgcgacacatttagtatcgcgggtcccattttagccgattctggaaggatccaatagcagtctggtttgtacagcacattgttaaagtgtcccattttagccgattctggaaggatccaatagcccgttggcttggctggtttagacttgtaacgtcccattttagccgattctggaaggatccaatagcaactcggtgcaacattcaaccgaatccagagtcccattttagccgattctggaaggatccaatagcccgttggtttggctggtttagacttgtaacgtcccattttagccgattctggaaggatccaatagcgcttcctcacgtaatcgcttggtcacgttggtcccattttagccgattctggaaggatccaatagcatatcgtcatggtcaatgctgtactcaccggtcccattttagccgattctggaaggatccaatagcaaatacagccgtgtcagtaccgccagtgatgtcccattttagccgattctggaaggatccaatagccgtcatgcccaagcagtggaccttcttgccgtcccattttagccgattctggaaggatccaatagcgttcaggcgtgccgcaatttttccctgtgagtcccattttagccgattctggaaggatccaatagctgatccggcttggctggcacttactgagcagtcccattttagccgattctggaaggatccaatagcagtgccttagcgtcagagccgtgtcagtacgtcccattttagccgattctggaaggatccaatagctagacctgatgacctatgcgctaaacaaacgtcccattttagccgattctggaaggatccaatagctgtcggcatcggcttgaacacacacgatcagtcccattttagccgattctggaaggatccaatagctaacttagaaaaggcaccgacggcgtatgggtcccattttagccgattctggaaggatccaatagcagtgccatagcagcctcgtagccgtgtcaggtcccattttagccgattctggaaggatccaatagcaggaacggcgagagatcgacaagctacgtagtcccattttagccgattctggaaggatccaatagccagccgtcttctggctgaccgaaatggccggtcccattttagccgattctggaaggatccaatagctgttgtctatctgcattgtttagcttccttgtcccattttagccaattctggaaggatccaatagcatggcagcggagctgaggatactcctcgcagtcccattttagccgattctggaaggatccaatagcaaaatggctgacgcgtgacggatcgcgagagtcccattttagccgattctggaaggatccaatagcgctatgcccgcgccggtattgcaaccggccgtcccattttagccgattctggaaggatccaatagcctaatatatcagtgcatgagcattttatttgtcccattttagccgattctggaaggatccaatagccgcgtaactggatcgggttgttttaattcggtcccattttagccgattctggaaggatccaatagccgtgtggattgtgctcacctatccggacaggtcccattttagccgattctggaaggatccaatagcgatcgtaggtcgaagtgcgtgcttctatccgtcccattttagccgattctggaaggatccaatagcgaggtgagcatatgctaccggagcgactcagtcccattttagccgattctggaaggatccaatagctgattttctgcgcttgtaaaaaacgttccagtcccattttagccgattctggaaggatccaatagcaggtccaacgcctcccccggcttcccgtccgtcccattttagccgattctggaaggatccaatagcgcccattgtggctcacgcgactgtgacgtagtcccattttagccgattctggaaggatccaatagcagcgcattgcgagctgtcgagaggccatcggtcccattttagccgattctggaaggatccaatagcaggacacataatggggctggtggctcgcccgtcccattttagccgattctggaaggatccaatagcagcatcaacggtatcagtgggacgagaaaagtcccattttagccgattctggaaggatccaatagctgttcatgtctattggggatcgtccggatcgtcccattttagccgattctggaaggatccaatagccgttctgaggtggtatgaactattagaccggtcccattttagccgattctggaaggatccaatagcggtcccgccgtgctgatagccatcttggtagtcccattttagccgattctggaaggatccaatagcaatgcagcccggcagcagcatcgtagccgtgtcccattttagccgattctggagggatccaatggctattgctctgctgattttgagaatgattaacgttggcgatgagtgcgggcaaggagcagcgagatgactgcttgtgccgcacagaaaaagtggcagccggatcagcgcgcacggaaattttcgagggtcgaaattttgcggcgagattttcgaaatgaaaacgacaaaatttattttcagaaagagtaaattaattgcaagaaactgatatgccagatttctgtgacggttgctgctacttgcgatgtatctgatccaatgacgcccatggcacaccataatttgcaacgttgatattttcttgcaaaattcggtttgcttccgcgttgcttttctgcttttctggtgtattgttttcataatacaaacattgcgtaacaaacaacaaaaaaacaaccgtggctgtaatcgcaatacctgccagcatataatcattcatccaaatcactcttttcctagacgcacgggcacgccctgtattatttcaatactgtatttcatttttcggccgcagcggtactttttatgggggcgccagcacatgccgggccagatatctggcggttaccggcgtcgtaaaaatgacgcgttcagggtggccgttgtacaggattcttaccgttgccagataaattatcatagaagctgccgccaatgccgaaataaatatcatagttgagcacagccagcgccttgctttcgcgaataccagcaatagcgttttgatacctgtctataataaatacgtcgttattttcaaaaatcgtttaagtcgccgtcgctataaacatgcagcacatctgtattgcgatcgcaacctgtgtcttttcccaaatcgctaaccatcttttcaaacggttcaacttcatcgctgctatcaggttcactggctacgcttgctaggatagtgggtgtaacataatactcgctgccgcgatatttttcatgccagtctcgccagtaccgttctccctgctgcaattgatcacttgccattggtctcattctagccgattctggaaagatccaaatagcttctctggtattgtgcttaattctttccttgtcccagtgacctatccaacatctttaaaactgatccacgacgctggtttgaggcccgattctaaccaactctgcacgatctaatagcgctcaaagcatttcagtcagatgatttagtatcctatatctattatctacaaagacgtcaacaatggaattaatttctgaactgaattcgcatacgctgaccatcagatcaattcgtccccaaaattcccaactccccccgctacaatttcaaaaggcatttgctctccccaccctgtcaattcatcagtaattaccaaataacaaatctcgccactttcaaaatcccagtcagctatcgtcatagccaaggttgaaacggattcttccacaactgattgccaatcaaaacgaattctttgcttgtctgaaatcacattatcgttcccgaattgtcaaattaagtgcaacagtgaagactcatccatgtgaattggtttaggtagtgggcagggattcctccaggcccaggggggaggcctggagcgccgcgattgcgctgcggtatccaaggcacttccttaaccggtggtttaagacatcttggatcttacgaatcttctccttagagacttcccatagtgattgaccctttggaatgaattctcgaatcaagccgttggcattctcgttactgccacgttcactgggtgtatagggatggcagtagtagatctttgttcctctgagttggtccaagagggcgaactcagaaccgttgtcgaaggtgatggagtggaatagataaggatcatgtgtgttcagaacgtatggcatggcctctaagcaagtccgggcgtgatagtttgggatcttgtagatcagctcataacgtgtgacacgttctgtcagggtgagtaatgctggttggtcggcagaacgcttccccttcaccaggtcgccttcccagtcaccaacaaaccagcggttattgatttgtttgggccgcttgtcgatggacgttccagcgatgcgtttattcttacgcgcatgactacggcctggccttttctcgcgacgccgcaacttctcaggcagatccatgttggtcactgacaacagtctggcatcaatgtagcgatacacggtcggcgttgaggggcacgaacgattaggccagagttgctggaactgatgcacgtacccatcaatactttgttcacgatacgcatgcttcttgatctgagcggtcagccagttaaagaagtaggtacacttctccaacatgctcttggcgtgggaatgggtctgtcgttcttcgtgttgtcgttgggcagcatcaaagaagtaatccttgtagtaatgataattcgaatcccgttgctggactcggccgcgcttaagctcacggcttaccgtactaggggaatgatggatgatgtgtgcaatatcgcgaatggaatattcatgggagtgccaaagcgcatcaattattccgcgctcgccctctgtgagttgagtgtacgagccgagactgttagactgattgtgggtcatgaaggtcacctttcttggtagtttagtcgcttcaaggataggtcttcatggcctattttgttaaatcaacccggtcgattggtctaactcaatcggtgttgcacttcaattttaaatccggctcacattatcgtttgcatcaacaaaatacatcatataatcggcgagtatcgtcccattgttctcctggtctaggatcaacccaactttcttaaccggtgcgtcaataatcgaactctcagcgattactgtgggtgcgacaatgttcttttcggttaaatattttccagacacttgcagcgttggttgctctctagaagtaaccaactctaacgaataatacaaacagtctaccaacagatttgtcattggttccggtttaggacagtgaaagtaaattaaaccactctcccccttctcttccaattgaagtgccccataattgttagacagatactctaacgattgtggggcatttttatgaccaaatattctagtgaattaaagttacaagttgtgcaggagtatctttcagggcgtgtatcatatagtgcactttgcacgaaatacagtatcccggcaacgagagtaatccgggaatgggttgaacaggctcgagcccatggactagaatctcttaagcggaaacatacgaagactgtttactctctggaacagaagttggctgtggtagactattacc

SEQ ID NO: 4096 - DNA, 23315 bp, synthetic construct
  source 1..23315: mol_type = other DNA
  misc_feature 1..23315: note = Synthetic
gtccggcgtctccaactcggccatggtggccaaggagcagctggacgccaagtaccccgaccggaccattgagatcgtcgactccctggcggcctcttccggctatggcctgctcatggacaagctggccgacctgcgcgatgccggtcaatccatcgaccaggtgaaggcctgggcggagcagaacaagctgcgtatgcaccactggttcatctcgaccgatctgagctactacgtccggctgggccgcctgtccaaggtctcaggctggttcggcactcagttccacatcgtgcctctgctggacatggacaacaccggccacctgacccctcggcgcaagctgcgggggaagaagatggccgagaaggcgctggtggacgagatggccgcccacgccgaggacggcagcaactatgccgggaagtgctacatttctcaatccgccttctacgacgacgccaagagcgtggcggatatgattgaagaaaagttcccgcacctcaacggtcccgtggaaatcaaccacatcgggacgaccattgggtcccacacgggcccgggcacgattgccctattcttctggggggacaagcgggaataacacgcgacacagaaaggggaaacgactgcgatgacaagaatcggtcggatactgctcattgggttgagtctagcgggcctggtcggcagcttgagtgcctgccagcccgctgccgagaagaaaccctcggcggcccaggtgagcaagcagaaagccgcagcggccagcagccggcgcaccaaggcggtgaaggccaagatcgcggcggggacgtatacctttgtccaacagccagcaaaggagtataccgtgcccacccattttacgaccgcactcggggaattcaccaccggtgaggtctatctgtcggggaacgctaaaagccaagatgatgccaccgcttggtccgggttcaaaattgactatacgtacaaaaacacgaccaaacagccccaggacgccgtgaaagccttcgaggccgtgttccgcccggacagcatgcgcatctggaacaatacacccattaaaggcatcaaggcggtcaccgccattcccgtttatcgcggcatggacccgccccgcactgagcaagatacccggcgcttggcgaaccgggggaagaccgtggcgccgggggcgagcatcgacacgatgagtgctttcggggtttctcagaaaactgcggaaaccacccggaagaagggtaaagcggttaaaggccatccgcccttgcagtttacggccacaattctggccgacccccagactccgcacgtaacgctgaagcaataccaaggaaaaatttcctggcgcttcgattaaagcgcatgccttaacccaaacaggaccgccgcggcggtcctatttgtgtaaaaaaaggcggcctaccgctgattgcggtaggatagaagatattccgcaaccagaaaggaccacccgccatgaaaaatgttggtacccagccgatcaccacggaccgcttaaccttacgccgcttcaccgccgccgatgcaccagcggcttacgcccattggcaaagcgacccggaagtgaccaaatacctcacctggccggcctatactgacccggcagccgcggcggcgcggatgcagtggaccgccagccagtataccgacccggcattctatcaatgggcgattcagctgaacgacgccgaagcgaccctcgtgggcaatatatcggtcgtggaagccaatgacgccgcccgctggcaggccatcggttatgtcctcggccgcgcctggtggggccgcggctacatgccggaggccctgcgcgcggtgatcgactacctcttcaccaataccgacgtgaaccgcatcgaagccacccatgatgtccagaatcccaattccggcaaagtgatggccaaggcggggatgcacaaggaaggcatactgcgcgcccggggcaagaacaacaccggcatcgttgacgaagccttctacgccctgctgcgggacgaatggacaaaaaaagccggtcgttgagcccagaccggctgtgaatcaatacacgttatttggcagcgactgcggcggccacatcgtccgtgaacttctccggggtcgtcgtgggggcataccgatggatcagctgaccatcccggccaatgaggaacttggtgtagttccacttgatgcggccatgaccggaagcgtccttcagataggtgaataacggatcttcaccgtcgccgttgacagccacccgcttggtcatggggaaggtcacgccgtagtgcatctggcaatattcgctggcctcctcgtccgtcgccagttcctgtttgaactgattcgacggcaggccgaggacggtgaagccctggtcgtgatacgttttgtagagcttttctaaaccctccagctgcggcgccaaaccgcacttgctggcggtgttcacaatgagcagcacctggccctgatagcgcttcaagggcagggtctgcccgttcatttctgtctcctggaagtcatacacactggccattaccgatcactcctctcgttggcttcactataccaccggcccattcgattgtacactatcgaatcgtgacagcggccgccgcttgcggtatgctggcggtgtaccatgattagagtaaggagagatgttgatggcccgtgttgaacgcttcattaagaaattgaacgagaagcacattgagcagttcgtcatgctcaacccgaagaatattacttacgtgaccggcttcacgggggatgagtccctgctgctggcgacgccgaacaagctgacgctggtcaccgacggccgcttcgtcgaacaggccaagcgcgagctgccggacaacgtgacgatctaccgctggcagaagggcttgctggccgacaccatcaagctgattaatgagagcggtattgactccgtcgtcttcgaagccgaccagctcacctacgccaagggccgcaagttcgtcgacgccatttctcccgacgtcatccccatgaccggcgtcgtggaagaaatgcgctggacgaaggaccccgaggaattggccaacattaagaaagccgtccaagtcgtcgacgccaccttcctgtacatcttgggtgagatccatcctgggatgaccgaaatggaagtcgccgccaaaatggaatactatatgaaaacacacggcggcgagggcacgtccttcgacaccatcgtcgcctccggcatccgctcgacctttgcccacggtgaggccagccacaaggtgatcgaggccggcgacattctcactatggacttcggcgccctggtcaacgggtacgcgtccgacatgactcgcacgattgccatcggcgacgtcgaccccaagctggagaagacctattaccaggtcttggaagcggagcaagccggcattgatgccatcactgccggcatgaccagccgcgagctggatggtatcattcgcggcgtcttcaagaaacatggcgtggaacaatacttcatccacggcgccggccacaacgtcggcctggatattcacgaaggcccgtacattacgtcccggccgggcgaaggcgacatcaagttccagccgaacatgctggagacgattgaaccagggctgtattatcccggcctgggcggtatccggattgaggatgatgtggttgtcacagaaggcaagagtgcggtgctgacgacagcaccgcgacgggacttgattaagattccggtataagatgattgaacgaaggcgcatctgggcagaaatgtctgggtgtgcttttttatataatgtatcaatcctattgtgccagctggggatgcctcgggcggcgcgttttcatggtgactctgactgaattatgtgacaaccctattgtgacagacaggctaaaacttgacacttaccgctggccgcccgcactagaccgatagaaagccatcctgtatactcggttgggaatgtttttcacaagaggtgtacgatgacagaagactacgaagccaacggccgccattatgagctgatcatgcaggcgcactactatgatgacaagacggacgccgtgactggcgaattggcgatttttcgggtgaccggtaatacccacgtttttgccatgcccttagcggccttcaaaaagaagatggaccgcaagctggacaatacgactctgtatttaagccggttcaatgttcgccgtgacgtttacgccgtgcgtttcgacaacaaaaagacgggaaaaaagggctatacccccaaaacggattacaccacccgccagcgtttgcctttgacccaacaagttatccagcagcacctagatgggacgattgcgatcggtctctaccccctgcttgctgatgatacgaccaatttgttagccctggatatcgaccagcacaactgggcggatattgcccagtccctccgacaagtgtgtgctcaatatcacgtgccctgcttggtggaaaaatcccaatctggcaacggctgccacttatggattttcttcaccagtcccatcagcgcccagaaagcccggcagctcggccgaaacttactcacaacggcgatgacgacgaccccggagatttcattcgcggcattcgaccgcatgtttcctagtcaggatttggcgattaaacatggcccgggcaatctgattgctgcaccactgcaaggaaagtttcgcgaagagggacgtaccgtctttctggatgatgacctgcagccgttggcggaccaatgggcggcgctaaagaatgtacataccctcaccgaagccgccaccgatgccgccatcagccaattgagctctgccaacggctatttgacctatccagaaaccgctgatacccagttacaaaagaatgatctgctttctctgccgactaacctacaaatcaccgaagacagtgtcttgcacattgcaaaagccggcctgaacaaccgccaaattggggccttgcgctggctggctaccttcgataatccacaattttataaaatgcaaaaagcccggttgtctacatatcagacaccgcgatatatcagcttgaccgaagaaacagcgactgaattgcgcttaccccggggactcaaagattacctgaacggcattttgccccacattcgctggaaagaaaagctggtcactggccacccattacaagtgacattcaaaggtacgctgcgtcctgatcaggaaaaggccaagcgcgcgatgctgcagaacgataccggcattctttctgcccggacaggttttgggaagacggttgtggccgccgctatgattgcggaacggaaggtcagcacgctcgtattagtgaacaacaaggggttagccgaccagtggcgggcgcaactaacgaagttcctgcaaattaggaccaagccaatcattgaagagaaaacagccaccggtcggccgcgcaaaaaagacgcgattggccgatattacggagcggtcaaaaatcgaagtggaatcgtagatatcgccacacttcaaactttagcccgaatgtcgccggctaatctgcgaaactttctctctgcgtatggccaaataatcatggatgaagtccatcatattcccgccttcacgtacgaaggggtattgaaagaggccgcggcgcgttatctttgcggattgtcagccaccccttaccgagaagatggcctggacccaatcatcacgatgcgggtcggtgctattcggtatcagacgggcacactggacccggcatatgtgcacacggtggcgcggaccgtctacccacggttcacgtcattcggtgcactcatgccggatgctcaaggtatggggctgccagaagccttgactgcgatgggtcaggatgtgcagcgtaacgagctcatcgtggccgacgtccgccgctgtgccggggagggtcggcacattctggtactgacacagcgggtgaaccatgcggaagagctcagccggctgctgcaaaaagcagtgacgattccggtgcacactctttacggtcagcaggacaagcagaatcaggctgcgcagcgagaagctgtcaccgatactcggaagccgtattgtctagttgccacagggtcctatattggggagggctttgatgtttcttccatcgacacgctcgttctagcgctgcccgttgcgggcaaatcgatcctgacgcaatatcttggtcgcatgcagcgcagtttggcgaagaagccagaattgcgggtctacgactatgtggacggcctcttgccagtttacgcgcgcatgtataaaaagcgcctgcggacctatcatggacaagggtatatcattgccgaggacgccagcaccaatcgcctgcaatcccggttctttgacggtaactactggacggctttgagtgaagacattgccgccagcactaaacaggtcgtcttaacgggcaaccgtctccagcctgaagatgttcgggcctgcctgaccagtcttcctgcaggtcgggtactcacgatttttggtaataagctgaccgacttgaaggcctcctttacaccggacgaccccattttgtggcaggatgcccatcgaggcgtacccaccggcatcattctcgaccaagaactgctctggttctttgctgatcagggtttcgggaagaatacaggtattgccttccgggtggcgaacccgcaactgacgacggccgtattaaaattgttgggcaatggcaatatctcactcgatctgtaagaatgcgctaggcgggctggttaccagggagtaaaatatcagtaattcgttcctggggagataaccgccatgcattggagcaacgacccaccctccgcaatcaattcactgtccggtatagcatttgattgaggaggatttctgctaatggatcatgatttggcaccaaaaacgcattatatcaagtggccgacactggccttgctgactttcgtcacggtcatcggcttcgaggacctggtttaccctttccagaaccaaggcctctccgtggtcttctcgtggatttttatggtcgtcgcctacgttctgccctacgagttgatctcggctcagatggggtcgaccttcagcgaggccggcggcggcctggccacctggtcccgccacgctatcggcgacgccgccgggtactggaccggctggatgttctgggcgtcgcttctgccctatctggtcgacgtggccaactccgtaatcgtgtcgctatcgtggctggtgttgggcaacaacaccttggataagtacatgaccaatgagatgttcggttttttcactttcgccgttatcttgatttttttgttgacgcaaaacctcgtccagcattctttggagttcatgagtatgatcggcggtgcggcgatgtttatcatgaccattctcttcgtcctgatgaccggcgccggggtggccgctggcggttttcacattgccacccagccgttcacctggtctgccttcatccccaatttcgatacccattactttgccaccaccggtctgctgatcttcgccgtgtctggcgccgagctgggggcggcctacatcaccaagatgcgcgacccgaagcacgagttccccaagtccatggtgatgctggcggggatgagcgcctttctcaccgtcttcggctccttggccatgggcgtcttcttcaacgcccaccatctgccggacgacctgaagatgaacggggcattctacgccttcgaacggctgagcgccgcgtggggctgggggaaggtgctgctgtacgtgtactcggcggtctcgctgacttacatgctggcccagctggccgtgctcatcgacgcctccagccgagtactggcggtggacacgtcggcccgcttcatgccccgctggctcctgcggaagaacaagtttggccggccgatccactcctacgtcctgacggcgggcatctgcctgttcctcctgctcctatctggcacgctgcccagcatcaattcaattttcaactggctcctgaacctcaacggcatcgttacaccgtacaagagctgctgggtcttcgccggcttcattgcgttgcggcggcatgaagaaaagttcaattcaccgttcgttttcattaaacaccgctggctggccattctcatcggtgtgtggggcttcagctttgcctttgcctgcgccacgctgggcgtgctgccccaggagggtgcggtgttctccgggatttggttccaccagctgctgctgaatatcgtgtcggtgggcgtgctgtttggcctgggcggactgatgccgctgctggcaagagtgagcaaccggcgggcggcagaggatacggcggactgaggatggtaggccggtccgttaagacgcaggggcggtccgccgttttttacattgcctgaggcgggcgctggcgccagcccttgacgccgccccggctgggtgcctaagctggacccaaaggatgtgttgctttaatggatgaagacacagcatttttgagcaagctggtccaaacggactcggccaatgactacgaagcggcaattgccaagctgattcaagagaagctggcgaccgctggtattgagagcaagctgatcgattacgccccaggccgcacgaacctggtcgccgaaatcggcagcggcgacgatattctcgtcttcgaagggcacgaggacacggtcgcgctgggtaatccgcaagaatggacttatcccgctctcggcgccgagattcatgacggcgagatgtacggccgcggatctgccgatatgaagagtggcctggccgccatggtactagccatgatgcggttgaagaagagcggcttcactggccatttgcgcttgatggccactgtgggtgaagaatacggcgccatgggggcagcccaattgctgaaagcaggttacgctgacgatatcagcggcctggtcgtgggcgaaccgacatcgctgaaagtactgttcggccatgccggttccttgaattataagattatcagccacggcaagtcggcccatagttcggaaccccagcgcggtgtcaacgccgtggagaagctggtggacttcatcgtggcggaacgccatgccttcgacgatgttcccgcggatccggtcatcgggcccttggcgcacagtgtcaccgtccttaaggcgggcgaccaggtgaacaccattcccgacctggcggtggctgccggcaacattcggccgacgcccagtttcaagaatgacgccgtgattgaacggttggagaatctcgtgaagaaactgaatgccactggttctggacaattggaattcagcctgacgcacagctttctgcctgtgatttcgaagaaagacgggcgcctagtaacggccgcccaagcggcaatccaggaaacgttgggccggcccgccgaactcacgattatccacgccgcgacggatgcctcggtgtacacaaaatcgaagaatccgttcgagacgatcatctatggccccggcagcatgagtatcgctcatcagattgatgaacacgttaacgtcgctgattttcaacacgcggtggggacctacgaagccattgcaaagacatatttcgagtaattaccaatggtagcaaaagcctgtgtgcattaactaatgccggtatatcaacgattattgataacaacacgtttttgagtgagcaattttgtaaaaaatgcttgccaatttcctgccagtctgctattctaaagaaggttcagagacgtctgagccaaccctccttttctagccgattgcggagggatccaatagcaaagggattgtcttaggacaatcacctgtcaagctctgacccccatcctcgtgatgggggtcatctttttcgtatccaattatattgtgaatccctgggcgttggcgtatgatgtgagtatcaagcaccattcactgaaagtacatgaggggagttatgtagcatgggctatatattaggactcgatatcggaatagcatcgtgtggctacgccatcttagaaacggacgctttggggattccattcaagattaagatgctgaattcagtgattttcacccgggctgagaatcccaaaaatggcgcatccttggctgaaccgcgccggcgttatcgaggcgcccggcggcgcaaacggcggacgtccttccgcaagcaccgaacgcgccagctattcatccgtgagggattattgacccagcaagatatcacggcctatctcaaccaagaaattagccatgatgacatctggcagctgcgcgtggctgccctcgaccagcggatcaccagccgccagcttttccaggtgctctactacttcgtcactcaccgcgggttcaagtccaatcgcaaagccgaattaacggacaaggacaatggaccagtgttgaaatccattagtgcgttcgagacggaaatgacggagaacggctatcggaccatcggcgaattgtatgcccatgaccgccgtttccaagaccggaagcataacaagggctacaccgacgggttcattgggacagtaaagcgggcctggctggtggatgaaatcaaacggattcttgccgctcagcagtccttggggaacgataaaatcactgacaaattcgttcaccaatacctcgacatctttgagagccagcgtaactacgatgtcggccctgccaacggcccctacgccggtgacctgattgccaagatggtcggccctgacaccttcgatcgttcgcgcaaacggtccccccgcgcgacatacacgttccaatacttcaacttcctgaccaagttgaactctcttcgtgtggctgacagtattggcggtacctatgcccctctgaccgatgatcaacgccagacagttactgagcggttatgggccaagggggtcaaatcggccgatttaaccttcaagcaaattcgggcactgctttctctccccgatggcgctcgttttaacttggtgacatacagtggggatgccaagaaagcactcgaaatcgaaggtaagaccaagtttgtttcagtcaaaccgttgcgtgatattcagaaagccttagacgacgagcaactggccaacgatcatgaactgcttgatgccattgccctggtcctaacgctgtataagagcgacgacaagcgtcggacaaagttccacgagcagaccactctcccggatgacaaaattgaacagctgttaccgctcaactttgccaagtttgggcacctttctacccatacaatgcaggcgatcattccttacctggaacaagggatggtctatagtgatgccgccacggcagccggttacgacttccgggataaccaaatcgatatggagtacattcgcgagaacgttacgaatcccgtcgttcgccgcgctgttagcgtggccaacaagctggtgaaggctgtggttcgccgcttcggcaagccggacagtatccacattgagctcgcccgtgacttgagtaaaaacttccaggaacgcaaacaggaagaacagtaccagaagaagaacgccgccgccaacgagaaaattgcgcaacagttgaaagagctcggcattcccgtcaatggtatgaacatcacgaagatgcgcctcttcaacgagcagaacgggatcgatatttacgatttgacccctaatgcgtcaatggcagtaaccgacatcttctccgacgacctgtacgaaattgaccacatcattccttacagcatcagttttgacgacagttatagcaacaaggtcctggtcagtgccaaagccaaccgggagaagcgcgatcgtatcccgatggagttcttcggtaatgatccgaagactcgggcccagtttgttaatcgggtaaacaccaacattcacaacgctaagaagaaacgcaatctactcaaggagaccctgaccgacgaagacaagagccaatggaagtcgcggaatatcaacgatacccggtatttgaaccgtattctgatgaactacttgtctcaaaatgttgaattcacggacgttctgagcaaggccaagcatgtcatcgcgttgaacggtgcggtcaccgcgaagattcggtcccgctggggtatcacaaaggtccgcgtagccggcgacttgcaccatgcggtggacgccgtagtcattgcctgcgtcaccgacggcctcattcaagcagtcaccaggtatgccaagtaccaagaaagaaagggcaacaagctcgcttctctggatgatcttcaagatgacaacccagacggtttagatgccaaacggttccgcaagctgtttaatgactatcccctgccctggccagaattccgcgaagaattacatgggcgtgtttccgatgcgccggataagttgatggctggtcatccgtgggcacattatacccctgaagaaattgctgggttgcagaaaccatttgtggtccgcgttccgaatcatcgcattgtagggccggcaactctagatacggtttatggtcaaccggaccctgacagcaatattatcacccaacgtgttcgaatcactgacctgaaactcaagaagagcaaaaatggtgatgacacaatcgctgcaggtaccaacgcgtatgctttggcggaagatggtggaaacaaagtggtctacgaaaccattctacgggctttacaggcggctaatggcgatgggaagaaagctttccctgaggggcgagtgatggtgaagatgccgaatgaaacgattccggtggagcgcgtccgtgttaccggcaaggcaacatccactgtaccggtcggcccgaagagtgtagcagcaaacggttcgatggtgcgtattgatgtttacaagacgccgaagaagtatgtgttcgttcctgtttacgtgaaggacacagtaaacgagaacctaccgaaaaaagctgccacacagagaaagtcactggcggactggtacgagattcaaccacaagatcaattcgagttttcattatttgcgaatgacctcattcacattgtcaacaagaaagggataaagacaaccgaaatcaacgctgacggcatgtcaacgaatgggattcgggaagaaatagttggatacttcacaggagcggatattgctacagcttcgattgctttcgacggtcctgatcgttctttctccgcacgaagcgtcggattcgcaaccctagacaaagttgagaaagtatcaacaaactatttcggtgaattggcggtagttcatgagacacagccgttgggattcaccaacaaaggagattaaggtatgggttatcgaaatatctttattgaaagcccggctaccctgtcaattcatagatcccagttgcgagtgagaacggacaccgaccacacctttccattggatgacattcagagcatccttctcgacaatctagcaacaagtattacagcaaacgttctatctcagttgagtaagaacaacattgccgtgattgtctctgatgtacagcatctcccaacaacaacgctgttgcccattcaagggtattatcacaagctgactgcgctacgccaacagttaaccgtacccaagcgttttaaagatcgtctttggcaaaaaatcatccgtcgaaagattcttaaccaaagcgcagtgttgaacatcttgaacgtgactggtgggataagtatgtcccgttttgcatctgcagtgaaggagggcgattcaacccatcaagagggttacgccgcggcgttttatttccagtctgcctttggcgaggtgttttcacgacgcactgaagatgttcaaaatgctgcactgaattatggctacgccataatccgtagctgcgtggcacgtgaaatctgcgcatttggattggaaccgtcttggggcatattccaccgtaaccagatgaacccgttcaatcttgccgacgatttcatggagacatttcgaccgattgtcgatttggtcgtattacagatgcacttcgatgaatccgacgccctgaccagccaagccaagaaagaattactgaatattcaaagtctggatgtacaaataaatgaatccattcaaacggtccgcaacgctatccacatgactgtcgaaagcatatctgccgcatacgcaacaggaaaaatgtcaggaatcagcctccctcagctcattccattgcatcctcatgagttcgcctaagttcatgcgagtaatcgtaatgttcgacttgcccgttgtagaagctgaagaccgcaaggctgcaaatcgtttccgacatgatttaatctctgaggggttcgtaatgatgcagtattcagtctattaccgcatcgtcaatgggctggatatggcaaagaaatatgaaaataggatcgaaggcttccttcctgaaaagggacaggtgcgattgcttctgctcacagagaagcagtttgccaacatgaaggtcctaattggggacatcagcccgcaagaaagggatatttcaggaaactcactgacaagtttatagccaagaaaagacggctcaaatcgcatggttgagccgtctttacatttatctgtcccattttagccgattgcggaaggatccaatagcatccgtcaaaatttggcaagaagtttgaatgtcccattttagccgattgcggaaggatccaatagctgccatgggcgcctattttaatacgctgacgtcccattttagccgattgcggaaggatccaatagcgacgggcattgccaaactgtacgccggagagtcccattttagccgattgcggaaggatccaatagccgccagtacaatcaggcccggactcgcgaagtcccattttagccgattgcggaaggatccaatagctatctatcgtggcgctatccaggccatgaagtcccattttagccgattgcggaaggatccaatagcctgggtcacctgattgttcaggaatgatctgtcccattttagccgattgcggaaggatccaatagctcgagacatcaaaataatcggctactttctgtcccattttagccgattgcggaaggatccaatagccgtcgccgccgggtagcggcaactgaaatagtcccattttagccgattgcggaaggatccaatagcaagttattccacgtgttaagacaagcaaatgtcccattttagccgattgcggaaggatccaatagcacaactcggggggtaaattaaaatgaataggtcccattttagccgattgcggaaggatccaatagctccacttggtctcagagacagaggcttgccgtcccattttagccgattgcggaaggatccaatagcttgcagggcggccaaggcgtggctgtggtagtcccattttagccgattgcggaaggatccaatagcggtcaaggaagggacgacaggaagcgagaagtcccattttagccgattgcggaaggatccaatagcgggggggtacgatcatcagctatttacttgtcccattttagccgattgcggaaggatccaatagcactggctgttctcgcattgacgtaacctgcgtcccattttagccgattgcggaaggatccaatagccggttggccttaacgttgaccaagtagtcggtcccattttagccgattgcggaaggatccaatagcttcatgtcggtcatttcttgacccccaatagtcccattttagccgattgcggaaggatccaatagcccagccaccggaacttcgccatttctttatgtcccattttagccgattgcggaaggatccaatagcaagagccttagcgtagtcgtgcgaaatgccgtcccattttagccgattgcggaaggatccaatagccaaggttgtgtgtggtgatggactgcatttgtcccattttagccgattgcggaaggatccaatagctcccctcctcatctagtggatgaagaagcagtcccattttagccgattgcggaaggatccaatagcttggccggtacgcccacttttttcgccaaagtcccattttagccgattgcggaaggatccaatagcacccgcgccggtgctgatgacaacgcccgtgtcccattttagccgattgcggaaggatccaatagcggcagccgtgcaccagcagacgttaacgacgtcccattttagccgattgcggaaggatccaatagccgcgttgacgtgctggacttgcaagaggacgtcccattttagccgattgcggaaggatccaatagctacaccgaagttcgtcccattgtaaccgatgtcccattttagccgattgcggaaggatccaatagcagcccgcgagttcgggagggtgcgcaaagagtcccattttagccgattgcggaaggatccaatagcccaccttatccaaagtaaactcgacgccaggtcccattttagccgattgcggaaggatccaatagcgggcacgggaaaaacattaccgacactgatgtcccattttagccgattgcggaaggatccaatagcgagcaaggtgaactgtacaccgctgaggaagtcccattttagccgattgcggaaggatccaatagcaaaacacctataccactgctaaaataaaacgtcccattttagccgattgcggaaggatccaatagcttgggcacgtctttcatgatggccgcaaaggtcccattttagccgattgcggaaggatccaatagcctgaagctttgccatgcccgtgttgatcttgtcccattttagccgattgcggaaggatccaatagccggatcaggtttctttccagcgggaaagaagtcccattttagccgattgcggaaggatccaatagccgtgcaactctgagtgaaccttaccatcacgtcccattttagccgattgcggaaggatccaatatctgtatcagctcgttagagcgtgtctggcgggtcccattttagccgattgcggaaggatccaatagcggctgctgtggtcagctcatcggcatggctgtcccattttagccgattgcggaaggatccaatagcatagggggtattgtgttatgtgtggaaggggtcccattttagccgattgcggaaggatccaatagctcgccttgctctaggtgagcgcccgtcagcgtcccattttagccgattgcggaaggatccaatagctttctggatcaacagcagcagccgaatcttgtcccattttagccgattgcggaaggatccaatagccacgaaaggcggaaattatcatgactaaggtcccattttagccgattgcggaaggatccaatagctggttagaagaaaagggatatatagtccccgtcccattttagccgattgcggaaggatccaatagcggcgcccgaccgtgtaaacacctttttatggtcccattttagccgattgcggaaggatccaatagcctgagcccgctgcggaacttccggaaagacgtcccattttagccgattgcggaaggatccaatagccggcaagattgactggatgaccattgatcagtcccattttagccgattgcggaaggatccaatagcgacgtggggccgggggtccccttcgtacaggtcccattttagccgattgcggaaggatccaatagccaaccggtctttgctcctgcccttggcgtagtcccattttagccgattgcggaaggatccaatagccgtccaaatagcccatgccgggcttgatgagtcccattttagccgattgcggaaggatccaatagcggacggtgatgccaatgcgcactaaccgcagtcccattttagccgattgcggaaggatccaatagctcaggcctagataatgatgtgaagccatatgtcccattttagccgattgcggaaggatccaatagcgccctgcttgtgcatcagctcttcttcgcggtcccattttagccgattgcggaaggatccaatagcatggtggtcgttgttgtgtccccccgagcagtcccattttagccgattgcggaaggatccaatagcacggcaaactaaaatagcagttgaaaggtcgtcctattttagccgattgcggaaggatccaatagcttctggagggattcaatagcaattgctaatataattgcatcatccctataatttaattttaccaaaactgtccatcaaatacatccacatcccccgcctccacctcaaacggcaccattaccgccatccccgtcaacaaatcctccaccaccaaataacaaatctccccactctcaaaatcccaatcatcaatcttggcagtgacgtgcaccaccgtactggccaaattactcagaacggtaattttgtccgaaatcaaattgttatttccatccacgaaatacacttggtggtcagcccgcacagcgccgtgcgccgcatccaccaagaaatccaaatgcacccgtggaccatcaattacctgcttgttccccatcagttgcaatggcaccacgtctgcctcccgcaaccgatgacccgccacccgaaataacggcgctgcctcactggtcaccaactccagggaataatacaagcaatccgtcacgaagttctccgtgggtaacggtttcggataagggcagtaaatcagtgctgaatcgcgcgcctgttcaaacgagttaacagccaccttcgttttaaataataccgcagcagcagaaatgaacaccgaaaagtcagtcgtctcttgccaccgggcaactttttcagcaaactctccctccgggtcgtaccaaaatacgttccctgcattcgccgtcaatgcccggaccaacaacgcttcgacctgatcccactcattcagtttgaccatttctttatctccccatgggtcttttcaacgaccctattgatacgtgtcaaaaaacgccaccaaccgcgcaaacacccgctcacgcccagtctctcgcagcacctcatgcttcatccccggcacctgctcgctggtcacattccggtatccaatctttcgcagcgtcgccaccgtatccgccagccctttctccccgccgctgaacttgtcgtcgacaccgaccacgctcagaatggcgaggttggggttcttgaactggaaccgatcaatctggtgcagctgataatcggcctgccaaagggtctctaagctgcggactgggtattccgccatcatcagggcatcctcactggcgcggcggatattctcttgattgtaactgagccacgagtgatcgctgggggtcagaccggaaatcttcgacagcagcggggacttggccgtctcgtcgtggaagcggagaaaggctttacccagaaagagaccaaccggcacgatggggttgtaattggctgtcccggtcagggccaccgagacaatctcatcatcgtgggcctgcaaatataatcgggctaaaatcgacccaaaggaatggccaaacaagctcacgggcaggtccgggtaacgagccttggcaaaacgagtcacccgcacctgatcagcgatgatctgaggcaggctgcgcatgacgccgcgggggtcggccggggaaatggaccggccgtggccgcggttatcggacaatacggcgatgtagccgtgctcgctcaggtaatccgcaaattcgtaatagcgttccttgtgctccagggcaccatgaatgatctggacgattccccgggcgttcggtgccggaaacacagcgactgccaactgggtctggttctccgtcggcaactgaaaatgaagcggcatgatcatccctccaaattcttgacatccaactggttaatccgcaatgacccgggcaaagcctgccgccagtgcactattcgctgtcggcttgaagtgcagccggccgtctggcatcccttgattctgcatggtgatgagcaccactggctggccggtcgcatccaaggcaaaaagatagagatgttgggccgcataacgggctgtggcagcgtcggaatacatggcaacaatcttgtattgcgccgctcccgtcccgtctttggaccaggcgacagtgaccggctggtcattcacggcgattttgttcttctgaatagcgtcagcgtaaatgggcatcccatagaattttaagtcattcgttggtccatattcctgatattgctggcccatcgacttctcccaggtcatgacgaaatcatgcagggcctgggctttagctgccgtccacacagcagcctcagccttttgacttgatgacgacgcactgctagacgatgatgtggacgtcgtgtcttcgccgtcactgctcgcggcagcatcgctattctccgatgtactgctcgtcgccgaggcccgttctgctttctcatccttgctcaaagcatacttgatcttgtgggcatccgcattctccgccggcttctggcagccggtcatcaacccagcaatccccatcatgatgatcaatagcgttggccacttccgcacgtgcgctcgtccccttcccgacttcttccttcattatatcaggacggcggcggtcctcgcttgccggccgcccaagtgacaatcttgtcacatcgccggttttcagccgacttttctaccatgagtaccggcaagtatgctaccctgttaccaattgatgacaccacgcgaaaggggtctataccagtgaaacaactccaaatcgaccagcttgataagtccttcgacaagcagatcatcttccaggacgccaactacaccttcgaccagggcaaggtgtacgggctgctggggcgcaatggttcggggaaatcgacgctgttcaacatgatcgcccggaatattcccactgacggcgggcaaattctcattgatgcggacgatggccgagggccgcaggcggactacgaggacatcaccgtcagcatggtctacactcaaccgcacctgcccgtcttcatgaccggcgcggaattcgttaagttcttcattgagatcaacagccgccgactcacagcggtccacacttctcagaacgcccaggacttcctggatatggctggactgagcgaggccgacagtaataagctgctgcgggacttctccgaagggatgcgcaacaagctgcagatggtggtctcgctgatgctgaagccgccggtgctgctgctggacgagccgttgaccacagtggacgttgtcgccgcccacgagatgcagcagatgatcgtggacatgaaggccgactcggtcgtcgttttctccacccacatcatgcagctggcccaagacatctgtgatgcggtggtgctgctgcacaaccatcagctggaggagctgacggggctggacattcattcccaggccttcgaggatgcggtcatcgcccggctgaccgacgaggtgaccgccgatgaccaacaatagcaagcgcacgctgcccctgacctggttcttctaccgggtgaagattaccaccagtaccaatgggtttctctacttcttacggcatctgcccctggtgggggcggcgatcccgccgacagtctaccatttattaggcgtgaagaaattcctggcagtcatcatggccatctggcgtctgttttggcgtgcgttgctgggattcggcctgttcctgctgggtttcctcgccagtgacaattacttcctgcacatcgccgggatcaagcctgccaccgtcggcctgaccaccagtacgctgctggccgcgaccgcctggctcacggccttcgcgttcatccgcgggttcgtcttgacggatctatccgtggacgtgccgaccctcaaagtcgccgatcaattcagcctgagccgccaagaaacggtccaagccacgaatctgagcaatttgatcgcgcgttccttcttccagggactgctgccattggcttattacgccgcgctgaccagcaacccatggctgctggtcaacggcgtgggccttttcctcctgccccagctctggcgggaagtcctgccccgcctcgcttggcagcataaacatcgggcgtggccggccgctattgtgttctggctgatcatggtggccgcgcctctgggtctggcgttggcgggccgctggctgttgctgctgacgatcctcttcagtcctgccgtcgcagtggttgtatgggtcttggccggattggctttcttctattggctgacgttcaagcaggaacccgggttgctgacgaagacgctgatggaacagaagaccctcgggaccgccgatgaggtcacccaggcccagaagcagagcgctcagtatctgagcaccgggcaggcgatgcagaagaaaatgaccctggacgcgcccgaaacacggcgggcgggccggctctccggcagtcattatctgaatgccctgctctttgcccgctaccgccgccagctgcggcgcagtctgctgattcgagtgggaatcatcgcgctgattggggtggccgctctcctggcaatgatgctgattccagggaagattcggggccaagccaacgacctgacgcccatctacggcgcactgttcttcgtcatgtacctggcctccttcggccggcccatcgtccagatgctgttcgtcaactgcgacgcggcgatgctctactacccgttctaccgccagcggcggacgattctctcaggcttcttctaccgtttctggcgcacttttctcctcaatgccggtatcggcttgctgatcttcgtcatcttcctggaactgctggtggtcatgccggccgcccagatgaccacgttctacctggtgctggccctggaattgctgggcctggtactgctcttctcgttccacgaactattcgtctattacctgctgcagcccttcaccgccgatatgacggtggtttcaccgctctataagattgtctacggcggaatgtactgggtcgcctggtccttcacccagttccatctggccgggtacggctacgccatcgccattggcctgattgccttggcttacgtcggcatcggcaccatcgtcatctacttccgggcgccgcagacgttccgcgtgagaaattgaccccgtgagcacgcccatgggcgctcggacgtcagtatgggataatggaagaaagtcagcacgtgagaaaggaggccgtccgtcatgaaatctgccgtcacccagccagccatcaaacccgtcatatggcgctggtggttcgtcattcagggggtgctgctcgtcttctattgcgctccgcccaagctggcggataccatggtcttcagcatattagcggtaatcgagggattcttggccctcaccgcc

SEQ ID NO: 4097 - DNA, 24404 bp, synthetic construct
  misc_feature 1..24404: note = Synthetic
  variation 19469..19470: note = note, n is a, c, g, or t
  source 1..24404: mol_type = other DNA
  variation 20097..20098: note = note, n is a, c, g, or t
gccgtgacgaatagcggagaaggaggaaccctctttgatgccaggatcagtaatatggatgacagcagccgttgtaaagagctgctgacccgtcggggactgatccagttccgggaaatgtatctgctgccggacatctcacctgcaatcgctgttgcggactccattttacaagctgaaaacggggtggttccggaaacaaaatctacaaacacaaccaatactgacaacatcacacccgaagtaaaagccctgttagacagtatgaacttttctgaacaacaagaactgaaacgcagtagtggtattgtttccatcctgcagctggaaggttatgctgctgaaatcggaaccataaaaatcagggatacggccaggctgggagaattattcagaagaaaagaagtgatcaatagtatgccttttgatgcacagtattgtttcgggaaaaccttttccgatgcaaacagcggaaccgaacccggcaacagactgcttggattttatttcatccgtaccaggggtcgcgaaaaagcggtaatagaaaacgaggatattgccagcgcaactgatgtctatgaaaacgggagacctgccgttagcatggaatttacaacggcaggttcttatgcatggggaaatctcactgagatcaatattggcaaacccattgcgatgctttttgacaattccctcctgacggcgcccgccccgcagcagcgattggatggcccctcctcaataataacgggtgattttacggtaagcgaaacacaggaactagccattctcatcggcggtgctgctttaccggccgatgtaacaattctcagcgctgaaacccggaaacaagaggctccgcagggtaaaaaactactcatcagcctgcttgctttcgttattggcgcagttgccggttttttcatcgttaacagcctgaaatccacctgaaaaaaggtcaccggcctccctaaaaagcccctgaaatgcagtttcgggttctgcccgaaaaccctatctttgcccgcccgttccgaaaaaataatttaccggtaaaaacttaaggatggaacattcgggcgggccgtccttaaattttaggcaaagcctttaccctgcttaacgatggccggatgaggcaaataaaagtaaatacccataacgtatgcaattcaaaggtctggtcagattttttgcaatcctgctgattatctactctctttaccaactgtcatttacctggtttgtaaaaaaccatgaaaagaaaatggaagccaaagcttttgcgtttgtaaaagccaatcatgctgacgccaagaaatttacaagagcggatgatcttccggattcactgaaaaccatctatgataccgagctgagacgtttattagccagcaccaaagatgagacactgacctatggtatcaccggacctgtgagctaccagaaagccaaagaagaagaactgaatcttggtctcgacctgcagggtggtatgaacgtgaccatggaagtggaaatgaccggtttgctaaaaacacttgccaataactccaaagacccggttttccttactgcattaagcaatgctgaaaaacaaaaagcaaacagcgatgcagatttcgtgaccctgttcactaccgaatataaaaagctggcaggtgatggtaaaatgtctgctctgttctttgccgccaactcaaaagatatcaaaatcggcgacagtgatgagaaagtggcttccgtgctgcggaccaatgccaaaggcgcattcgataatacattccgtgtattgaatacccgtatcgaccagtttggtgtggcacagccctccatctacccaaaccctgaacggggtattattacggttgaactgcccggtatcaaagacaaggaaagggtaagaaaattattacaggcaactgccaatctccagttctgggaaacataccgtttcgatgaaattcaaccggcactggtaaaaacaatgcaggattacgaccggatacacaagggtattacaaaagatacttcaaaggttgactcgacaaatacagtaataaaaattgattccacagtaaataacgagatactttcagaacaaatagggaaagaaacaccggattcacctgctgttgcagccacaaccaacacaggaggagataaaagaagttttacagagattatgaaaccaatagggagcaatgcttcctttattggaacagttgctgtaagcgacacagcttatgtaagagaaactcttacctccgaacttatcttcaggaacttcccgaatgatgcccgttttgcatatggaattcctgatgctaaaaataaaaatgaagtccccctgtatgtgctcagaacttataacagggaaaaagcgcctgtggaaggggaagcagtgagtgatgcccgccaggattatgaaaacgccaaccctatcgttaccatggaaatgaacgaccagggagcaagggactggggagcattaacagaaaaaacggccaagaaaactcctatcgccattgtactcgatggtatcgtttactctgcgcccatagcagaggggaaactgggaagcaattccaggatcaccggtaatttcaccgtactggaagcacaggatcttgccaacatcctgaaatccggtaaattatctgcaccggccaaaatcgtacaggaccaggaagtcggacctaccctgggtaaagaggcgatcaacggcggtgcgctggctttctttatttcttttatcgtgatcttcctcctgatgctgatttattataataccagcggatggatcgctaatatagccctgatcttaaacctgctgtttacaataggtgtactcaccggtttgggtgctaccttaactgcacccggtatcgccggtttggtgctcactatcggtatggccgtggatactaacgtaatcatttatgaacgtatcaaggaagagctgacaagaggtaaaggatatatacctgccatcaacgaaggctataaacgttccctgcctcctgtactggatggtcacattactatcctgttaacagcagtaattctttactactttggcctgggccctgtaaaaggctttgccaccacgcagatccttggtatcctcttatccctgttctgtggtatcctcgtgagccgctgggtcagtgatatatttaccaataaaaaacgtcacctggaatacttcaccggtatcagccgcaaaatcttccagcatgccaaattcaaattcattgaatacaggaaaattgcttatgtcatctccttcgtggtactggcactcggcatcgcttccttcttccatggttttgactacggcgtggaatttgacgggggccgcagctacaccgtccgttttgaccagaaagtagatgtggagaaagttcgtgatgagctgaaagcggctttcaaaggagaaagccccgtgatcaaaacgatcggcgatacaagaacacttgatatcacaacggcttacctgattgatgaaaccgaccagactaccggccagaacgtagactctgtggtaacgacaactttaatgaccgggttaaaagaccacctgcctgccggtattacttacgaagattttgccaacagcaccaaatacaagatcgcttccaagaaagtattgcctaccatctcggatgacctgaaaagaggcgcggtgaaagcaacaatctttgcattgttagccatcttcctttatatcttcatccgtttccgtgactggagatattcactgggtactattattgccctgctgcacgacgtattggtaacactgattgtattttcatttgcccgggccgttgtgccgttcccgcttgaaattgaccagcactttatcgcagcggtactgacggtgatcggtttctcgatgaatgataccgtgattgtattcgaccgtatccgtgaggacaggaagctctatccttccgcagcattaggcgataccatcaacagggccatcaatgaaaccctgagccgtacaatcatgacatcactgaccgtattcttaaccatcctgatcctcttcatctttggtggtgaggtcacaagaggtttcgctttcgcaatgctgatcggtgttgttaccggtacgtactcttctatctttgtggcagcacctattcttgttgacttaggtatttctaaaggaaagaaaacagcggtggcagctgcaaagcctgctgatacaaaagcataacaaaagaagctttatacgtaaaagcctgttctgtatgaacaggcttttttatttccttgtatcgaacaaataaaaaagctccccggaggaagcttatgattagtgagacctttaattcttacacagcaaaactcgtcccgcagccacaggtgctgctggcattcgggttcttaaacgtgaaaccgcggttattcaatccatcctgccagtccaccagcataccatagagataaatctggtgggctttatccatcacgcagggtattccttccacatcaaagctcatatcgttatcggtttgcctgtcgaagcccagcacataggtcatgccggagcaaccgccccctttcacgcccactcttaaaacctggctgttatcaaatccttcggcggtcatcagtttcctgatctcggccacagcgcctgctgtcaatgttacgggttgggctattgtcatttccatactgcaaaaataatcaaagattccagggaaaagaagctgccggtttccgggttagggaattttaacagcgggccgcccgccggccatcacttgccactcgctattccttccctatttttgctgcaacacaaatacacttcctatggatctgaatatgatcactttcctgaccgctatcgttgccctgctgatcgccctttacagtttctaccttgtgaatgaattaaaaaagaaaagagcaagcgctgaaccggcagacggcttcaccagccgcccgctgcaattgcaggcctatgaacgcttggtgatgctcgctgaacggattgctattcccaacctggtgagccgtgccaaccagcccgggctggatgcaagacaaatgcaacggctgctgatcgacagtatcaaacaggaatacgaatacaataccacccagcaaatctatgtcagcccaactgcctgggaagccgtcagaaacctgaaagaccagaatatgctgatcataaaccaggtgggtgccagcctgccggccgaagccagtggcctggatctgaaccggagactattagaattcatgatgtccagtaaaaaaggggccctgcatgagatcgtgatggaagccctcaattttgaagcgaagaagatgatgagataaagaacagtttgtagtttactgttcgaagtttatagttacctccctgtaaacagtttcaatatggaagagaagaaaacatacaccgacagcggaatcgaaataaaatcgatctataccggactaccaactccaaaccaccaactacaaactgaactacccggccaatttcccttcacccggggtgtgcaacccgatatgtaccgcggcaaactctggaccatgcgccagtatgcgggcttctccacggcggaagaaagtaataaacgctatcactacttactatcacagggtgtcagcgggctgagtgtggcatttgaccttcccacgcaaatcggttacgacagcgatcatcccttagcagaaggtgaagtggggaaagtaggcgtggccattgacagtattgaagacattcagaccctgttcaacggcatcaaactggaagaggtcagtacctccatgaccattaatgcaacaggatttattctgctctctttttatgtggcgctggccaaacaacagggtgctgatctgaaaaaaatttccggcaccatacaaaatgatattttaaaagaatacgctgcccggggcacctatatctatccgcccaaaccttccatgcgcatcatcaccgatatctttgaatggtgcagcaaagaagtgccgaaatggaatacaatctccatttccggttatcatatccgggaagccggctccacggccgtacaggaaattgctttcaccctcagcaatggcaaagcctatgtggaagcagcgttaaaaaaaggattagacattaatgtctttggcaaacgcctctccttcttcttcaatgcccataacaacctgtttgaagaagtggcaaaattccgggcggcaagaagaatgtgggccgtgatgatgaaggaactcggcgctacggatgaaaaagccatgatgctgcgttttcatacgcaaaccggcggcagcactttaacagctcagcagccgctcaacaatatctcaagggtaaccatacaaaccctggctgctgtaatgggcggcacgcaatctttacacaccaatggttatgatgaagcgctcagtttgcccaccgaggaagctgcacggatcgcattgcgcacacaacaaatcgtggcatttgaaagcggcgctccggatacagtggatcccttagccggttcctacttcattgaaaccttaaccaatcaagtggaagcagcagcctggcagctcatcggaaaaatagatgctatgggcggcagtgtatctgccattgagcagggttttatacaggatgaaattgcccgcagtgcctacgaataccagcgcaatattgaaaccggtcagaaaatcattgtcggcgtcaataaattccaggtaaaagatgaagctcctatacctgtaatgaaagtggatgacaatatcagggctgtacaggttgaaaaactaaaccggttaaaaaataaccgcaacaatgccaaagtggatcaatgcctgcaggaactgaacgaccgtgctgccggtggtgagaatattatgcctgccgtggtggaagccgtggaaaacaaatgcacccttggggaaattgccgacagcttccgggaaatatttggcgaatacaaataaaagccggaccgggttccgctactcccggttctttaatagcgataaaattcaaattctttatgcaagcaatactacctgcacattcaacactattccctgcaagcaaataacaagagggatggaaaacgtgtttccatccctcttacactaactggtgttttttatatagattttggtttgcctttcttacatccacttgctcagaaagcggttaaactcatgccgcatttcattaatcactttctccaggtcctggtactcttctgctaactctttttcaatacccagctggtctgtctccacccggccgccatgcgttgagctctgtacgctcagttcatgcacatggcttttaattttgtgtttcagtccattgatattcttttgctgcactaaaaactggttttgaaaatgctcaatatcccggcgggcttcaaaactattattcttcgctgccacttccactaaccgcttttccagtatatcaagatcttctttataaaagctcaatccccgcaacgcttcatcgtgcaggttctccattttggtgatacttgtgtagctcatgattgataagttttatccgaagctaatacctctacccgtttacccctatgattaatatcagcaaaaaagagcatagcgcctgattttactcctgccccctgagccccaaaaaagcgtcccgttaaagacgcttcaactacatttaccggctgcaaacttccgacttccgacttccgacttccgacttccgacttcttacttccgacttcttacttcctacttcttacttcctacttcttacttccgacttcttacttcctacttcttacttcctacttcttacttcctacttccaacctcctacttccttttatctcttcttactctccttcgcccacgcatctttcaatcccacggtccggttaaaaatcacgccgctcgggctgctatccctgtccaagcaaaaataccctttgcgcaaaaactggtagcgttcatcaaactttgcggtcttcagggctggttctgcaaaggctgtcgtcaccactttcaacgaatcaggattcaggtacgctttaaaatcgccttcctcatcggccgggtcttccactttaaacaggcggtcatactctctcacttccacgttaattgcatgtttcaggctcacccagtgcagggtgccttttacatgaatgcccgaagtatcatgcccgcttttgctttcggggatataggtgcagcgcagttcggttactttaccatctgcatctttcatcacatcttcgcatttgataatataagcactcttcagccgcaccatttgtcccggtgccaggcggaaatacttcttcggcgggttctccataaaatcttccctttcgatatacaactcattcgaaaagggaatatcccgcaggcctccgtttggatcttcggggttattctcgctggtcaatatctcttcatcaccggtgtaattcgtgatcaccactttcacggggtcaaacaccaccatcctccgcagggctatccggttcagatgttcccgcacaaaaaactccagcaggccgatatccactgtattctctctcttcgcaatcccgatccggtcgcaaaactcccgcactgcttctgctgtatagccgcggcggcgcatgccgctgatcgttggcatccgcggatcatcccagcccaccacatgcttctcatttactaattgcagcaatttccgtttgctggtcaccgtatagttcaggttgcgacgtgcaaactcgtactggtgcgagggatagatggctaacttctcaatcagccagtcatacagctcccggtgcggcacaaactccagtgtgcagatcgagtgagtgatattctcaatgctatcgctctgcccgtgggcaaaatcatacatcgggtaaatgcaccacttatctccggtgcggtggtggtgggcatgtttaatgcggtacaggatggggtcccgcatcagcatattcatatgtgccatatctatcttggcccgcagggtgcggctgccatcggcaaactcgccggccttcatctttgcaaacagttccaggttctcctccacggggcggttgcggtaggggctatccctgcccggctctgtgggtgtgcccttcatcgcggctatctcttcggagctgctatcatccacgtaggctaaattcttctgtatcagcgccacggcaaaggcatacaattgatcaaaataatccgaggcatatagctcatgtttccactcaaaacccagccagcggatatcatccttaatgctctccacgtactccgtctcttccgtcacagggttcgtatcatcaaagcgcaggttcgtatagccgggatacttcttggtcagcccgaaattcaggcaaatgctgctggcatggccgatatgcaggtagccattcggctccggcggaaaacgggtaatgatctgctcatactttccggctttcaagtcttcttctataatctcctccaggaaattcaggctgcgttcctctttatttattgcttcttccataggtcagcgaagatacgaaaccggggccgaaggcagatacggaggtaaagggtaaaagccggtattttatgcctgtaatagttgctgattaatgaaaatttgtaccttccaattacaagttcctgcaccaccttatccgcatttctttaatttttaactgaattattgctgcggttcctgtaaaagtagtaactgcttttacctgctgattgaaaggttgtgtccggtcaaaggaaaacggctacctgttgaaaagaaccatttctataaaaaaggttgccttattggctacgactgaactgtcagctaaaattgaacatgttgtagcagtgagggataagaaggaaggggtgttttgggaagtgaggtctaagaattaaaaaaaccgactttcgccggtttaaataatatcactacggaataatccttattgtgatttgcttaaattatcaagacgaaaatagagaaaaaatgaataataagaaaattcttgggctagacataggaacaaactctattggctgggctttaatagacttagatagtgaaaaaaaggagggaaatataattaaccttggtagtaggataataccaatgggggctgaagtacaaaactttgaacagggtaatccccaaacaaaaaatgctgaaagaagaactgcccgtagtatacgacgcatgggcaaaaggtataaagcaaggcgtaataaactactatatattctacaacaaaccggattacttcccgagcagttccagttctcctatccatttgataaccctttaactatccaaaaaataaacctgctaccaataaaagaaaaaacaccacaactttctgcaattgaattagtacagctaaaagtaaaagcccttagcgaatcaattaatttgaaagacttaggcaggctaatttttaattataaccagttaagggggtattcaggtggaggaaatgatgaagaagaaataaaagaagaagtatcggaagataatacagaggaatccggggtgttaagatatgagaagctgataaaactggtaaaaatattaagagagcctataaaacaacaagggaagaaaaagggtaaagatttttttgaggtagaaatagaactagatggagaagcggagaaagctgaaaccatgctcaatacattaaaaaaaggagaagaaccggaattgcaaataataatccgacgggataaaaaaggtaatacaacttctattaatctttctatgccggtaaaaaccaactggcgaaaatcaatggaagaacttgaagaagagcttgataagctggcagagaaaaaaggcagtgaggcttatttatgcgaatactttctaaaaaaattagctgataagaattataaaatccgcaacaaggtaattttaagaacccgttaccagtcagaatttgatgctatatgggatgcgcaacttaagctaaatccagaatttagaactatagttgaaaataaagagttgcttcagcaaatagcctctttcatttttcccggaaacaatacagaacataaacaggctgcatacagaaatattgcaattgaaaaagggttgaaataccttatcaaagaacaaatcatctattatcaaagagaacttaaagaccaatcggagctaataggcttttgcaaatatgaaaaagcagaaagagttgcccctaaaagccatccggtatttcaggaatttaaggtatgggagcaaataaataaattgtcaattaatacaagggtgcaaaaagggcttaagaaaaacaaacagccaaaatatgaatacacagacataccattatcatccgcatacaaacaatggctttttgatgaattacaaaagaaaaaagaaatttcaggtaaaggattttatgcaaagcttgaaaaagaaggcactattataaaaaacgaaagctttttgaacggcgtgcataaagaggcaaagtttaaaggcaatgaaactttattatttctgaaaaatcagcttaaagaatggtttgagaaattgaaattagacaactctgcaaatttgattgccttttgggaaatactctacaataccaagggcaatgaatatgatttaaacagcgaaagatgcagacaggtaaaagcttttattgataagcaggcaggcaaagttgaaaatgttgaaaagctaacaatcaggttggctaaaataaaatttgcaagaaattactcttcgatttcattaaaagcaattagtagtttattgcctttgctaagggcaggtgttcattttaatccaacattgcctgaaagtataaatacttcgattgtaaaacttttaaatgagaagcaagacgacccatttcaaaaatcagtacaggaagtattggaaaactaccagcacatttttcttacggaaggcggtatacagccaagctatgcagccatacttgtatatgggaagcatacagcagaaagttataccggccatgatataaaatcctataaagatatacaacccataccccgcggtgaattaagaaatccacttgctgagcaattgataaacgaaacattaaaaatggttgctgatatatggaaacagcacaaagagaaaccacaggaagtgagaatagaattggcaagagaattaaaaaatagtgctgatgagagaaagaaaatttatgacgccaacaataacaacaggaaaataaatgaacgggtaaaacaaagattaagggaacttagcaaggaaacatcactcggaaatattgaacggttcaggttgtggagtatgcaagcatcagagccttttccttttcctgaaaaagtaaacgagccaacagctgccgagatagaaaaaatgcgattgtgggaagaacaaaagtgtatttcaccttatacagggcaacctattccacttagccagttatttgataaaggtttgtatgacattgaccacatcatacctaaatcaagatattttgatgattcacttacgaataaagttgtttgcgaacgtagcgtaaatatcgacaagggaaacaggactgcgtgggaatattttgaaataggttccgtaacagaaaaaatattaagcaaagaacagtttaccagccatgtcaatcaaagtttctttggcaaaaaaagaaggaacctgttagctgtaaaaatcccccaagaccctgttgcacggcaattaaaagacactcaatatattgccacaagagtaagggaagaaatatcaaaaattgccggtagcgataacgtaaaaacaacaaccggaggtgttacagattatttaaggcataattggggacttactgataagtttaaaaaactaacaaaagaaaggtttgaaagggctcaatcgctgattgctgatgaagaaaaaagaaaagaattaaaatggagtaagagaattgaccaccggcaccatgcgctggatgcgttggttgttgcctgcacagaacctgcacatatacacaggctcaataaccttaataaagaattacaggactggcttgtgaaaaataaacaaaaagtaatgaaagatttcgagggaacggatgaagaactaatggaggcattcttaaacattgcaaatgaaaaaagagatgcaattcttgaagaaataaaaggcttcagaaattttgaacacccgtggaaaacattttctttagacgcagaaaaatggttggaaaacattattgtatctcacaagccaaaagaaaaactgcttatacaaaaagcagaaaagggcggaggtgcaggggaaatagatattttaaaaataagagggaaactgcatgatgcaacattatatggcattagccaaggcaaagaatcttacagaataaaactcacaaaacttgccggcaaacagtttgccaccgaaaaaacaatggaaaaaataattgatccattgataaaagatgccattaaaaaacatcttgaaaattataaagggaacaaagcagaagcattttcagccgagggcattgcagaattgaataaaggaagaaacatacctatctatggttttaaaatttactataaagaccagtctgaaaaaataaacctgaaaaaactaggtggcaaaaaaacaacttctgattttgtaaatgatgtactggcaagaatgattgatacaaaaatgaaagaaaaaatcatatcacatattgacaagatgggggggcataaagaagcatttacagaagccgggattaaaatattgaataaagcactcgaagaagaatttgcaataagcaatcccagcaaaaaatacaaactacttactgcgataaaattaataccatcaaaagacagcactgtacaaaatgacgaggaattatccctgttgccattggaaagaaaaagcagctacaacaaaaacctgcttgtttccaccggcagcaactatgcttttgccatactggaaaaaaatggagaacgtcagtttgatgagataagcttttttgatgccacaagattagtaaatgaaaagtttaaaaagggagaaaaagatatttttcaaataatgaaaaaatattttgaaaataaaaatacagatgcttcactattattcttactaaaacaaaatgacatggtgtacttgccaatcgaaaatgagaatatttcgttgaacgcaggagaagttgatcctgaaaggttttggaataataaaagagaaagaagtaaaaatatttatacagttataaagtttagcggaaagcagatatactttttaaaacatgatattgccactccaatgattaacaaagttgaatttggcagtcagaactgctatgaaaaaataaatggtgtttctataaaagaattttgtatcaaacttaaaattgaccgcctcggcaacatctctcctgccgataaataataaactgatgatttctccgttttatcagggttaaaccaatatcccatgataaagcggaccctttattttggcaatcccgcctatctgaaaacggccaatgagcagttggtcgttgagtcgcccctgcccgttccggtgccaacagaggaaggcgaaacaaaaacagctgtcaaaaccattcccattgaagatatcgggctcctgatcttagaccaccgccaggtgaccatcacccaggctttgctctcgaaattattagccaataatacagccgttattacctgtgacgatacccaccatcccaccggtatgctgctttccctcgatggtcattccttgcaaagccagaaattccaggcccaggtggaagcgtcggttcccttaaagaaacaactgtggcaacagaccgtggcggccaaaatacagaaccaggcggccatgctgctgttccgccgggaagaacataaactgctgctcagcttagccagcgctgtcaaaagcggggatagtgataactgcgaggcgcaggcggcggcttattactggaaaagggtcttcccggaagaattagctttccggcgggaacgctacggacctcctcccaataacctgctgaactatggctattcgatcctgcgggccatggtggcccggagcctcgtggcctccggtttgttacccacgctgggcattcatcaccgcaaccagtacaatgcctattgcctggcagatgatatgatggagccctaccggccctttgtggattatgtggtgtaccagttagtccgtaccaacgggcagtacctggagatgagcccttttatgaaaaaagccctgctggagatccccgcgatggatgtgcggatagatggtaaaaaaagcccgatgatgaatgcagtgcagcgaaccactgcgagccttgcgaaatgttttgagggaacggcaagaaagatattgtaccctgaaatgagttgacccggactttataaaagaagccagaaaccatttacataaaaccaatatcctttccatgagaaaaagaacccatccgcctgtgcagccgggaaagctgcccgtcattgcccgtacccccgccgggcctaaacaccaactgaaaccccagacgatttattgcggcgacaatcttgtcatgctcaaagagattccttcagaaagtattgaccttatttacatcgatccgccatttaacagcaaccggaactacgaggtattctggggagatacccaggaaaaaagagctttcaatgatcgtttcggcgatgccaaagcttatatagattatatgcgtccgcgggtgggggagctataccgtgttttaaaaaagacgggcagcttttattaccactgcgactggcatgcgagtcattatgtaaagattatgcttgatgagctttttggctttaataactttcaggatgaaattgtatggaaaagaacggctaattcaggaagcagcaaagcaaatgcaaaaaaattcccgattaatacagactccatattttactatgtaaaatcaaccagcttcacttttaatgcagaaagaaaaaaatacgggccggagtatctcagaaggtttaaatacagcgacaaatatggaaattatcgctggcaagctcttaaaacattttcaaaagaaacatacaaccgtcttgacaaagaaggcaaagtaagaaaaagcccttctgcaaagtatcctgaatttaaacaatactttcatgaattaaaaggtggtattccaattgataacttatgggatgatattagtcctataaacccgatggcaaaagaaataataggttacccaacacaaaagccactgtcattattagaaagaataattaacgtcagcagtaacccgggcaatattatattggatgctttctgcggatgcggaactacaatagcagctgcagaaaaattaaaccggagatggatcggcatagatatatctccaaccgcttgtaatgtaatgagccagcgaatgtgggatttttttaaactcacagaaggacgggattttcacattgaagatcaattcagatcaacagatgaacttcgtcaactaccccactttgaattccagaactgggcctgcatcgccctcggaggtattcccaacaaaagaaaatccggggactttggtattgatggcaaattatatcccattgaaaccagcaaaaagaaaaaggaaggattgggtctctttggagatattgatatttattatcccatccaggtaaaacaggtggacaaagccggacggcccgatattgacaattttgaaaccgctatccgcagggacaaaagacgcaaaggctattttgtggcatttgatttttcaaaagaagccattacagagatcagaagattagacaaggaaggcgatatagaaatcatcccggtaaccgtaggccagctgctgcaaatggaaacacaggtgctgcaaaaagccggctgataaaatgtttacccgttttaacgcataccgcatcatgtgggtacttgtattttttgacctgccgacagaaaccaaaaaggaccggaaaatctatgcccggttccggaaggatattatggccgacggcttcaatatgttccagttcagcatttacctgcggcactgccccagccgggaaaatgcggaagtgcatatccagcgggtgaagaaaatattaccggccaaagggcatatcgggatcatgtgcatcactgataaacaattcgggatgatggagattttcaggggcaaggaattggcggaagcgccggagaccatccagcaattagaactgttctgatcccggttcgtcccatcgggacggttgactggtaatccggtgaccctgcctgcaccaggcgtccctccgggacgctttgtgctcctgccaaaagttcaacccgccagccacccctccggggtaagcatccgttgccaggaataaaaaaatgggcccggggacccatttttttgattgtaaaacccagctcaaattcattaaaatcagccgcttagacaaaagctgttgtaaaagagctaagctacatgataatttgaaagcaaatcacaacaatttcagttttgccattgttatggttttagttgtaaaagagctaagctacatgataatttgaaagcaaatcacaactcgctggaatatccatgctgatatggcagcgttgtaaaagagctaagctacatgataatttgaaagcaaatcacaacttaatccttagttccctgttttcgttacttgttgtaaaagagctaagctacatgataatttgaaagcaaatcacaacaatccgctttgtttcgttttctgtttcaggttgtaaaagagctaagctacatgataatttgaaagcaaatcacaacagaagagtaaagtaagatgctgaaagaagggttgtaaaagagctaagctacatgataatttgaaagcaaatcacaaccatgatatggaacggcaatgtaaacatcccgttgtaaaagagctaagctacatgataatttgaaagcaaatcacaacaggaagaagggatatttcggtactactcaggttgtaaaagagctaagctacatgataatttgaaagcaaatcacaactaacgttatatttcttcgcatacatcgtctgttgtaaaagagctaagctacatgataatttgaaagcaaatcacaacctgtgcatagatctcgtcacactggtcttcgttgtaaaagagctaagctacatgataatttgaaagcaaatcacaacgcttctgtcagtgaaaccacaacgggaccggttgtaaaagagctaagctacatgataatttgaaagcaaatcacaacggctccgcttttggcttgttttccattttcgttgtaaaagagctaagctacatgataatttgaaagcaaatcacaacaccaccgtgaactcctcaccttccaggtgcgttgtaaaagagctaagctacatgataatttgaaagcaaatcacaacgctgcatttctttaatccttagctctctgtgttgtaaaagagctaagctacatgataatttgaaagcaaatcacaaccgtttttgtttgttttgatgtgttctattagttgtaaaagagctaagctacatgataatttgaaagcaaatcacaacttattttgcatagcaaaatttccctttacgttgtaaaagagctaagctacatgataatttgaaagcaaatcacaacattgtcgtttgtcgttgattccacctaatagttgtaaaagagctaagctacatgataatttgaaagcaaatcacaacttcgcctacgtttatcgccactttgttttcgttgtaaaagagctaagctacatgataatttgaaagcaaatcacaactgcactccatgcaattcccacatccgtagggttgtaaaagagctaagctacatgataatttgaaagcaaatcacaaccaatttagttgcttgttcggctgtgagtaagttgtaaaagagctaagctacatgataatttgaaagcaaatcacaactgatccccggcgccttccgccggtgtgagttgttgtaaaagagctaagctacatgataatttgaaagcaaatcacaacccagttcataataaagagcagatgcgtagtcgttgtaaaagagctaagctacatgataatttgaaagcaaatcacaactgctgtatgcatcagcatggtcatcatagagttgtaaaagagctaagctacatgataatttgaaagcaaatcacaacgcctctttgagagccgttacaatcggctgggttgtaaaagagctaagctacatgataatttgaaagcaaatcacaactattatgaataaatacaacgttgaagggccgttgtaaaagagctaagctacatgataatttgaaagcaaatcacaactggaggcttatttaagaaaaaacccggtgggttgtaaaagagctaagctacatgataatttgaaagcaaatcacaactaagaattttcccatatagatttctttttagttgtaaaagagctaagctnnaatttgaaagcaaatcacaactagtcgattttacttccaacccatataatagttgtaaaagagctaagctacatgataatttgaaagcaaatcacaaccacaggcccggcgaagggccaggttaacagttgtaaaagagctaagctacatgataatttgaaagcaaatcacaactaccgggtgtattactgatattagcattttgttgtaaaagagctaagctacatgataatttgaaagcaaatcacaaccaaagtcaacgtgtggattgaataagacaagttgtaaaagagctaagctacatgataatttgaaagcaaatcacaacaaactgttgctgaaatgcaattcgctgcccggttgtaaaagagctaagctacatgataatttgaaagcaaatcacaactgatgcgaatgtattgttgtatgcattgctgttgtaaaagagctaagctacatgataatttgaaagcaaatcacaactgcaataaattgatggtaactcctcttgaagttgtaaaagagctaagctacatgataatttgaaagcaaatcacaacacaatggatcgctttcttcttctataaagggttgtaaaagagctaagctacatgataatttgaaagnnctaagctacatgataatttgaaagtttgcaggtgaaaatactgctgccttggcgactcaatttcctttcacggaggcatagtatcaagacgaccagccgcttgggaaatggtgtactgtagttcccgcaataacattaggagaagtccggtctccttacaccaaagagtgattatttttcccccggtaggctggccggttttaatactctctgcaccttcgaataattaacatacttatactttccgaaaatcgacctttcaacaattaacttgtacacacctcctgggaaagtcgtggaagtgctgatggtctccttcttgattgtgattgtaatcttcggaggaccagcttgctttgctgataacaactccttcatcaccctcccatccatggatgcaggaataggtaaatgatggatatacagaatggtgggggcaatatctacattcgacgtgggtaattcgctttcaaaagcaactttaaaactggggccagctgccagcaacgcaatatgcacttcgtagggactgaagccaccatgacctgccgttccgctactgtaactggtaccggcataacccatactattcttatcatcattccagttatagtccaccagaatatcaccggccctgtccgggtgatcccaatgaatggcgtcaaaagaaaccgttccttccacccaaccttttgtatctccctttttcaatgctttggtaaagatcccgccgacccattcctgctcctgtaacctggaaactatttttttaataacagcctcatcatgatgttgaacatagatagcaccacctgcgaccaccacatcttcactttctttatcctttttcaatccctctttaattaaaaaatcagtaatcccttgctttccaatatgggttacaaagccatgatcagtggatatgatgatattgaaatgattggtgaggcccttgctttccaaatcagttatgatcctgccaaattgctcatcaacagatttaattgcagccatgctggtggctgcaccaataccatcactatgggcagtaccatcgggatcagaaaaccagatagcactgactaaggggccatccaatttcaacccgtatttgatcagcgcatcggtgacccattgatgctgggctgaattgggttttccatgcgcagggataggtcctaattctttttccagttcaggctttaaacttgcaggaaagatcatactcgtattgataacagcaccgccgctcacagtatggttttgtaataaagcctggccggaagaaccagaactgaataccatcatcttttcaccggcctgctgcaatacttcacccaatgaaatagcggtcagcagatgcccgttagtggcttcggcgatcttaagaagttcagccgcttccccggtgtttaatcctttctttgtatcgacctgtggaaaatagactgtgttacccataataccattggtgcctgggtagctgccggaagaataagacgaagagttcacccgcgttactgttggaaaaacactgtgatgttgtttaccatatacactacgtttgctgaaagcataaacattcggcatggcttcgggggttatatagtccggtcggagtccgtcaaaaaaaacgatcagggtacggatactatcttttccatgtccgcttgctccttgtgcgtctactgcattgcccagcagcaggatcagcaggctacctgcagcatacttaattagttttatcatgattcgttgtttaaaaacattattgattccaccatactttgatatcgctattatctcctcccattgaagaaacagcagcagcgaggttgaccgggttcagggattgcaggtaagtaggatacgggacacggacaggaaatttattttccgccggtatgccgctgcctctcggaaggatggggtaacccgttcttcttttttcaaaccaggcctggtaatccacaaaaaaataggcgtaatatttttggagcatgatcttttctaattgctgttcaggcgtggcagctgcatcataagctacacccgcttgtgttaaataccccgccggtaagttaacaccccattgggtcatcgaggccgtgatacccgcttcataatgttgtttgggcgttttacccgtaacaaaaccttttaaggccagctctgcttttaagaattcaagctcagcataggtcatcatgacaccaaccaatggcgatgtttttaatccatcgttataacttgaatttttaccaacaaggtattcagtggtggtggggtaaccgctttcaataccctggtatacattaacaccaccaactgttaccgtagtgaaccagggaacccggcgcggatcattatcagcattcatcttatcaacaaagaacttggtaaaataagtcccgtctctccaatctaactgtcgtgcattataatacggattgaaataggggaaggtgccggggtacctgaaaatggcatcatcggaggtactggtaaaaacgggatacttcgcaggatcggataagatggcattgatctgttcattgacattcacttccgaacttcgtctggagatccgcagcagcaaacgcagcttgagtgaattacagaactttttccatttaacgataccggggctggttgagcccgatacagaatttgcattgtaaaccaggtcacccccatacgttaacgctttggttgtgttgaagagtgaattggcggtatcaaggtctttcaatagttgtacataaatatctttttgtttatcaaacgcaggctgtacaataccttcagtagctttggtagcctgcgaatacggtacatctccatacaggtcggtcagtatagaataagcccagcacttatagactaaggcgatggcttcataattattctccttcagcccgctggctattttgtagatatcctctatatctgtgatggaactgtaaaagctgttccacacacctgccccggggttaacgacataacgatgtaacccgccgcctccgggactggaacggggagcatccacctgcattaattcatgggtaaagtttctggcagcactgatactattattaacgatccggtattgcatctgcccaagcataacgcccggggtaatttctttgggacggttaggatcagtattcagttcctcaaattttttagtgcaggcactgataatgaaactaactataacaatcaaaagacctgttttaataagcgttttcataaatgaatgctttagaatttgaaagtaagattgacacccatggtccgggtcgaaggaaactgcgttaattcgacaccaggtgtcagggttccgctattgaggttacctccctcgggatcaaagccggggaagctggtgatattaaataagtccctgccgtatactgcaatgcttgtctgacggattcctgctttagccaacaggctttggggcaggttgaattcgatccgcgcttcccggagtttaagataggaagcatcaaaaatattggtctccgcattactgatctggtaatagttatcataataggagctcgcagcaacttttaccgtattgcgttcatacttttgggttagtgaattccagaccactccatctcccacgataccttcatcacggccgggcagtgtgacctttgtttttccgagtgtattatttttatggttggtttgagagtacatactaccgcctttctgcccatcgagtaaaatactgatccggaaatttttaaatgtaaattcattcatgagcccggctttccagtcggcaaacgcattcccccatttcttggtagttgggtcaagggtcgcaggcaatccaaccgatgagtaaataattgctccttcaggtgaacgttgaaatccctttccatacatatcacccatacgcccccctacccttgcttcaatagtaacatttccactatgactatagataacctgagtggtaataccgtctgctaattctttgacataactcctgtttcggctccaggtaagggtgctgctccagctaaaattttttgtaaccaacggcttaccggtcaatgctatttccacccccttactattgatcaaaccggcattgaccagcgcattagaatacccggagacgggatcaaggggaatagccaaaatttggttgcggctcttattatcatatacagttgcatcaatggcgatacgacctttgaataaacgcaggtcaatgccggcttcataactggaggtgatctctggttttaaattagcattgaataatgtcggagaattg

SEQ ID NO: 4098 - DNA, 22442 bp, synthetic construct
  misc_feature 1..22442: note = Synthetic
  source 1..22442: mol_type = other DNA
cgaggccatcaaggtgatgactgaccttgtgcaggaatatggctattatagcagtggcgagtctttcactatcgccgatccgaatgaaatctggattatggagatgattggcaagggccccggtgtgcgtggtgccgtatgggtggctgtacgcatccccgatgattgcatctcggcacatgccaaccaatcacgtatccatcagttcgacatgaacgataaaaacaactgcatgtactcttccgatgttgtctctttcgcccgtgaaaaaggttacttcaacggagtgaacaaggactttagttttgcagacgcctatgcccctctggatttcggtgcacgccgttattgcgaagcccgtgtatggagttacttcaatatgtttaccgaccgtggtgaagagttccttccttatatagaaggtaaaaccgaccaacccatgccactttatctgaaagccaaccgcaaaatctctgtgcaagacgtgaagaatgccatgcgcgaccattacgaaggtactccgctggacatcagcaaagatttcggtgccggtccttatcatactccttaccgtctttctccgctttctttcaaggtgaacggccaggaatacttcaatgagcgccccatctctacccagcaatccggtttcgtgtttgtatctcagatgcgctctactatgcccgatgccatcggtggtgtgttgtggttcggtacggatgatgccaacatgacggttttcactcctgtatattgctgcacggataaagtgcctgtatgttactctcgcgtagatggtgctgattatatcaccttctcctggaattcttctttctggattttcaactgggtggcaaacatggtttatcctcgttacgacttgctgattgatgatgtacgtgccactcaaaccgaactggaaactactttcaacgatgcgcaggaaggcattgaatctgctgcatccaagctctactctaaagacccggcacaggcaaaagcattcctgaccaactatacgaacatgacagcacaaagtactctcgacacctggaaacgtctgggtgagttccttatcgtgaaatataacgatggcgtagtgaagcgtatgaaagatggtaagttcgagcgtaatgctatcggccaaccggcaggtgtgattcgtcccggatacccgaaagagtttctggaagaatatgtgaagcaaaccggcgaccgctataaaatgccggaataataccctgttgcaggctttgcagattttacaggaacaataaaaagcctgtgaaatctgtacaaagcagtgtaaatctttaatgaaaaagtaggataattgaacttattcgcctacatttgtgtcttacaaacaacagatatattttaacctctaaaataacaataattgtatggaaaatcaggaacttatcaagcaggtaactgagaaagcccagaagtggctcaccccggcttatgatgccgaaactcaggctgaagtaaaacgcatgttggaaaacgaagataaaactgaactgatagattgtttctataaggatttggaattcggtacgggtggcttgcgcggcattatgggtgcaggaaccaatcgtatgaatatctataccgtaggtgctgcaacacaggggctttccaactacttgaaccaatgcttcaaagataaagaacagatttctgtagtggtgggttacgactgccgcaacaatagcgataagttcgctcaaatctctgccgatatcttctctgcaaacggcatcaaggtgtatcttttcgatgatttgcgtcctacaccggaagtttcatttgctatccgtcacttcggttgccagagcggtatcaatatcactgccagccacaatccgagagaatataatggttacaaggcttattgggatgacggtgcccaggtgcttgctccacacgataccgctatcatcgacgaagtaaacaaggtgactgttgatgatattaaattcaatggcaataaagatttgattcagattatcggtgaagacatcgataagatttatctggataaggttcattctatctctattgatccggaagtgattaagcgtcagaaggatcttagcattgtctacactcctttgcacggtgcaggccgcgtattgattcctgcttcattgaaggaatggggatttgaaaacatcaattgcgtgcccgaacagatggtgaaggatggcaatttcccgacagtggtatctccgaatcctgaaaatgcggaagcgctctctatggctattgcattggcaaagaagatcgatgctgacattgtgatggcaagcgacccggatgccgaccgcgtgggcatggcttgcaaggatgataagggcgagtgggtgcttatcaacggtaaccagacttgtttgattttcttgtattatatcatcaagaaccgtattgcaatgggtaagatgcagcctaatgacttcatcgtaaagaccattgtgactactgaactgattaaagccgtagccgacaagaataagattgagatgcgcgattgctacaccggtttcaagtggattgcacgcgaaattcgtttgagcgaaggcaaacaacaatacatcggtggcggtgaagaaagctacggcttcctggcagaagactttgttcgtgacaaagatgctgtttctgcctgttcactgttggctgaaatatgtgcctgggcaaaagatcagggcaagacgctgtatgacgtgctgatggacatctacgtagaatatggtttctctaaggaaactactgtgaacgtagtgaaaccaggtaagagtggtgcggacgaaatcaaggctatgatggataatttccgtgctaatccgccgaaggaaatcggaggttcacccgttaagctgattaaggactataagacattgaaaactatcgatgcccagggaaatgtgaaagacctggatatgccggaagcttccaatgtgcttcaatacttcacggaagacggcacaaagatttctgttcgtccgtcgggaaccgaaccgaagattaagttctatatcgaggtgaagggcgaaatgggttgtccgaaatgctacggcagtgcagatgcagaagcagaagaaaaggtggtggctgttcgtaagtcactcggtatctaaggataatttgctgtaaggcagaaggaaaggtgtaatcctgcgaagggttacaccttttctgttttttaccgggtagtgtgtgcattcttttcggattaaggttcttttaccttctttaagtcaatcctctaatcattctctgttaaatgccgttctatatgcaacatctaaacctaaactaaaatagttatgaaagatcttgttgccgacattaagtatgatgccgctaaagtgattgaacaggctgtagggccaagtaaagaattctgcatgggttacatgaaccccggtgctccgaatggtcagggatatatctctaccatgaaactctcagtgggcacagtcgatgtaaaagaccttgacgcagttaccgaaaacattgtttcgtatgaccgttgcgaaaagaatgacgcctatatcggacaaatcaacatgctgaccgtatcttctttctgcggccagaacggtgctgtatggggatacgatctcgctgtacatgaagatattgctacaggtaaggagaaacccatgtacatgcaggaacaaccggatggaaaacccgctattcccgtatataatgcccgcccattgctggaagcaagcgaacgcctcttcggacgtgaggggcaacgacgtttcccgccgatgccgggtgcacatgtcatctgcgccaacaaggatgtggcagcccgcggtccactgtgggtatggtcggccattggcattgctatcctgaaaaatcgtagtgacggctcttgccttttcatcgaggatgccaacacgtatggcgatgacaactccaccgaagcagaaatcataggttttctggaaggctcactccgtaaagtaaccaacagcattgtgctgtgcggacaagaccagtcggtagagtacgaccgcatttatgtaggctacaagtacactttcgtagaaccgaaccaagtgggttgcgcgttgacttgcgccccgtacatttatctggctcagaatgctattcctgccgggatgaaagctgccgacctgaaaggtatgcctatcgacgagtgggaaaagaaactgggactggagcacctgacaatgattgaataataagacctaacctaaactttaactatataaatatttttatcatggatgaaatgaaagggacacgttatcccattttcggatttgtaattggtggtacaggcgcctttaacgacggtatcccacctcagccttatgaaacctataacctcgccttgcacgaagccggaattgaaaatttcaatcttattccttacacctctgttatgccgcttgaaatacgtggcaacttggtgaccatcaccccggagatgaatcgcaccattagctaaataagtgatatggcggatacttcaaagaaattaggattgggcggactcgttgccatcgtctttggttccatgattggtggaggtattttcaatatctcgcaaaacatggcacaaggagcggggttaggggccactcttatctcctgggttatttcgggggtgggagtattgttccttgtgctcaacttcaaggtgttggccgatgcccgtcctgatctcaatgcaggtatctatcagtacgcaaaagagggttttggcaattatgtgggatttaacattgcctggggatactggctgtgtgcagctatgggtaacgtggcgtttgccgtgatgctcaatgactcgttcggtgagttcctccctgtgctgcttcatcatggctggcagacggtggtgtttggatcgttcttcatttgggccatgtatttcattgtggcaagaggtgtgaaagctgccgctgctctgaatacaatagtcactatcgtgaagttcgcggcgttgatattaattgtcattatcctctttattttctttaaaataggcgcgctgagcattgacttctggggacatacacctgatctgggttccataggggcacaggtaaagagtaccatgcttgtcaccctctggtgtttcataggtgtggaaggtgctgtggtgatgtctgcccatgcccgcaacagcaaagatgtgggtaaagcaggtgtgatcgggttcctgctggcgttggtgctttatgcgttaatcagcgttttatcctacggtatcatgcaccagcctgaactggcgaagttggatgacccgtccgtggcttatgtgctgaaacatgcggtgggtgagtgggcttatacttttgttgtgctcagtgtcatcgtttccgttatcggtggttggattgcctggacgctgatgtgtgcgcaagtgccctatacggctgctcaggtgaagatattgccgaagtcattcctgcgtgagaataagaagtcgacacctatttatgccttgttgatatccagtatcatcatgcaggtatttatggtgatggttgctatggcgaagtcggtttacgatgcagctattgatattaccggtgtcatgatccttcccgcttatctgttctgcggaatctatctggtgaaagccagctttatgaaaggggaactgaacacaacagatccgaagaagattggtcaataccgctttatcggtattgtgtcttccctgttctgcctttggttgctctatgcaggcggattattactcttgctcgtgacgtccatcttctatttggttggtatctacttctatgtagtggcacgcaaacagaaccgggcgcagggcgaactgattttttctcctgccgaacgttggctggcactggctattgcagcttgttccgtgatagcggtgatactgttgattgagggaaaggtgggactctgataatttgaaatagaagaattaagaattaaaagttgtcggctgccgggaggcagttgctgatagagataaaatgcagattgcggttgcacgtgattggttgatgtgaatgagagtcgtttcattcgtagttgttcgtttgttgagtgcgtgtcctccgcaatctgttcttatttcatttatctcttccttttaactttttaattcttctttttgatttagccaccagtctatcattttccgtgcgatacttagtttacgtggaatttccggaaggttctctttggagtagaaagcaccggcgctaagttcgtctttctgcagtttgatttctccgtcttcgtaatcggcaatgaaacctaccatcaatccgctgggatagggccagggctgatttccgaaataagtgatgtttttcacttttaatcccgtttcttccattacttcccgttgtacacattgttctagagtttccccgggttccaggaatccggctaccagaccatagaatgttccgcggaagttgcgtgcatgcaccaacagaatttcttttcctcggcgtatcagtacgatgatagcggtagagatgggtggatacatttcgtaaccgcaagaaggacattttttcatgataggcgtttgctgttcggtaggcataccgcatacggaacagaagcgactgtgctggtcccaatacaatatctggtatgcttttccggcggctttatattcttccagggtgatgtattcataagacccccgtaggttgaccataatccattcttctgtttctgcaacgagctgttcaatagcaaatgtatgtaccatttcatccgtaggcagaaatacttcgtggattgtactgcctgcgtcggttttcaatggtgcttctgcaccataaggtacacagtatttaatttctcctttttctgttttttcctttttcagcagcagttggtctttaaagaagacgaaccactgcgtagggttttgatctaattctttcattttccttcttcatttttgatgtatactacgtttctgcctgttccgcgccggcgtaggataccttcagtgataaatgcattcaactcgttcatggcagttcgctctccgctaccggttagcctaatgtattctctccgtgagacgcagacatttttatcgagaaatgtgagcaatgcttcttttttcttttcgatattgatgtctccctttgaagggcgggtaggtgactggatacgttctaatatcatttgagttctcattttctttttgaacgccttgctagtgcgcagacacacatttttgaagacgattgattctgcacgtatctttttctccggtgtggcttctcgcaggcacttcagggatgtactaaggaagccgagttctcctaattctacgatattaccgtccgatagtaattcgcacaattcgtccataataccctgtagagctccttccaacagggcgtacggaaggtgttggagcatagctacttgtttcaggaactctttggtggtgtatgtctttttgggatagatgcgggcatgtagcgcttttttttcttttttccctttcggattgggcgtttcgtaaagatcataatatgcactcataagattttgagttaaagggttaatgatgttagttttttagggtgcataaatatattcttgttccttcagtaattaaattctttagtttcgacgaattaatattgcattcgcatgaatttatttgtgcaacaagtgtaactctttcatgcaatatttgtatatgtttcgtgcaacaactgttgcatgaaaatatcatatcctttgcatggaaaaaatttagtatgcaaaggtataaataatagtgaaacgatggagggtttttaggaaaagaattaataattgtgcatggtgttgaaagtgtagtaggggcaaggcataaaaaatcccccgttaaaggacgagggaacctaatgttttcacaacggaataatccttattgtgatttgatttcattttagttcgacaaagataggaaataaaaatgatataccctaaccctttatgaaatattttattgtgtttttatatgagaggcctttggtaataaaatattctgaataaaaatagtttgttttattcttcctattgaatatttttcatacttttgtgtagaagaactttgaaaacgaaatgttatgaaaaaaatattggggttagatttaggctcaagtagtattggttgggctttggttaatgaaggagcgaacgatgaagaaaaatcctctattatcaaacttggtgtgcgggtaaatcctttaactgtagatgaagcacagaactttgaaaaaggaaaaagtattactacaaacgcagatagaactcttaaaagagggatgcgccgtaacttgcaacgctataaacagcgtcgtgaagctcttgttgaagtgctgaaaaaacatgaattcattacagctgggacattgatgtcggaacaaggtaataaaacaacttttgaaacgtatcgtttaagagcaaaagctgtggaagaagagatatctttagaagaatttgcacgtgtattactaatgattaataaaaaacgtggttataagagtagccgcaaagccaaaggggatgaggatggtgtattaattgatggaatggacgtggctaaaaagctttatgacgaggacctgaatcctggggaattgtgtctgcagttgcttgaggcggggaagaagacactaccggatttttatcgttcagatttgcaagatgagtttgacaagatatggaattttcaaaaacagttcaatcccgaatctttttgtgatactgcaaaggaagaagtaagagggaagaatagaactcagacttggaccattctatcaaagtattttgtttggactgaaggtgattctgtgtggaataacgaagaagcaagaacggaagaacggataaaagagtataaacttgttggtatcaaacggactaccaaagggtatgaacagaaacttgaaaactaccgttggcgcgtacaagccctttccgaacagttgaatcctgaaataatagctattgtcttgcaagaaattaacggacagattagtgcatcaagtggttatctaggtgccattagtgatcgtagtaaagaactcttcttcaatcatcagacggtaggtcagtctctgatgtctgaattagataaaaatcctaatggtagtttgcgcaataaggtcttttatcgacaagactatttagatgaatttaatacgatatgggagaaacagagcttgtatcacaaggagctgactgttgaactaaaaaaagaaattcgcgatatcattatcttctatcaacgtcgtttgaaaagtcaaaaaggactgattagtacctgtgagtttgaacaacgggaaattatagtggaaaaggatggaaaaagaaaaactaaaattataggttgcaaagtgatcccccgttcacatccattgttccaggaattcaaaatatggcagacgttgaacgacgtagaagtttatgtggcagatagaagaactaaacggaagcaagacaggaagtcaacaacattgtttagtgatacggaagatattttgctggtggaaggaaaacgatatttgtatcaggaagagaaagaactcttggcaaaagaactttttgtcagagaaaacatgaaaaaagcagaagtactgaaactgctatttgaagacccaaaggaattggatttgaattttaagcagattgacggtaatcgtacaggttttgcccttttttcggcatatagcaagatgattgagaaatatggctatgagtcggtgaattttaaaaactcagctgatgagataattgagaagcttcaaatcatatttgctgatttaggatggaatacggaattgttctctattgatttgagcaaggatgacaaagagcttgaaaaacaaccttatttcagactttggcacttgttgtattcttttgaaggtgataatacccccaccggaaatggcaagttaattgaggcattgatgaggctttgcagcgtggaaaaagaatatgcctcagtgcttgcaaatgtatcgtttcaagaggactatggaagcttgagcgcaaaggctataaaaaaatattaccttatttgaaagagggtaatcaatatgatgttgcctgtgaatatgcaggatatcgacattccaaatcttcgttaaccagagaagaaatagataataaggtgttgaaaaataggttggaaatccttcctaagaatagtttgcgcaatcctgttgttgagaagattttgaatcagatggttaatgtagtcaatgcagttattgatacttatggtaaacccgatgagattcgtgtagaattggctcgagaactgaagaaaggtgctaaagaaagagaagaactggcaaagtctattgctcaaaatactcgcgaacatgaggctatccgccaattgctgcaaacggaatttggcatgatgcatgtcactcgcaatgatattattcgttataagctttatgaagagttgaaggataacggatataaaactttgtattcagaccaatacatcccgagagaaaaggtcttcagtaaagagattgacatagaacatatcattcctcaagctcgactttttgatgattccttgtccaataaaacattagagtatagagctgtcaacatagagaaaggtaataaaacggcttatgattttgtaaaggaaaaatatggcaatgatggtttacgacgatatcttaatcattgtgaagcattatttaaggacaagaagactaagctgaagaaattaaaaatggaagatcaggacattcctgatggtttcattgatcgtgacttgcggaacacacaatacattgctaagaaagctctgtcaatgttgagtgaaatttcccgtcgtgtagtagctactactggttctataactgatgaattacggaaagattggcaattagtggatatcatgaaggaactgaatctgccgaaatacgaagcattgggtttcgttgaaacttttaaggataaagacgggagaattataaaaaaaatcaaggattggagtaaaaggaacgaccatcggcatcatgctatggatgcgttgacagtggcctttaccaaagatgtttttattcagtattttaataataaaaatgctttttggatgtcaggctctaaagaacatgccaacataacagcaataaagaataaatattttgagaaagggaaagcacttgcacccataccattggaactgttccgtacggaagcgaagcatcatttggaaaatatactggtttccatcaaggcaaagaataaagtcgttactaacaatataaatcgtacaaagaaaaaaaatggtgaaaatctgaagttgcaacaaactccacggggacagttgcatttggaaagcatatacggtagttatcggcagtgtatcataagagatgaaaaagtaaatgcttcttttgatgccagtaagattgccaatgtaagtaagtctgcttaccggaatgctttactaaaacgtttggaagcttatgataatgatccaaagaaagcgtttaccggtaaaaactctctggataagaatcctgtttatctggatgaaaataaaatggagaaagttccggatagggtaaaaatcgtagaatttgaaactgtatatactatacgtaagcccattgatcccaaattgagtatagataaagtagtggatgccaggatacgtacacttttgaaaaaacggcttgaagaatatggaggagatgctcaaagagctttttctaatattgaggagaatccgatatggttgaataaagaaaaaggaatatccgtaaaacgcgttgcgattagaggtatcagtaatgcgcaggctttacatgataaaaaagataaggatggtaatcctattttagataaagaaggtaaaggtattcctacagattttgtgaataccagtaataatcaccatgtagctatttatagaaaaccggttgtggacaaaatggggcaggttatacttgatgagaatggtagtccgaggtatgaacttggtgaggatgtgatatctttctttgaagcagtagcgcgagttaatcttcgacaaccagttgtagataaggattataagcgaagtgaaggatggcagttccttttcagtatgaagcagaatgagtattttgtatttcctaatgaaaaaacgggatttaatcccaaagaaatagatttgctaaatcctgaaaattatgcattgataagtcctaatttatttagggtacaaaagattggtttgaatgattatactttcaggcatcatttggagacaagcatacaaaataattcaaatgaattgaaattcattacttggataagatgcggaaaaaatggcataaatggtgtaattaaagttcgggtaaatcatattggacaaattgtttctatgggagagtattgatatgagtggtattaaactttctcaagatcaaaacggaagatggcaaaagacgaaagattcaaacagtaaatataaataggttttttcgtattgtttaatctattcattttcctaaagtagagcctttttaagttgtggctggcacaagtaatagggtataaatgcatactagaaattgaaaatctagaactagtccaagaaggttatatttctcttgataatttttattggatgttgatagacaaaaatacgttgcaaccgcctttttacgcaaataatgaataaataatttttaaagtctgcatactatgattaagaaaacattttatttcggaaatcctgtttatctatctttgaagaatgctcagttagtgattaaactgccggagattgttaaaaataacactttgcctgaagggtttaaacaaacatctgaggtgactaagcccatagaagatattggagtagtggtattggataataaacagataactgtcacttcaggggtcttggaaactttgcttgaaaataattgtgcaatcataacatgtgacagtaaaagtatgccagttggtttgatgcttcctttgtatggaaacactacgcagaacgagagatttcgtcaacaacttgatgcttctctaccattgacgaaacagctatggcagcaaactataagagctaaaatagaaaatcaggcggtagtattaagtgaatgtgctggagaagaaataaaatgcatgaaggtatgggctgctgatgtgaaaagtggagacctggataatttggaggctcgtgctgccgcctactattggaaaaatctgtttaagatagagggatttacaagagatagagaaggtattccacctaataatctgttaaattatgggtatgccatcttgcgtgcagttgttgcccgtggattggttataagtggactgttgccaactttggggatacatcatcataatcgttataatgcttattgtttggcagatgatataatggaaccatatcgcccgtacgtggatagattggtgtatggtatggttaagaaaggattgaattatactgaactgacaaaagaattgaaggcacagttactaactattcctacattggaaactaacatttcaggaaagcgcagtccattgatggtagctgtcgggcaaactacagcttctctatataagtgttttagtggtgagttacgtagaatattctatccagagatgtaaatggaccgatttagtgaatatcgcattatgtgggtacttgtactatttgatttgcctactgaaacgaagaaggataagaaggcatatgtagattttaaaaagaatctgcaaaaagatggatttacgatgtttcaattttctatatatgttcgtcattgtgcgagcagtgagaatgcagaggtacatataaaaagagttaaatcgtttctacctgaacatggaaatgtaggaatcatgtgtattacagacaaacaatttggaaatattgaacttttctatggaaaaaaaacaatggatgtgaatacgccaggacaacagttggagttattctgaaaagaaaatcccgctatttggcgagattttctcttggaaactaagttcttttttaaattctaaatagtggtgtaactatttgaatatgaactaataactgataatcagttgcttctaatggctcaaagatactaaaatgaaagcaaatcacaactaacttccttccatgaatatacgtcagcaagttgcttctaatggctcaaagatactaaaatgaaagcaaatcacaacgcctccagctgcgccttcacttcatcggtagttgcttctaatggctcaaagatactaaaatgaaagcaaatcacaacactttaccgggcttcatcccatcagaaaacgttgcttctaatggctcaaagatactaaaatgaaagcaaatcacaactacagacgttatacatgcggtctttccactgttgcttctaatggctcaaagatactaaaatgaaagcaaatcacaactgacccgtctacgaacgcccgtttactgtagttgcttctaatggctcaaagatactaaaatgaaagcaaatcacaacctgctgacgctatgctggtcgctcctgagagttgcttctaatggctcaaagatactaaaatgaaagcaaatcacaactgttggaacagtggaacaccccacttaaagttgcttctaatggctcaaagatactaaaatgaaagcaaatcacaactgctctccaaatcgtctattacaaatacctgttgcttctaatggctcaaagatactaaaatgaaagcaaatcacaacccacttttacccggttcgttgttgtcttttgttgcttctaatggctcaaagatactaaaatgaaagcaaatcacaacacaccatcggtaggttcattcgcatatagcgttgcttctaatggctcaaagatactaagaactcgcaaaaaaacggcaaaatttggataaataaagtaagtgtttggtattgaggagagttaagccaaattcttctatacctttccaaatcgctaaaatgcaggataatgaaaggttaagagaaagatttgctacttatccgttgccttttttagccccggataatccggcaaaataacgcttgaccacctgcggttttaccgttcaccatgcaaagaaccctatattttgctcgtaaagataaccgtttttttccgtttttcatggaaatacaggttatgttaccggcatccggggttttattctttgttccgctataattttcataactgtaaataactctatatcaagtaattttgcaacataaaaaaatagagttatgaaacagacggatgtaacggttacgttctacctcaaaaagagcgaaatgaatgacgagggacattgcccggtcatggcgaaacttgttgtcggcaaattttcagaagcggcttttagcgcgaaaatgtccgtacccgctgcactgtgggcatccggacgtgccacgggtaaaagtaacgccgcgcgggaaatcaaccggcaactggacgatttgcgagcttcagccatttccatttatgccgaactgtcagccacccgtgagaatgtaacggctgaagaaataaggaatctgttgttggggacggctttcgggcaggaaaccctgttgggttatttccggacgttcatcgaacatttcgaaaaacgtgtcggcgtgaaccgggaaaagggaacagcgcaatcttaccgctatgcttgtaactgtgtggccgctttcatccaggagaaatacaagttgtcggatgttcctttcacggccctgaaccgttcattcatcgacaactatgacctctacctacgcacggagcgccgctttgccctgggaactatcgtgttgcttgtcacacggttgaacacgattgtcggggaagccatcgcggaagggattatcactgccgacccgttcgcgggttatgaagccgaacatcccgagcgggaacagaaataccttaccgccgtggagttacaacggctgatgaccacacccctgcacgacccgaaactctaccatatccgcgacctgttcctcttctcctgctacacgggtatcccttacggggacatgtgccgcctgacgacggaggatctggaagtggccgaggacggtgaggtatggatcaagaccgcccgcaagaagacgaaaatcgactatgaagtgccgttgctcgacataccgttgctcatcctcgacaagtaccgggatatggccccggaaggaaaactgctgccgatgtacagcaacaacgaactcaaccggacgctgaaacgtattgccgccatttgcggaattgaacggaagctcgtctttcactgcggacgccatacctacgccaccgagatcacgctttcgcatggtgtcccgcttgaaaccgtcagtaaaatgctggggcatagccgcatttccacgacgcagatttacgccaaagtgaccgatgacaagatcgacatggatacccggtctttagaggaaaagattgccggtcgcttctccgtagctatttaatctatcattgacaatcaaattcacaacgattatggaaccgaataataaagagataaaacgtcgcagcacgttctccctgctgttctacatcaaccgcacgaaagtccgcaaggacggaacatgtaaattgttatgcaaggtaagcatcgatgccaagtcggccccgatcaatatcaacgcgtttgtcgatccatcgctctggaatccggaaaccaaaagggcgaacggacgaagcgagaacgcccgaacggtaaacctggcaatagagaaactgaccgaaaaaatcaccggacattaccgccatattcgtaaaagcctcggtttcgtgacggccgagctggtcaaaaacgccgtggaaggaatcgggcagaaaccgttcaccctccttgccttgttccgcgagcataacgaggagttccgcaagcgtgtcggcgtggatcgcaaggaagaaacctatgaaagttacgagaactcctataatattttagcctccttcgtgaaaaaaaggaaggaaaaggaggatgtagcgttgcggagccttgaccgggagttctacgatgattttgaaatattcctgcgtacagatcgtgaaatgaaacccaagacagtacacgagcatctttaccggttgaagaaaatgaccaagcgggctgtcagtcagggtacactccggcgcgacccttacgggaagctgcacccggaactgccccagcgcaagagccgccatttgaaactcgaagacctcaaaaaactgatggaaactcccgtcgataaacccaacctccagcgggtgcgggactggtttctcttcgctaccttcacggggttgtcctacgccgacctgaaacgcttgtccgaaaaagacatcacgcagtcggacgacggaacgtactggatacacatccggcgccagaagaccgaaacgccctcggccatccgcctgctgaacgtgccgttgcagatcatcgagaaataccgccacgagcgtaaaagcgacaggattttcaacctctattgccgggggtatctcatcaagctcaccagagaactgggacggacatacggcttcgacatgacctttcacaaggcgaggcacaatttcgggacacatatcacgctctcgttgggtgtgcctatcgaaactgtcagccgcatgatgggacacaagagcatttccaccacgcagatttacgccaaagtgaccgaccgcaaggtggacgaggacatgaaacgtctgaaagaacagaccaaaggccggaaaataaatctctacgaggaggacgaaccggaaacggcagatattataacggtaaacggttgaacagtataacaaaaattgataaatttgtatgactatgacgacaagagaacctatcagcattgaaaacgggcgggtggaaatccacacgccggagaaccgtgtatggctcacgcgccaccagattgccgacctgttcggagtcttcgttcctgccgtggggagcaacatccgctccatactcaaaagcggcatactccgtgaggagcgggtttaccgccgggagcgcaaccgtgacggcggtattgtcgagctgtattcgctcgaaatgatcgccgcgctggctttccgcttaaaatccgggaatgcagaagccttccgacggtggcttgtccgaagggccacgacgaccgctgtcgtctggcagctccccggcatgaacacgatattgaattgaaaaagaagaacggccaacgttttggccgttcttcttttatacccattcctgtcccccgatacatttcttccgggaatcttccaggagtttctgtatctcggattccatgtatagtaccttgccctgaatcaaataatagggaatgattcgcgccgtgcggtattcctgcaatgtacgcctgctgattttcagcagccgggacaattcctcgtcggtgacgaaccgctctcccttgagtgtccggcctccggaggattccagtttatccagtgccttgccggccttttccaaacgccggaagagatccgccacacgcggatcgtgcttgtcgatgaaataatggctcataacgcggcggtattaggatagtgcgacgattgcagcagcttcccgacatcttccggtttgtagaagattttgtgacggatgcggctgaaaggcagcaaccctttctcccggtaggtttgcagggtacgtttcgatatacccagcacgtcacagacatcctggttgtccagccattttttcaaactcacgtcctcttgcctgcggcataacgcctcggcttttctttcaatggcttccacgtgccctgccagcgcgtcgaaagccttcacgtccatacttattatttccatgttctgtttcattttttgtttcccggatgcccaaaagtacacaaatggacagtatcttgttatcagccagtggcatatggacgtatccgtcttcaaagtggcagcgagtggcgccacgtccggcggaaacgatcctccgccgatacgggatcggcacgctccgatacgccaatcgcccgtgaaaggaaatgttcgcgggcgatttatcattccatgcagggtgagccgtgaaccgactttctcgagcgttcacggcatatcgttttctccccgtttctctcccataaccttttcctctctttttttcatgccgcggagcgcggtatggaaatctgttgtcagtagcaaaggtagttacggggctcacgctgctgcaagatcgggccgcggggcggtttgccgcaaaatcttcctctttccctgcgggcgagcgtattttccgacaaaatcttgcagcagctatccccgacaccttttgatgctaccgaaacagattccatccataccggctccgctacggcataaaaaaaaagtcaaaggttatgagaaacgaagagaaaaataaatggaaacagaaatcctccaaccttccacttggcataaaggcaaaggtcgggttggcggtaaaggtcggggcggtggctttgggcttccacgtgtggggtatcgactttatttgggtcgttttgggcttcacgttctgttatgacatcctgcggggcattttctcctgccttgtttctctcgtggctctaaccggctttttctatttcctattcactcacatcttctaaatttttacaggtatgacaaagtacatttcattattcggagcgactaccacggacacacgggtgcaggtagtcaaggaaaaccaggtaatcatcggtatcggtgcgggtgcgagcagaaagcgttacgtcgtttacaaggtggaacacaccgcccgtggctacgtgtaccacatggtcgataccgaaacaaaggaaatcagccaaacggacattctgcgacccctctcgcaaacattcggtatcggcaggtactacgacgacgtgaaccccgagttcatggacgctttcgaggtggctttgctcgtggggcaggcggaagagcaagccacggcgcaggccatcgccgccgccaaagagaaagccgagcatgaccgcatagcggaaataggagcgcagaggttacgccgcatcatgcccgaaggggtgcagggcgtaatcatcgccgaactcaacgaaacggaatacactgacccctcttacgagtgttcgaccacccgaagcgtgcgtaccgtcattctcggcttttcggccacctcccgcaacggcttcggggagttgagaaaggcggcggccaatttcccgcaaacggcgcacctctccgaatacgaccccaagaacgaacaccgctatcccgttttcacgctcggcaaaagtccgaaatacgggtggagtgtctgcaaactgacccactacacacgtgaagggtacatcgacaggctggcatatatcgcaggaaacgaggagaatatatgtctgcccgagccgaaagacgaaaaacgggcggaacgcactgaaacgagcgtgcaaggcgggtttatcatcgtggactattccgagaaggcgatagccgtattcggggacaccaagcccgtcaaggacgcccttcacgcactcgggggacgcttcaacgcacggctgacgcatgacgggcagaagagagcgggatggattttccaaaagaccaaagaggacgaggtgcggcggcttctcggaaaggacgaataaatgttgaacacggggcggctcgccgccccacaataccaaaaaatcatggcacaaggaacagattatttcaaactgacgatacagaactatctcgacgcacgggcacgggaggacgaacttttcgcaccccgatacgccaacccgaaaaagaacattgacgattgctgcactttcatcatcaaccaagtacggcagagcggttgcaacgggtttgccgacgaggaaatatactctatggcactccactattacgacgaggaggacatcgacatcggcaaacccgtcagttgcaaggtagtggtcaatcacaccgttgaactgaccgaggaggaaaaagccgaggcacggcggaacgccatacggaaggccgagagcgaagcctacgccaagttggcgaaagccaagtccaaacccaagaaaatcgaagataacaaactaatgcccagtctattttagttatgaaaccgagaacaaaattccaacagagcgttgtggcggcaagcaaacacctgccgccgcttacccccgcacaaatcgaatgggggtacaagaactgcatcgagcatatcggacgccgcacgccgaaaggacttatcacctgcaccgagtgcggccacacgtggcagagcgaaaacggagaactcacggacaatctgttagggtgcgagtgtccgcactgccacaccacgctgaaagtggaaaccaccctgcgccgcaagttcaacgattacgagtatttgtgcatcgtaacccgctgcaagggttttcaagtcctgcgcttcgtctatatcgagtgttgggcgaaagtgggacagacacccgtttacacccatatcgaagccgtacagcggtggattgcccccgacggacgctccgcaaccttcgcacggctgcgcccgatgggcttcttcgttcacgggtggagttggtcgagcgcattggaactgcgggcggagaacgacgggaaatacaacatcacgcccacacgcatctatccccggcaacggcttatccccgaactgcgccgaagcggttacggcaaacaactccccgatgtaacccctttcgaccttatccacctgctgctctcggagaacaaggccgaaacgctgcttaaagcgggacaaacggcactcgtgcgatttttcgcccgttcctcccgcaatatcgccgactattggccggccatccgtatcgccatccgtaacgggtacgctatcgggaaaccgacggaatggtgcgactacatcgacctgctgcgatttttcgggaaagacctgcataacgcccatttcgtgtgtcccgcagacctgcccgcagcgcatgacctctacatggctaaaaaacggcgacacatgcaaatggaacggcggcaggaggaacggcgcaaggcgttggaacaggaagcctcgtttgtcaaagccaaaggacggtttttcggagtggagttttccgacggggaaatccgcatcaaggtattggacagcgttgaagccatacggcaggagggcgaggccatgcaccactgcgtgtttaccaacgaatactatctgaaagccgactcgctcatactctcggccacaatcgacggcaaacgtatcgaaacgatagaggtgtccctaaaacgcatggaggtcgtgcagagccgtggcgtgtgtaacaagaataccccataccacgggcaaatactgaaactgatgaaggggaacatgtcccttatacggaaacgaatgacagcataaaaatcggggcggcgaaagccgcccgc

SEQ ID NO: 4099 - DNA, 22175 bp, synthetic construct
  misc_feature 1..22175: note = Synthetic
  variation 3520..6034: note = note, n is a, c, g, or t
  source 1..22175: mol_type = other DNA
taaacggaatgccggagcgggtaagctcatcaaacggaaatcattacgcggtgtcttcaccaataaagctccgcttccgtatttcatcaccaacgtatccacgccctgccttaaactgaacaccctggaattttattttctgccggaaaggctgctgatcagggaaggaaacaaattcgcggcggtgttttataaaaatctgcggataaccgggtatacgacgcgttttattgaaaatgagtggctgccaccggatgcacaggtaattgatcaaacctggcggtatgtcaataaacgcgggggaccggacaggcgttttaataataaccggcaaatccccgtttgcgcttattctgaatatattctgacttccgataccgggatttacgaaatcatctccacctcgaagaaaggtgcgatggacgatttcgcaagctttctggggcagatcggcaaccttcaggcaaggatgcccatggggtaagcccaaggatggaaaccaatcaggctgatgaaaagtgcacataaaagcgcacaggaattaatgattcaattttgctacagctaaaacttaatacgataatggattttaaagatcagatactgcaattagcctcccgtgtcgagaaattgatcccacagctcaagaccgaggaagccaccaagaacgccctaatcatgcctttcatacaggtattgggctacgacgtattcaaccccttcgaggtcaaccccgaatttatcgctgatatcggcatcaagaaaggggagaaggtcgactacgctatcatgaaagaccgtgaaccggccatcctcatcgagtgcaagcaccacctcgaagacctcgatccgcataattcgcagctgttccggtatttccataccaccaaagcgaaattcggtctgctgaccaacgggctgaactaccggttctacactgacctcatagaaaagaacaagatggatgcaagccctttcttcgagttcaatattacggagatcaaggaaacagaaattgtggagctgaaaaagttccataaatcctatttcgacgtggagagcatcacgaacaccgccagcgagctgaagtacctgaatgaactgaaaggcctgctgaataaagagctgatcctgccttcagaagcttttgtgaccttcctgaccaaacaggtttattcaggggtgatcacgaccaaggtaagagaacagtttaccccgatcgtcaaacgttcgctgaacctgctggtcagcgatgcgatcagtgagcggctgaaatctgcattgaaccaggagaagcaaatggaagtcgccgaggccgtgaaaatggaagaagccgtagctgaaccgcagaacggtatcgtcaccaccgaagaggaaatcgaaggcttccatatcgtcaaatccatgctccggcagcacgtaggtgcgaaccgcattacttaccgcgacgctttatcctatttcgccatcctcctcgacgataacaaccgcaagaccatttgccggctgtatctcggaacaggcaggaaatacctcgtggtactggatgaagccaaaaaagaagtcaggcatgagattcagtccgtagatgaaatctattcccatctggatgccctgcttacagttatacaaagattggaaaaggttaaggtttaacgatagatttgacatgtcgtttcgctttgatgaatatagagctgctgtattacaggattatgagctgcgtaaggcagcgaataatcttaggtttggtatggatcacccaacagcagtaacgctaagagacgaggcgatttttgtctgcaccagcagatttaagcgatcagatgaaaaagttttagctactttttttaaaagtcaccaggatcagactgggtatgtgagcgccataactgaaattaacgtcagctgctttaaaccactcattaattttataaagggcagaacgcaaaagccggaagagcgggtagtagaattgctggcctggctgacggattttgaagccagaccttatcaacattatattgttgtaacgcccgaaggcggaaaaccgataactgcacttatcgatgcagcgaggtcgggttcaggagtggatgaaggccaggttcgggaatacaaaagtcagcaatccgaagttggaagtggaaaaaacggaggagaaattgaagccaggccttctagtcagaaaagatggtcaatggcatggaaaaatgctatattgatccttttggccttcccctgggttttgtggatgctggcacccaaaccggccccacccggttccgtatatatttgcgatagccagggagccaaaaggtatcatttacgcaagaactgcggcggcctgcggaattgcaagcacgagatcatcactgtcagtctggatagcgcaaagaaaacggggaggacactatgtcacttggagggaggctaagcaatcaacgcgggaatctggctgtcggcaactgcttttcacaaatgcgtaaaaaagaataaatgtgtcattgcaattggcggcggcatgcgcttttataataagtatttcggatgtatgtagatgctgaaaaccaaaataggatcggatatactatttggtttgcccatagcccgtaaatcataagacctcctcactatccaaattgtgaggaggctcgttgatagggaaatcgtaaaggtgcggtcggagatataccgccagaccgcacctttacgatttcaacaaggatcagatcgccaatgagccggttgtgacctgtcttgcaagtgacgttgccttgccacgtgtaccgggcggtaaccattattacaagcatagttttttgctgcaagttgggtggagaaattactgccaacctgagagccattaacgatgactacatagtgggaagtcggagtgtgctcgcttgaagcgtgaggtctgtgttctacatatgctgctgccataataaatatgattttgtaaaaaaagaatttctaaaaaatgtggcggttaaatagtctgtcttgatatgtgagatatatcagcatcagtcacagattaacgcttttcaccgggtttgtgaatgtgtggtttaagcgtagggtgctttggcgcgtttggtcgatcaacacgttgtcttttgtcatctgagccgtcttctttctgacgctttggtccagttttaattgctactatttgtttcatgatataaggaaattaatggatataaaaatagccaacctcatacaccatattttgcggaaacccgcaactgaccaaatcagttcatagacaaatgcgactggaatttccggccctgcagactaagagttgtacaatagtcggttgcgtcttgcttcaatttattaaagagattttttaaaaattatgccgaagctgtggatcgcaaatgtggaaccggtggttgtaaacctgaagcataatagtagattcaaaagtactacgtactgttttaagccagtgcacgtccattgtgatttgctttcattctttgaacaactgatatttggaacaacnnnnnnnnnnnnnnnnnnnnnnnnnnnnnnnnnnnnnnnnnnnnnnnnnnnnnnnnnnnnnnnnnnnnnnnnnnnnnnnnnnnnnnnnnnnnnnnnnnnnnnnnnnnnnnnnnnnnnnnnnnnnnnnnnnnnnnnnnnnnnnnnnnnnnnnnnnnnnnnnnnnnnnnnnnnnnnnnnnnnnnnnnnnnnnnnnnnnnnnnnnnnnnnnnnnnnnnnnnnnnnnnnnnnnnnnnnnnnnnnnnnnnnnnnnnnnnnnnnnnnnnnnnnnnnnnnnnnnnnnnnnnnnnnnnnnnnnnnnnnnnnnnnnnnnnnnnnnnnnnnnnnnnnnnnnnnnnnnnnnnnnnnnnnnnnnnnnnnnnnnnnnnnnnnnnnnnnnnnnnnnnnnnnnnnnnnnnnnnnnnnnnnnnnnnnnnnnnnnnnnnnnnnnnnnnnnnnnnnnnnnnnnnnnnnnnnnnnnnnnnnnnnnnnnnnnnnnnnnnnnnnnnnnnnnnnnnnnnnnnnnnnnnnnnnnnnnnnnnnnnnnnnnnnnnnnnnnnnnnnnnnnnnnnnnnnnnnnnnnnnnnnnnnnnnnnnnnnnnnnnnnnnnnnnnnnnnnnnnnnnnnnnnnnnnnnnnnnnnnnnnnnnnnnnnnnnnnnnnnnnnnnnnnnnnnnnnnnnnnnnnnnnnnnnnnnnnnnnnnnnnnnnnnnnnnnnnnnnnnnnnnnnnnnnnnnnnnnnnnnnnnnnnnnnnnnnnnnnnnnnnnnnnnnnnnnnnnnnnnnnnnnnnnnnnnnnnnnnnnnnnnnnnnnnnnnnnnnnnnnnnnnnnnnnnnnnnnnnnnnnnnnnnnnnnnnnnnnnnnnnnnnnnnnnnnnnnnnnnnnnnnnnnnnnnnnnnnnnnnnnnnnnnnnnnnnnnnnnnnnnnnnnnnnnnnnnnnnnnnnnnnnnnnnnnnnnnnnnnnnnnnnnnnnnnnnnnnnnnnnnnnnnnnnnnnnnnnnnnnnnnnnnnnnnnnnnnnnnnnnnnnnnnnnnnnnnnnnnnnnnnnnnnnnnnnnnnnnnnnnnnnnnnnnnnnnnnnnnnnnnnnnnnnnnnnnnnnnnnnnnnnnnnnnnnnnnnnnnnnnnnnnnnnnnnnnnnnnnnnnnnnnnnnnnnnnnnnnnnnnnnnnnnnnnnnnnnnnnnnnnnnnnnnnnnnnnnnnnnnnnnnnnnnnnnnnnnnnnnnnnnnnnnnnnnnnnnnnnnnnnnnnnnnnnnnnnnnnnnnnnnnnnnnnnnnnnnnnnnnnnnnnnnnnnnnnnnnnnnnnnnnnnnnnnnnnnnnnnnnnnnnnnnnnnnnnnnnnnnnnnnnnnnnnnnnnnnnnnnnnnnnnnnnnnnnnnnnnnnnnnnnnnnnnnnnnnnnnnnnnnnnnnnnnnnnnnnnnnnnnnnnnnnnnnnnnnnnnnnnnnnnnnnnnnnnnnnnnnnnnnnnnnnnnnnnnnnnnnnnnnnnnnnnnnnnnnnnnnnnnnnnnnnnnnnnnnnnnnnnnnnnnnnnnnnnnnnnnnnnnnnnnnnnnnnnnnnnnnnnnnnnnnnnnnnnnnnnnnnnnnnnnnnnnnnnnnnnnnnnnnnnnnnnnnnnnnnnnnnnnnnnnnnnnnnnnnnnnnnnnnnnnnnnnnnnnnnnnnnnnnnnnnnnnnnnnnnnnnnnnnnnnnnnnnnnnnnnnnnnnnnnnnnnnnnnnnnnnnnnnnnnnnnnnnnnnnnnnnnnnnnnnnnnnnnnnnnnnnnnnnnnnnnnnnnnnnnnnnnnnnnnnnnnnnnnnnnnnnnnnnnnnnnnnnnnnnnnnnnnnnnnnnnnnnnnnnnnnnnnnnnnnnnnnnnnnnnnnnnnnnnnnnnnnnnnnnnnnnnnnnnnnnnnnnnnnnnnnnnnnnnnnnnnnnnnnnnnnnnnnnnnnnnnnnnnnnnnnnnnnnnnnnnnnnnnnnnnnnnnnnnnnnnnnnnnnnnnnnnnnnnnnnnnnnnnnnnnnnnnnnnnnnnnnnnnnnnnnnnnnnnnnnnnnnnnnnnnnnnnnnnnnnnnnnnnnnnnnnnnnnnnnnnnnnnnnnnnnnnnnnnnnnnnnnnnnnnnnnnnnnnnnnnnnnnnnnnnnnnnnnnnnnnnnnnnnnnnnnnnnnnnnnnnnnnnnnnnnnnnnnnnnnnnnnnnnnnnnnnnnnnnnnnnnnnnnnnnnnnnnnnnnnnnnnnnnnnnnnnnnnnnnnnnnnnnnnnnnnnnnnnnnnnnnnnnnnnnnnnnnnnnnnnnnnnnnnnnnnnnnnnnnnnnnnnnnnnnnnnnnnnnnnnnnnnnnnnnnnnnnnnnnnnnnnnnnnnnnnnnnnnnnnnnnnnnnnnnnnnnnnnnnnnnnnnnnnnnnnnnnnnnnnnnnnnnnnnnnnnnnnnnnnnnnnnnnnnnnnnnnnnnnnnnnnnnnnnnnnnnnnnnnnnnnnnnnnnnnnnnnnnnnnnnnnnnnnnnnnnnnnnnnnnnnnnnnnnnnnnnnnnnnnnnnnnnnnnnnnnnnnnnnnnnnnnnnnnntatttaaaaatcagttacttgtgttctaatttaggatttgaaaatccggttgcttgggcttccggatttgaaattctaaaacaattctaattgctgcggggtatctggaagctctttttcttctttgccataaaacaattctatcattccgaactgcttatctgtaatggtcattatacctacatggcctttaggcggaagtattttttttacacgttttatgtgaacgtcagcattttcacgactgctgcaatgccgcaagtaaatggaaaattgaaacatgccaaaaccatctttcataatatccttacgaaacctggtgtagatctgcctgtcctttttagtttctgtaggtagatcaaaaaaaactaatatccacaaaattcggtattcatttaaacgcattcatcaaatggagatattattcgttttctaagttgtattcaatcgtacttcctgtatcctcatatttgaaatcctcatcaacgttggaggttacgccctttttggggttaaaatttttcataacagggtagtttattttcctgttctttccttcgtaacatctggctaaagacgccgttgtgttttgtacgccaaccattaaaggacttctgcttttttcaaaccgtacgtcaacagatgcaatagctaataattgggatttaatggaattgcccagctctaaaaagttctcaccattatcaataatctttaaaactatcaaatcgacatacgggcggtaaggttccataatatcatcagcaaggcaataggcattatatttattccggtgatggattcctaatgttggtattaggcctgaacataccagtccgcgcgctacaatggctcttaaaattgcgtaaccgtaattcagcaaattattgggaggatcgccctcacgaccgcggaagaattcaactttcttgggaaagacatttttccagtagtaagcggcagcccgcccttcataattatccgggtcgcctgaacgtacagacttcgcccaatacaacatgttgtcatgtgcaattccccggtctgctaataccgcagcttgatttaaaattttggtttgaattgtttgttgccaaagctgtttcttcaacggttgtgaagcgtcaatctgatgccggaaccgttcactttgtgtgtcatgcccatcaatcggcaacatcattcctgttggatggtgtgtatcgttgcaagtgatgattgcagcgttgttatctaataatgctgcaatacatccgtgcgtaatggtaatctgttggtgatccagcacaagaattccgatatcttcaataggtacggattttctagattcctgttcgcctaaaattttcaagtgtggaagatcgataattaactgaccttgtgttaaacttagatacgccggattactgaagtgaagtgtacgtttgatcatattttcccattttaattttggtcccgggttcgtttatttcatttacagttggtagcaatagatgatcttatttttcctatctgctgtagtgccggaatgtgatatggtttgaattgcttttttaatattgtgacgaataaaaatagcgtacttagtaacaccctgtttgcggaaacccgtaaccaaataatttttattgggtttagatttacatcatttggattgatgaaggataatggcggcgaaatatttgaaaatggaaattaatcgttttggctgagtcggtggaacctgaacaaataagcattcggcagtccaaaatagttccattttcgcagtagcgatgtgctgtctttctgattgagaatgcgcgcgaaacaatttgacataaaaaagccccgtattgtaagacgaggcgcttaatgtttacacaacggaataatccttattgcgatttgctttcgacgtaaatatatacatatttttagaaaaacaaagacacaacctaattgcatatcatgaagaaaattcttggcctcgatctcggtactacttctatcggttgggctttcgtaaaggaagctgaaagcgataatgaaaactcatccattataaaaataggggtacgtgttaatccgctcacgacggatgagcaaaccaactttgaaaaaggcaagaaattctcagtaacagcaggtcgcacattggcacgtggtgccaggcgaagtttgcaacggtacaaacaacgccgtcaaaatcttattaatgtattgaaaaaatcaggtattgttgatgagcatgcattgttggcagaaaatgataaaaacactacccattcaacgtatgcgttgagggctaaagctgcagttggaaaaatagggaaggacgaatttgcacgcgtattattaatgatcaacaaaaagcggggttataaaagcagccgtaaagccaatagtgaagatgaaggccagctaattgatggcatggccatcgctaaaaggctttatgagcaaaagcttacccccgggcaattgtgctatcagcttttaaaggaagggaaaaagacattgcctgatttttacagatccgatttgaacgctgagttcaataaggtatgggatctgcaatctatatattacccggatgtctttgatgatgatttgaaaagaacaattgaaggtaaaggacaaaaggcaacttcggccattttttggactaaatataattttaacactgctgaaaataaaggtacaagggaagataaaaaattgcaagcctataaatggcgaagtatggccattcatacacaactatcaattgaagaagccgcttttgttatagccgatattaatggtaatatcaataattcgagcgggtatttaggtgcaatcagcgaccgtagtaaagaactatattttaacaggcaaaccatcggccagtatctttatcatcaattgaaggacaatcctcatacgcgcactaaaggccaggtattttatcggcaggattattttgatgagtttgaaaccatttgggaaacacaagcaaagtatcatcctgaacttacgaaagctcttaaagaagaaataagggacatcgttattttttaccagcgtaagttaagatcacaaaaaggattagttagtttctgcgagtttgaaagcaaattggttgaaattataaaggatggcaaaaaggtaagttataccataggcgcaaaggttatacccaaatcatctcctctttttcaagagtttaagatttggcaaaacctgaataaccttctaattcagaacaaaaagagcaaggaggttttatcatttgatttggatgctaaacgattcctgtttaacgaattgaatattaaaggcaatttaaaaaaagaacaggtattcaaactgctcggctataaacccaatgaatgggacttgaattttccagctgttgaaggaaaccgacccaatcagcttttatatgaagcttacttgaaaatgatggtatacgaagggcacgatgatatagatatagaggtattaaccgctgccgaaataaagtcagcggtactgtcattttttgaaatccattcgatcgacataaccattcttgattttgacagcaatttagagggtagcgcctttgaaaaacaacccgcttatcaattgtggcatctgttgtactcgtatgaaggtgataattctcccacaggcaacgacaaactttttgaattgttaaagacaaagtttggaattaaaaaggaacacgcccaaatacttgctaaggcagaccttgggctggattatgcgaatttaagcgcgaaagctatccgtaatattttgccattcctgaaagcgggtcatccttttgcaaaaaaggataaagatgaaaaaattgccagtgcaacggcattagcgggctacaatcattcttcgtaattaagaaaggaggagaatgagaaccgtattctaaaggattatttggatctgcttccaaaaaacagcttgcgaaatccggtggtagaaaaaatattaaatcaaatggttaatgtcgttaacgcaatcattgccgaccctaatcttggtaagcccgatgaaattcgcattgaactggcccgggaattaaaaaagagtcttaaggagcgggaagaagcaacggctcaaattaataaggctaccgttgaacatgatgaaataaggcttttactcataagggagttcggtatcaaaaatccaacccgcaatgatattgttagatataagctttatgatgaattgaaatttaatggatataaagatttatataccaatgaatatatttcccgtgaagaactattttcaaaaaaatatgatatagagcacattatcccgcagtcaagggtgtttgacgatagcttttccaataaaaccattgtagaaaagaggataaatcaagcaaaagacaatgctacagcttacgattatattgatactaaaggggcggaaagattaagcgaatacagattaagggtagaagcttatttaaaagagtatcctgaaagaaaggcaaaatataaaaaactactcatgaagggcgatgcgattggcgagggttttatagaccgggatctacgggatagccaatacatcgcaaagaaagctaagaccatgctgcatgaggtttgcaggaccattgtatctactaccggtagtgttacacaacgtttgcgggaagattgggatttggttaatgtgatgcaggaaataaatttagaaaaataccgcaaacaactgcttacagaaatggtggagaaaaaagatggtaactttaaagaacgcattgttgactggacaaaacgaaatgaccaccggcaccacgcgatggacgcgcttactatcgctttcaccaagcataaccacattcaatacttaaataatctaaatgcccgaaagaatgacgataaattagggcacgcgatagctggtattgaaaaaaaagaaacatattttcatatagatgatagtgggaacaaaaaaaggcgatttaaatctccattaacgaatttcagagaagaggctaaaaaacaccttgaaaatgtattggtatcgtgcaaagccaaaaacaaggtggtgacaaaaaataaaaataaaattaaaagcggtaaagaaagggagcctcaaaaaacactaacaccacgcggtcaactgcataaagaaactgtgtacgggagaatacagcaatatattgtaaaagaggaaaaggtaagcgggaaatttgatgaagcgactatcgctaaagtcacgaagccgaaatacagggaagcgcttttaaaacgattgcaggaaaataataacgatcctgtaaaagcattcacagggaaaaatgcacttagtaaaaaccctatttatttggatgcaaaaaacacagttttactacctgaagtgctaaaactttcctggctcgaagaagactatgccatacgcaaggatatttctcccgatttaaaaattgaaaaggtaatagataaagggatacaaggaatattatacaaacgtctaaaagaatttggtggaaaggaaaaagaggcattttctaatcttgataaaaatcccatctggctgaatgaagccgccaagattgctattaaacgggtgacgataagcggtgtgaaaaatgcagagtcgcttcattttaaaaaagaccatcatggccgggaagtattagataagagcggcaggcccattcctgttgattttgtaagtactggcaataatcatcacgtagcaatttacagggatgaaaatggcaatctgcaggacgaagtagtttcattgtacaaagtaataacggaacgcataaatcaaggactaccagtggtcgataaaacttataatcagcatttaggatggcagttcctatttaccatgaaacaaaacgaatattttatatttccatcgactgatttcgatccgctggaaatagacctccttgatcctgttaacaataagttgatcagtccgcaattatttagggttcaaaaattttcgaaagtaatgtatggtaattcggcagtgagagattatgtatttaggcatcatttagaaacggttattgaagataagaaggagttgaaagacataacctataaatcaataaagagcctaccatatcttgaaaatatcatcaaagtaagaattaaccatataggtcaaattataaaggttggtgagtattaaaagagttcaagtcattaagggtggattaaaacgaaatagattattctgaatagcatccaagagtaagatccattggtagataggtatgaaaagaagcattaattaacatggccaaagcgaaatgtaagagttgtaaaaaaactactttttttgctttagttctattatttgttgctttaggtctctgatatgttcttctaaggtgctaattattttattgtttgccgacaacaaatcatcttttaattttatctggctttcgtaagattgtttgaagtgttcaatatctacttcggtatattccgaattaaataattgatttactttttggttattataaacgtaattattaaccgctgagtcgaaaaagtattccggatcaacaccaaaaagttctccgagcttaacggcattatcccacgaaagttttgtttgatcagactctagtttggaaatcgcaggttgcgtaacatctaattttgcagcaataaagccttgatcccagcctttttgttctctaagtaatctaatctttgttcctgttgtcattgcaagtaatttataacttaaggttatacgaatataaccctaagttatttatttaatatccacgaatatgtatttttgaagaagacaaaaacaaatataaaaatttagtttgaagcatagccagctattggcttctgttcgataattaaaatattattaaatttggaaacttcatagtcatttagacaaagttttacaagattctcgcgagatgaaaaccgctaattttccaagagcgtgagatgatagagtaagacattgtccccattcatatttttatgcattgggggctttgtttctatcagcttgctacgctcaaggctcttagcggtgccccattcgcggcaagacgaaacattgcccccaatgtgttatttatcggcattttcgttttgcgttagtttaaaattactttcgaaatgcatactagaaaattgcccttattattttgctatcattctttggctagtttaggcgaatttagcattgcattcccattttattctataaattcgctccaaaatataaagcacattgatgctggttcaaacacagttatttcccactccctccaaaaccccatcaagaacgtaataaaaagccctacataaatactgaaaacggcagccccgttaatagttaattaaaaccggctgccgttttctttctgttgcctgaccgtgaaaccactaatttttcaccggaagggctgtgctatgtcgttaattaccgtttatttcctggtcatatatgagtgcaatagtagtagacctgaaagatcagggtgtcagaacgcccgagcaggcggtccgagtattttttgaaagtttcgatcctgaagaagtgagggtaaggctgtgggaggcttttcgcgggtttgccctggcaaacgtgaacacaacggacaaggcactgcccgacatccaggatgtagccattcttttcgacggcctggtcagcctggtcaacggcatcaacgatctgcaaattaaaacaagcggccgctgtgtcatctgcggaagaagcgatgctggttgaagcaggagcgggggacaggcggcaacaatgatgacggcctggttaccgcgggttagtattcccggcagctgccgggttgttctggttcaataatttattctttaatgtgatttaaaatgaagcgatttttttgcttcctggccttgctttgcttttttttcggagcgggggcacaggaaaatacggacataaaggcgggtgcaggtacgatagttccgctaaagataggggacagggtaccgccggtggtactgtcgggtttaatcaatggtgccggtttatcggggaaagatctgtcggtctttaaaggtaaactgctgatactggatttctgggcgacctggtgcgcgccctgcgttgctgttatgccgaggatggactcgctgcaggaaaggtttgggggaaaactgcagattttgccggtggcctatgagggcgaagcagcggtacgggttttcctggacaagcgccgggcggccacagggcgcgaggcgcacggccccattataaccggtgacaaaactctcgctgcgctctttccgcaccagagcctgccgcactttgtatggatcggtaccgacggcatcgtcaaagccattacagatgaccgcgaagtaacagccgcccatatcagcgccatgctgggcccgcaggcggcgccgatgcctttaaagcgggatagcataaccgtttatgaccatacccggcctctgttcggctccggcgcacctgccgcaaacaccctgatgcaggccagtctctccccttacatcgaaggtatcggttcaggcatctacaaggatgtagacctcgattccggtgagcccgccaggaggatcactgcgcgcaaccagacggtcaccgacctgttccggctggcctaccagaaggaacagaaagaaacgctggtggaggtagcggataccaccgccctgctgccaccggccatccggggcagggcatacctcgactggctgaaagcgggccatggctattgctatgaactgctgctgcccgaaaaagaaaaaaaagaagcctaccgcctcatgcgggcccagctgcaaagctgtttcaatgcttatgacgcccatatcgagcaaaggaaagtcgagtgcctcgtactggtacgcacagacaaccgggaccggctgcataccgcaggcggccccccatcggcagccatcgacgggttcagctgcgattttgaaagctgctacctctacgttttcctgagccggatgaagatcgccatgcagggctatccctatcccctggtcgaccagaccggttatcaggagatggcggatatcaggctcagcgccaggatgaacgacctgaacgaggtgaaccgggccctggcggcctacggtctgcgatttgaaaagaaacccgcagagattaacatgctcatcatccgtgatgccggatccccggggcattaaccgctttttaccagtaaaaccattcctcatgaagccattgatacgaacatatttattcttgctttgcctggtcccggccatagttgcacaagcccaggacaacccggtcaccgggaccgtccgctcggcggaaacccgcctgcccctgcacggtgcgacggtacatctcaaagaaagcagcgggggggtcctgaccgacagcctcggccggtttaggctggcagtccctaaaggacaaagtgtattaacaatctcctttatcggatttcgcagccgggaaataccggtccccctgaacgcggagcccatcgaagttttcctggaacccgcagccgaagccatcccggaggtggtcgtatccaccggttaccagcaggtacccgccgaacgggcaacaggctcctttgtacagctggacaacaagctgctgaaccgcaggatcagtaccggtatcctcgacaggctggaagatgtaacccccgggctgctgttcaacaaaggaaagtccgcaggcgccaacctgatcagtatccgcgggcagaataccatttacgggaatgcgaacccgctggtcgtgctggataattttcctttcgacggcgacatcaatgacattaacccgaacgacgtcgaaagcatctccgtactcaaagacgccgcggcagcttcgatctggggttcccgcgccgggaacggcgtcatcgtgatcaccactaaaaaaggaaagtataaccaggccctgaagatcgggttcaatgcagccgccacagtgggggagaagcccgatttgttttaccagccccggatgtcctcagctgattttgccgccatggaaaagcaattgtttgccgccggcttttatgagcaggcagaaaacgggtacaacaacccggccatcacacctgtagccgaaatactgatcgcaggccgggacggccagatctccgcattggaagccgaccggcagatccgggagctgaccacgcacgatgtgcgcgacgattttaatcaatacttttaccggaagagcatcagccagcaatacgcactgaacctgaccagagggacggatatacagcgtttcaatctttccgcgggttacgaccataactgtgataatcttgtccggaacggttatgagcggtacactttcaatgcagggcagacgctggcgctgctgaaaaagaagctggagatcagcaccgccttttattacacacaatccaaaaccgtactggacaatccgggcaccggcctgatcggcctgaacagcgggaacggtgcctccctgtatccctacgcccggcttgccgacgcttcgggcaatcccctggccatcacgcacgattaccgggaaagctttatagccggcgcccggcagcagggcctgctcgactggagctacagcccgctggaggaaatgcggacaggggataaccggaacacagcggcagactaccggatcaacatcgccctctcgtacaagatcaggccgtatttaaccgctgcggtattataccagtacggcaggtccatcaccgacaaaagacaattgcaaagcctcgccagttattatacccgtaacctgatcaataattttacgcaggcggacggttccggcgggcttacctacgccatcccggtgggcgggatcttcgacgtcgggaacatcagcgccacaaccgaggactttcgtgctcagctcagcttcaacaggcagtggggggagaaacacagcctgaccgcgatcggcggatatgagctccggcaatttcataccctttccggcagcaaccgctcctacggttatgacgatacccacgcgaccgccctcccggtggattataccggctattatccccaatatgcaatacccggttacctcagcaccgtgccttacgataacagttttgcggacctgactgaccgcaacctgtcctattatgcgaatgccgcctacacgtttcttgaccgttatacggtttcgggcagcggcaggcttgaccggagcaacctcttcggcgtgaaagcgaaccagcagggcgttccgctgtattccgccgggctcagctggaacatcagtaaggaagccttctaccaggtcggatggctgcccagcctcaaattacgcctgacttatggctataacggcaatgtcaataaatcgatatccgcctataccacggcacaatacctgaccgggaaccccatcaatacgacctacgctgaagtgatcaacccgcccaacccggaactgcgctgggagcgggtcagggtgatcaatgcaggcattgattttgtcggtttgggcaaccgcctgagcggaaccatcgaggcctatttcaaacgcggcctcgacctgatcggcgatattccctacgccccttcggccggtatcacgaccttcaggggcaacaccgcgaacacccgggggcacggcatcgatatcaccctcaattccaggaacctgaccggggccttccaatggcagagcagtttactgttaagctacgtaaccgacaaagtaattgattacgcgctgaagcaggatgccggctcctactccagcttggcagacaatgaggtattcccactggcgggaaggccattctacgccgtatacagctaccgttttgcgggcctggacccccaaaccggggatccgcggggggacctgaacggccagcccagtaaagattacagcggtatactggcggcggccaggcccgacagcctgctttataacggacctgcgaggcccgttgttttcggcgcgttccggaacacatttacctacaaaaacttttccctgtccgccaacatcagttaccgtttcggttattacttccgccagcgtggtatttactacgccagtgtactgaacagtaccgggtattacgaggggcggtatgccgagcgctggcagcagcccggtgatgagcaccatacgacggtcccttcactgcccgcatcgatcgataatgcccgggacagtttttacaactactcctcggcaaccgtggaaaaagcgggtaacatccgcctgcaggatattagcctggcgtatgaattcaagcgttccgccaaccggggactgcctttcagcaggttgcaggtctacctgtatgccaacaacatcggtatcatctggaaggccaccaaaaccaggttcgacccggattacccatcggccgattatccgccggtgcgcacggtcgccctggggctgcggggagatttttaaagcaaggaaaattaaactgattaacagcaagtatatgaaaatacatcccattttacagatcgccttactggctgtagcctgtctgatgtgcgcctgccagaacggttacttgaagaaagcacccgataaatccgtcctcgtaccggagacatacgccgattttacagcactgatggacaatatgacggtgttcaataacagccccgccctgcaggagatcggctcggacgattaccggaccggagacgcaggctttaccgcgctgacctccgaattacaaaaaaacagctatatatgggcggcagatatctatgaaggacagccctgcccggactggaatatgccctaccagcaggtattctatgcgaatatcgtgctggatggcctcgctgccctgaaacccgcagccgcagaacaggaaagctggaatacggcaaggggaagcgcgctgtttcaccgggcctttgcgttttataacctggcgcagctctttgctgctgcttacgatccggcttcagccggaacccttcccggtattccgctcaggctgacggccgatgtcaacgtaaaggccggccggggcaacctgaagcaggtgtacgaccaggtgatccatgacctgaccgaagctgatcagctcctgcccggccaggtcgcttacaaaaaccgcccctccaaaacagcggccgaggccctgctggccagggtcttgctcagcatgggggattacacccgggccgcaacctacgcgacagcggcgctcagccgaaatcataacctgaccgactataacggactagatacgctcgcggccaatccttttccttatatccccgcggctgataacccggaagtgatcttttatgataaactgatcagctatgggttcagctcctcgacaaggacaacggtagcccccgacttattcagcctttatgccgcagacgacctgcgcagaccggtctttttcgccggtagcggaccaaatacctatttcaaagggcgctataccgggtttcggctgcagctgttcggcgggctcgcggtcgacgagcttttcctgatccgtgccgaatgcctggcaaggcaggggaaaacgggtgatgccctggcagacctgaacactctgctgaaatccaggtggcgcacaggaacctatcaggattttaccgtgagcagcaaggacgaacttttaaaaaaagtactcctcgaacggcgaaaggagctcgtgtttcgcggcatacgctggagcgatctccggcggctcaacaaagatcccgcgttcgccacgacgctcagccggacagtagcgggtaaatcctatacactggcaccgggggacaaacgatatctgttcccgatcccgcagcaggagctgctggcgaatgatatcgagcagaacgaaagataaaaacaaaaaacaaccggcgcgaggccggttgcagaacggatcaggcgggggttattgggcaaataccccggtttcctgtgaaatgtaaccactcgggttggtgttcgggttttggccggcaggataggtgcgggtacaaaccgttgatcccgggtcacagctgtaagcacctgtcacctggatgtaagtgctgccgctcaggccccatttcacattagccggtttagcagatgtggcgaatgcggcaccagtgcctaataataccgcgatggcggcgaggttcaatttcatgcctttcatgatgtgggaacgctttattggatcaaaaagcattcggaaaaactttggttaatgaatggttgcctactcttttcgcaggttttcggctttcccctgtttggatcagtcagttaatagaggctgttgctttcgttcagaaaggtgcaggtatatggcgatcaggttcaaaatcaggaagaaccagttgaaaatgaggtgcgctgtccaggacatatggctgaggatgccgccgcaggagcatggtacgcggtcccagtaatgcagcatgaccagggaaatgtaacccgtgaaagcgacaagcaatattgccgagagaattagcccggtcagtaccgtccgcttaaaggaaagaaagcccgcggttacgatctcggcgacaggcaggcagtaagttagtaatgcggcgaaatcgtgtgaaaagttctgattgtataactgctgcctgaagtctgaaaaggttagcagtttacttaaggctgcgtagataaacagcatgatcagtagtgaaataagcaaggattgaatggttgttttcatgttccggtgattgtctggaacaaagtacggtgggaagaaaaccgtaaaacagtggtaaatgggtggtaaactgtctttttgttagtgatatgattgatagcaagcgaattgtgtttttggaccaggtgttcgtcaggcagcctgtttttagctcatcggcataccgggtggaggcgctgcgcgctgcgctagggttgaatgtctttaaaaatgccctttggctggcctcgcccgaattctacagagaacttgacaagaagggttttgactttgatctgttgaacaaaaaagaacggctgactgccctgaagttcttcaaccggatgagttttcggtcaacgccgttcggcgcctttgccggcttcgggctggctacgtggcttcagggcaaaccggccaaacacggaatgaaccggaaatcttggctccatctgctgccatcggtgaaaagagagctggatctccgggatggttctccaatgaaagccggtgcgctgatctcagttaatcctacattatataaaatgaacacgggctggcgttacagccgttatgaattggctgattccggaaagttgctgttttttatttatatgctggagcacaacgagactgatgagctgttgctggcatgtattacaggcaggaccgcagcggcggacgaactgatccggtacctggtggaccttacggactgcacccctgaggaagcaagcgctcacctggattatcttttaaaggagcaggtattactggccgatagcaaggtatctttactgttggaagttggcaactacaaaaagctcaccctggattataccgagggcctggttttgccggctgccctgggggataaacagaccggttcaaaaggtgattttgcgcaaccgtccttatacgcggggctggaaactgatggtttgactggtctggaggaacactggcagcaggagatacgggcaacgatccgaatacttgacctgctggcaccagttccgccgaaaaacgccctggataaattcagcgcagatttcctgcttaaatttggcgatgagaaagtccctttgctgcaggcgctcgatcctgatctcgggatcgcttttgatggctttcagcatgccggggatcatgagcttttaaaaggcctggaattccgggaagcgtatcagcaagcggagcaggtgctatggacgccggttcatcaactttttatgaggatttggctgcaagacagaaaacggggggattgggaccccgttatccttactgatcatgacctggccggcctgcctccgtccgggctgccgttgcctccctccctgagtgttttttgttcaaccggcgacggaaagctgatattgcacaataccggcggggcgacagcaactgcgttaaccggtcggttttcagctttcagcagtgatttcggtagtttttgcagcactgtcgcagcggcggaaactgttgcgaacccggatg

SEQ ID NO: 4100 - DNA, 21575 bp, synthetic construct
  misc_feature 1..21575: note = Synthetic
  source 1..21575: mol_type = other DNA
gatattgtcaatgtaaatggaggtgcaattgctttagggcatccacttggatgttcggggacgaagttaacagtacaattattacatgaaatggaagcgcgtaaagcgaaatatggaatggtaacgatgtgtgttggtacaggacaaggagcagcttcaattttcgaatatctaaaataaaaactgtattaagtaaaatgtattaagtatggtacattttacttaatacatgatacaataatacatcaaaacataaaaatatgtctacaaatccaaatagattaataggaggtcaatatttaattaaagatgcctcttacaatgatattttcacgtacgaagatttatcagaagaacaacaaatgattttgcaatctgcaaaagaatttatcgataaagaagtagtgcctaaaaaacaccaaattgagaaaaaagattatgcgttgattgaagaattaatgcgtaaaattggtgaattaggtttattaggaatttctgttccagaagaatatggtggaatgggaatgggattcgttacaacaatgttagtgtgcgactatatttctggagcaacaggttcgttagcgacagcttttggagcgcatactggaattggaacaatgccaattttattgtacggaacagaagagcaaaaacaaaaatatttaccaaaattagcaactggtgagtggtttgcttcttattgtttaacggagccagaagcaggttctgatgcaaattctgggaaaacaaaagctgttttatcagaagatggcaaagaatatatcatcacaggtcaaaaaatgtggattacaaatgcaggttttgcagatttattcattgtttttgcacgtatcgatgatgataaaaatatcacaggctttattgtagaaaaagataaagctggtgctggattctcattaggagaagaagaagataaattaggaattgtttcttcatcaacacgtcaagtattctttaacgaagttcgtgttccggttgaaaatcttttaggagaaagagatggaggtttcaaaattgcgatgaatgcattaaatgttggtcgtatcaaattaggagcagcgtgtttagatgcgcaacgtcgtattttagattattctttacaatattcttcagagcgtaaacaattcaatacgtcaatcaatacgtttggtgcgattaaagagaaattagctgatatggctgtttctgcgtttacttcagaagctggtgcgtatcgtgcagcgaaagatgtacaagatgcaatcgaagataatatggcaaaaggaatgcctcataatgaagcggaattaaaaggtattgaagaatatgcgattgaagcttctattttaaaagtttggatttctgatgcagctcaaatttctgccgatcaaggaattcagatttatggaggaatgggatattcgaaagaaatgccaatggaagcagcttggagagatgcgcgtatttcgagaatttacgaaggaacgaacgaaatcaataccttattatgtgtttcgatgttagtaaaacgtgcattcaaaggaaaattagatttaatgtctcctgcaatgaatgtggcgaatgaattaatgtctattccatcgtttgatgttccagattattcggaattatttgcgcaagaaaaagaaatcattgcaaatcttaagaaagcgttctttatggttgcaggttctgctttgcaaaaatttggtgcagaattagaacaacatcaacaattgattattgcggcttctcgtattatgcaagaaatttatatggttgaatcggcgatgttacgtgcagaaaaaattgcaaatgtaaaaggtgctgatgcagtgaaaaatgcagaaaaattagttcaattacaattattcaaatcagtagaaattattaaaacagaagcgactcgcggaattgtttctttcacagaaggagatgagcaacgcatgatgttatctggtttaagaagatttacacgttacaacgaatatccaaacgtagttaacttgaaaactgaaattgcagatcttttaatcaaagaaaataaatacactttctaagtatattttaaatacaaattatttaaagcagtcaatttattggctgcttttatttttttaacatgctgaaatataatttggtatatcgtttgatgaatctagggcaagtactagtctttatataagttagttgagttttcatggtacttaagttttagtagagaaaggcctcagttgttcccaattgaggtttttttatactttgaggttaaagtttattcattaaaaataagcgagttaagtcgttatttcttaatgaaatacttttcgatagaaatgatttgaagtaactttaattcaaattaataacccaaaaacaaagcttatgataattaatgcagcaattcttacgttgaccatgtttgcaacatttagtattatgtgtctagtcaaattagatgaattaaaaaaaataaaataaaaccgaaactccatttctataaatggagttttgttgttttataaagttatatttacttcaattaatacattcgaaatgaaaaagaagttagttgttttgacgggagctggaattagtgcagaaagtggaatttcaacttttcgagatgccaacggtttgtgggaaaatcatgatattatggaagtcgcttcgattgatggttatcaaagaaatcctaaattggttcaagaattctacaatcaacgccgaaaacaattgttcgatgttgaacccaatgcagcacatttttttctgaaagagttagaacaagactttgaagtttctattattacccaaaatgttgatgatttgcacgaaagagcaggttcgtctaaaataattcatttgcatggcgaattgagaaaagcgcgaagcgaaaaaaacgaaaatctaattattgattggaataaagatatcaaacttggagatttggcggaagatggaaatcaactccgtccgcatattgtgtggttcggcgaaatggttccagaaatagaaaatgcgattgatgaggttttaaaggcggatattttggtgattattggaacgtcaatgcaagtatatccagctgcttcgctcaaagattattcaaaaactaatgtaccaattatctatatcgatccatcagatacgtataccaattcatctattacgcatatcaagaaaaaagcaacagaaagtatcgaagaattaaaaacaattttgaataatttttaatcttttacgttttaatcttggttaattattttaaatgatatgaagtatatatttctaccattattagtcttttctatcaatgcggctgctcaagagctgaatccattttatcaatcggttgttgaacaagtaaaatatgattctgtgcatcagaaattgcaaaaatttcaagatttcggaattaaaactgttggatcttctgctcacgaaaatacatttacatggttgaaatcttattatacggcttatggttataccactatagaacagcaatcggttaatgtatatggtaatgttgggaataatttgattgtgacaaaaatcggtaaaaaatatcctgacgaatttattgtcatcgatggtcattatgatacattaaacggacctggagcgaatgataatggctcgggaacggttactttattagaaattgctcgattaataaaagatatcgaaacagattattcgataaaatttattcattttacaggggaagaacgaggtttaatcggaagtcaggcgtatataaatcaaattgcagttcctcagaatttaaaaattaaagctgttctgaatattgatgaggtaggaggagtggcgaataaggtaaattcgacaattgtttgtgagcaagatgaaagtaatccaacatctaataatgctatttcagctgaattaaccaataaaatggcgaatatttttccattgtatacaactctaaaaactgaaatttcgaatgcttatagttccgattatatgccttttcaggcagttggctatcctataactggactttttgaaaagaatgaaacgccttatgcgcatactgcgcaagatataatcgataatttagatttgaattatttgacagaagtagcgaaaggagctttggcgactttattgcatttttctcaagcgcaggaaaaactgaatgtaaaagaaaacgctatttctacattacaaatttatccgaatcctgttcttaaaaatctttatttttctcaagttttgcaacaaccaattattacaatttacaatgcagcgggaaaacaggtatttcatcaaaaatatcaaacaacagtttcacaaattaatttagaacatcttacatcaggaatctatttcgttaatataaattcgaatcaatatagctttaagattttaaagcaataaattgttgctctttatgtatgtcataaatttattcttttagttgaatagttacttttttattaaaaaccatcgttaaacaaaatgattagaaatataatagctattatttcaacaattggaataattatttggatgattacagacttttatggagggatgtttatttacttgctatcatatccatttttagtattaccgataattctactttatgttttctcttttttcgaaactttagctttactaatcagaaatggattcaagaaaaatataattaaagttgtttttcattcagttttaattttaataattattattatcaatttaacggattcagaaatttttaaatctaaaaaaatcttatctgcaacattgaaagatgatcaatactattataatttagtttttagggaaaatggtgaagtagaaaacaacattaatggaatgtttggatattctgaacgaattgctgggacatataaaattaacggtgatacaataatttttacgaaagttctttacgataatgattttataccagatactttattaattgataaagaacaaagtgctttatttatgtttaaagacgaaagtggaaaatttattcgtgaaaaacagtttttaaatcacttagaaatcaataattgcctataatatcggtttgccaaaatgcgaggttttggttagattgaacgctattattttctaatcgccaaaaaacagtttatattcgtattttttgtaagtttacaagtagtgaaatagctttggctcagtttattttgaacttgaatattcgctcaatttaatcccacgcacttcgccaagccaagtccagttagtgtggtaacctcagctgataatcgatatgagtagaaattgtttattaatcttaacaatgctttttttcttaagttgtaaaactacaaaaccaatagttgaagagaatactcttgaaataaccaacattgaaaagcattatatactttctaattcagactctgaaaagtactatgtaataaaacttattagaaaacttcaatctgaaaaaaaattaggtgaaatcccaatgataattgtagacggagatccaaaatattatttctacaaagaagaaattaaaccgttgaatattgaaaaaaggaaaattagaaagattaaaattttggaagcagataaatgcgttcaaatatttggaatggcttgcaaatatggacttataataataagtacatatggaactcaagaggagctaccataagactacttttaacatcggcttagcaaaatgcggggttttggctgaattgaacgttcttgttttctaatacgccaaaagctgtccatattcgtattttttgtaagtttacaaatagtagaacagctttggctctgaattgtacattcgttcaaattaagttcgcacttcgacaagtccagttaaccgcaattataaaacaaactcaacatttaaatgaaaactttcccagtaatagcttcaattttatcaccaacagaattaggagaacttattaacgaaaagtatcaattagaacataatttcgattgtaaactttttagaacaggagtaaatcatacctattttttaactactccaagtacgaaatatgtggttagagtttattgtcgcaactggagaacaaaaacggaaatccaagaagaattatccctattaaatttactcaaatcacatcatctttcagtttcaattccaatttccgataaaaatggaaatttaattcaagagattgctgcgccagaaggtttaagatatgttgcgcttttcacattcgcagaaggagaaaaattgcgttttatgagcaaggaaacttgttttgctgttggttcaataatggcaaaaattcataatgtaacagcgacaaaaaaaatcaatcgaataaattataattctgatgtgcttctgtacaaagcttatgagaagttaaatgtatatttttcagaagatttagatgaaatgttatatttaaaacaaatatcctcaaaaatcgcaaagtgttttgaaacaactcatttatccgaagctcaaaatggcattgtacaccttgatatttggtatgacaatttgagtgtaaataaggaaaatgaaattacaatttttgattttgataattgtggaaatggttctctgattttagatattggatatttttgcaaacaattatttttcattgaaacggataaaaatgaatatgaaactaaagtggaaagtttcttaaatggttacagaaaagaaagaagcttatctgaaaaggaactcaatttaatccctgaagccggagcttcaatttttgtgttttatcttggcgtccaagctcaaagatttgattggtcaaatatatttctaacagaaaactatcttaaaatgtttgttggaagaatcaaaaattggctagattattacgaagaaaaaaagaactgcggctaacattgcaataatgaaattgcgactaagggaaaaattgaaagttttcgcttccttaattcgttaataattttcttgttacctataaatataaaaaaaaataatttaaaaaattaagaaaaatcatcgttttcaatattgataatttgttgttatttagttttaaataactgaatacaatcagaatattaaaaatgaaaataatgattacagaaagaaaagaagttgtcttaaaatattttgaaaaaattgataatggtacttttgatagtacttattttgatttatttactgaagatgttgaattgtacttcccgaaatatggatacactaaaggaaaggaaggtataaaacactttggcgaaacacttggaaatggattaaaaagccttcatcacgatgttaaaaactttaatatcatagtatccgataaatatataatcgttgaaggacaagaaggtggagaaacgaaagagggaataaagtggcctgataataaaaattcatttggtaaattttgtaatgtttttgaatttgaaggcagtctgattaaaagagtacatatttatgttgatccagattttacatcagaagatgctaaaagaattgagatgttaaatcaagggaataaatcgtgaaacatcaactactagaattggtaattgttaaacaacttaatattttagataaaattaaactagttgttctttagtttatacaataacctatttatataagttggtttgttttggacaaaaatatttaaataaaaaaagccccgaagatagtcgaggcgctaaatgttttcacaacggaataatccttattgtgagttcctttcaatacaaatattgatataaaatatttatatatgattacgtgaaaccgtaattgtataaattatttttgatgtaatttaatacgcaaaagataatacttatggctaaaaatatacttggattagatttaggaaccaactctattggatgggcgtttgtaaaagaagctacaaataataatgaacaatcttctatagaaaaataggtgttcgtgtaaatactttaacaactgatgagcaaacaaactttgaaaaaggtaaacctattacaacaaatgcaggtagaactttagcgcgttcggctcgtcgtaatcttcaacgatttaaacttcgaagagaaaatcttttacaaattctgaaagcacagaaatggattgataatgaaactattttagctgagaatgggaataaaacaacttttgaaacttttcgtttacgagcattatcagctgaaaaacaattggagcttcacgaattggctcgtgttctgtttcaaatcaacaaaaagcgcggttacaaaagttcacataaagtgaacaataccgaagaaggttctttgattgatggtatggacatcgctaaaaaattatatcatgaaaatcttacaccagggcaatatgttttggatttgttaaagtctggaaagaaaaaggttcctgatttttatcgttcggatttacagtctgaatttgataagatatgagattttcaaaagcaattttatactgaattatttacagataatttaaaagaagaattaaagggaaaaggaaaagtagcgacttgggcatttttaaaagtcccttttaatttggttggaataaagcgcaatttaaaacgtgatgatttaaaattagagaattaccaatggcgaaatgacgctttgtctaaccaattaaatttagaacaaattgcgattgttttgcaagagattaatggtcaattagctaattcttctggttatttaggtgcaatttcagatagaagcaaagagttgtacttcaataaccaaaccgtaggtcaatatcaatatactcagttacaaaataatccgcatgcacgtttaaaaaatcaagtgttttatcgtcaggattatatggatgagtttgaaaagatttgggaagttcaagcaaaaaatcgtgaaaacatatttaccaattctttaaaagaagaaattcgagatgttgttattttctatcaacgtaaactaaaatctcaaaaaggtttgatttcaatttgtgagttcgaacaaagaaaaataattaaagatgataaaaagaaaactgttggtttacgcgttattccaaaatcagcacctttatttcaagaattcaaaatttggcaaattcttcataatgtaaaattgaaaaataagattacaaatgaagttgtgcttttaaatgaaaacgataaaaatcacttatttgaagaattaaatctaaagggaaatcttactgcatctgaagttttaaaattgttagttgataaacctaaagattgggaaattaattatacaagtttagaaggaaatcgtactaatcaagccctttataatgcttatttgactattctagataacgaaggttatgatgtgcgtgaagaattgaaattaaaattgaataaaaacgaaattactttagctgatattgacaaacctgcatctgaaattaaggaaatggtgcaagctatttttaatcatttaggaattaaatctgaaattttagatttcaatgtagagttagaaggaaaagtttttgatgagcaattatcttttcagctgtggcatttgttgtatgcgtatgaagaagacaattcaccaactggaatggacactttgtatcgattattagaacaaaaatttggtttcaataaagagcaagctaaagtaatgggaacagttgcctttcaagatgattatggaagtctaagtagtaaagcaattcgtaaaatatatccttttataaaagaaaatgaatattctgtagcatgtgatttagctggatatcgtcattctaaaaactctttaaccaaagaagaattagaaaatcgtgaattaaaatctcgtttagatattcttccaaaaaatagtttgcgcaatcctgtagttgagaaaattctgaatcagatggtaaatgtagtgaatacattgattgatactgaaaatgataaattggagaaagcaggcagggcaagaaattttcaatttgatgaaatccgtattgagttagcacgtgaacttaagaagaatgtaaaagaacgtgaggaaatgaccaaagctatgaatgcaggaaaaattgaacacgagaaaattattaagattcttcaaacagaagatggaattaagttcccaacgcgcaatgatattattcgttataaattgtatcaagagcttaaaaataatgggtacaaggatttgtataccaatcaatatatcgaacgaaaagatatttttacaaaaaaaatacgatatcgaacatattattcctcaatcgtgtttgtttgatgatagtttttcgaataaaacattagttccgcgtcagatcaatttggataaaggaaataaaacggtttacgattatatttttgatgcctttggacaagataaattaaatgaatttttgatacgttcaaaagctttgtttgatttaaatgatgagggaatttcaaaagctaaatacaagaaactaacaatgaaaggttctgaaattggcgaaggttttattcaaagagatttacgtgattcacaatatattgctaaaaaagcgaaagaaatcttgtttcaaattactaaatcggtgctttcaacttctggttcagttacagatcgtttgcgtgacgattgggatttggtgaatgtaatgaaagagttgaatttggagaaatatcgtttggctggcttaacagaaatgcaaacaacaaaagatggtaatccgaaagaagtcatcaaagattggacaaagcgtaatgatcatcgtcatcatgctatggatgcgctgactgttgcatttaccaaacgtatttttattcagtatttaaataacttaaatgcgtgtagaaatgatgaatatgatagtatttcaaatgcaaaagataaaaaggctattgatacaaatagcttaagaatttcgagtaaagatgcattaggaattgaagaaaaagaaacgcataaaataaatgatggaaaaggaaattataaacgtgttttcaatgaacctattccaaatttcagacaactggcgaaacaacatttagaagctgttttagtatcgcataaagcaaaaaataaagttgttactcgaaatatgaacaaaataaaaggaaccgacaaagttcagattgctttaactcctcgaggacaaatgcacaaggaaaccgtttatggcaaaatcaaacaatatgcttttaaagaagaaaaagtttcagcaaagtttggtgaggctacaattgctatggtttcgaatccacaatatagatctcttttattacagcgtttagccgaaaatggaaaagatgctaaaaaagcatttacaggaaaaaatgcgttgtcaaaaaatccaattttattaaaagacggaacagaattacctgaaaaagtaaaattaatgtggctggaagatgattatacgattcgtaaagatattggacctgatttaaaaattgacaaagtgattgacgaaggcgtaaaacgaattttacaaactcggttagatcaatttaaaggagattcaaaaaaggctttttctgatttggaacaaaatccaatttggttgaatgaagaaaaaggaattgcaataaaacgtgtaacgatatcaggagttaaaaatgctgaagcattacatgttaaaaggatcatttaggaaatgatatttttgatgaagatggaaatcaaattccaattgattttgtgagtacaggaaataatcatcatgtagctatttacgaagatgagaaagggaatcttcaagaaaaagttatttcattttatgaagctgtagctcatgtaaatcaaggtttaccaattgtagataaagcctacaatcaacacttaggttggacatttaaatttacaatgaagcaaaacgaaatgtttgtttttccatcagaaggttttaatccaaatgaaattgatttgtttgataggaaaaatcagacgttaataagtaaacatttatttagggtgcagaaatttggtgagctttctaaatctggtttttggtttagacatcatttagaaacttctgtttatttagttaagtctttaaggtttattacttactcagatttttatagtaaggattttatgaaaaccatagtaaaagtcagaacaaaccatttaggagaaatcatccatattggagaatattaaaatgtaagtttatgttaaaacgcaccatttacattggtaatccatcttatttaaaattaaaagacaatcaattgaaaatagaagatgcgacaaccaaagaaatcaaaggctctatacatattgaagatttaggatttttggtgttggatcattatcaaattaccctaagtcatcaacttatagtgatgttacaacaaaataatgtggcgataatcagttgcgacgatagtcatatgcctttagggttgatgttaccaatgaatgggcatgtggagcatagtgagcgattgaaacatcaaattaatgtttcggaacctttgcgcaaacagttgtggaaacaaacgattgaagctaagatttatcaacaaaaagcattgttaagtaagtttggttttgtagaggagccactgcagaattatttaacgaatgtaaaatcgggagattccacgaatatggaagggattgcggctcaatattattggaaacaattatttgacaattttacgagagaacgagatggtgatgctcctaataattttctgaattttggatatgctattcttcgaagtatggttgcaagagctttagtgagttctggactaaatcctacaattggtatttttcatcgcaataaatacaatccatattgtttggctgatgatataatggaaccttatcgaccttatgttgatgaattggtcttagaatggatgaataagccttatcgaccgactgaaatgagtaaagatgctaaagcacatttattacaaatagcaacaaaagatgtaaaaattgatggtttgaaaagacctttgttagtagcgataagctctacaacaagttctttatataagtgtatgataggggagcaacgtgtgattcgttttcctgaaatgacatgagttttagtcgttataatgcttatcgtattatgtgggttttagttttgtttgatttgccaacggaaacaaaaaagcaaagaagtcaggctactcgttttagaaaagagttgatagatgatggatttactatgtttcagttttctatttatttgcgacattgtccaagtagagaaaatgcagaggtacatataagacgaacaaaatctaaattacctgaatttggtaaagttggaataatttgtattactgataaacaatttggacaaatggaaatatttttttccaaaaaagaaaccgatttaccaacaggtccacaacaattagaattattttaggaataaaaaaatccgatagaaaactcaacttctatcggattttactttttttctcatatctaaatttcatctcaaacccttttatataaaggacttttaaaatgaggttgtaactacttacgtaaaattactaaaagtgaaaggaactcacaactcaagctcaaacgagattgttgttcaatgtgttgtaactacttacgtaaaattactaaaagtgaaaggaactcacaaccatacctgcaaaaaaagaacttgataaatggttgtaactacttacgtaaaattactaaaagtgaaaggaactcacaacgttataggtgctggacttacttttgtaggtgttgtaactacttacgtaaaattactaaaagtgaaaggaactcacaactataaaagatatcatggcgacatccgacgagttgtaactacttacgtaaaattactaaaagtgaaaggaactcacaaccacaatttgacgaataatttcattaataaagttgtaactacttacgtaaaattactaaaagtgaaaggaactcacaacttgtcgggtggtcaattaatgacttataatgttgtaactacttacgtaaaattactaaaagtgaaaggaactcacaacttgattaataataaattttatttttttgctgttgtaactacttacgtaaaattactaaaagtgaaaggaactcacaactatatgtctgaacattggaaatttcactctgttgtaactacttacgtaaaattactaaaagtgaaaggaactcacaacactcctaagccgtttaactgatcagcaatagttgtaactacttacgtaaaattactaaaagtgaaaggaactcacaactgactttgtaaacgtcgctacctcagttctgttgtaactacttacgtaaaattactaaaagtgaaaggaactcacaaccgcccggcaggaagggcatgaccaccagccgttgtaactacttacgtaaaattactaaaagtgaaaggaactcacaactatacatttgcttatgttggaacgtatcctgttgtaactacttacgtaaaattactaaaagtgaaaggaactcacaacatgaataccttcatccagtcctgctgaactcgtttcagcatcacattctaaaataatgtaaaagaacaattttctttataatagtgataacctttcttaggtaaatctagaatcgtaaatctaaaaaccttctttttctgtcaaaaatgccaatctaatctacaaatcttctccaattttttatttttcaccgatcgtttttctctatttcgtctaccgtttagcgtaaaccgtcaaacatttcaaaaaatatttctcatcataccagtaacttaagagaagaatgtaaaataaatgtaaattatgtttggaaaagcggaaaaagggtacgtatatttgcaacctcaatacgaaagacgagtagtattgaaattgacatagggacttatatagcgataaaatttatttgaaaataaatttgcgagtttagaaataagtattacctttgcaaaccaactccgaaaggagtttgagagtgaaagtaaatttgacttattgaaataaaaattttaaaaattttctaagtaaaatttgttagttaaaaaataagtattacctttgcaaccgcaaacgccgagaggttttgctaagatgagaagttcatttgaaattataaaatatacagaagaaaaaatagccgaataaaacgaagtcaatccttgaataatggagctataggaaattcgaagttgtaaaaaacagaagctaacgcttcaaaaaaaattatttacaatggagagtttgatcctggctcaggatgaacgctagcgggaggcttaacacatgcaagccgaggggtatatttctttcgggagatagagaccggcgcacgggtgcgtaacgcgtatgcaacttgccctactgaaaaggatagcccttcgaaaggaggattaatactttataatagaaatcatggcatcatgaatttttgaaagatttatcgcagtaggataggcatgcgtaagattagttagttggtgaggtaacggctcaccaagacgatgatctttagggggcctgagagggtgaacccccacactggtactgagacacggaccagactcctacgggaggcagcagtgaggaatattggacaatgggtggaagcctgatccagccatcccgcgtgtaggatgacggccttatgggttgtaaactacttttatctggggataaacctacttacgtgtaagtagctgaaggtaccagaagaataagcaccggctaactccgtgccagcagccgcggtaatacggagggtgcaagcgttatccggatttattgggtttaaagggtccgtaggcggattaatcagtcagtggtgaaatctcatagcttaactatgaaactgccattgatactgttagtcttgagtgatgttgaagttgctggaatgtgtagtgtagcggtgaaatgcttagatattacgcagaacaccaattgcgaaggcaggtgactaaacataaactgacgctgatggacgaaagcgtggggagcgaacaggattagataccctggtagtccacgccgtaaacgatggatacttgctgttggattttcggattcagtggctaagcgaaagttataagtatcccacctggggagtacgttcgcaagaatgaaactcaaaggaattgacgggggcccgcacaagcggtggagcatgtggtttaattcgatgatacgcgaggaaccttaccaaggcttaaatgcaatttgacagatctagaaatagatttttcttcggacagaatgcaaggtgctgcatggctgtcgtcagctcgtgccgtgaggtgttaggttaagtcctgcaacgagcgcaacccctatcattagttgccagcgtttaaagacggggactctaatgagactgccggtgcaaaccgcgaggaaggtggggacgacgtcaagtcatcacggcccttacgtcttgggctacacacgtgctacaatggtaagtacagagggcagctacttggcaacaagatgcgaatctcaaaaacttatctcagttcggattggagtctgcaactcgactctatgaagctggaatcgctagtaatcgcatatcagccatgatgcggtgaatacgttcccgggccttgtacacaccgcccgtcaagccatggaagctgggggtacctgaagtcggtgaccgtaaaaggagctgcctagggtaaaactggtaactagggctaagtcgtaacaaggtagccgtaccggaaggtgcggctggaacatctcatatttagagaacgacgaattttcttctattagtagaagattgattttgattcggctttttattctgtagtattatataaatatattagaagttagatattagaattgagaacttagataaatctaaatacttatctctcaatactaaaatcttacaactaaaaagaccactctttaagagtattaaagagtctcatagctcagctggttagagcgctacactgataatgtagaggtcggcagttcgagtctgcctgagactacaaacgtacaacgttaaacgttctacgtaatacgtaaaaagagggggattagctcagctggctagagcgcttgccttgcacgcaagaggtcatcggttcgactccgatattctccacgaagcgataaacgaagttcgaacttcgaaattcgtttaaagcagaagagttcattgacattattgaaaaaaaacatacaatcaaaacagatttagagataaatcaaagtttatataaggtatacaattaatcaagaaaacgagtaagattaacataaccgctcaataatatgacggttaaatcgagaaaaaagttacaaagggcgtacggcggatgcctaggctttgagaggcgatgaaggacgtgataagctgcgataagctacggggagcggcacatacgcattaatccgtagatttccgaatgggacaacccggcatgttgaagacatgtcactcacgtaagtgagagcgaacgttgggaactgaaacatctaagtaccaataggaaaagaaatcaattgagattccgtaagtagtggcgagcgaacgcggattagccctaaagactttataatgataatagaataacctggaaaggttaaccgtagagggtgatagtcccgtaaatgaaatttttattaagttgataacgagtaaggcggaacacgagaaattctgtccgaatatgggaggaccatcttccaaggctaaatactcctcaaagaccgatagtgaactagtactgtgaaggaaaggtgaaaagcatttcgaatagaaagttgaaatagaacctgaaaccgtacgcctacaagcggtcggagctcttcggagtgacggcgtgccttttgcataatgagcctacgagttaatgttgctggcaaggttaagcacttcaggtgcggagccgtagcgaaagcgagtctgaatagggcgctatagtcagtagtattagacgcgaaaccttgtgatctacccatgggcaggttgaagctttggtaacacaaagtggaggaccgaaccggttgacgttgaaaagtcttcggatgacctgtgggtaggggtgaaaggccaatcaaactgggaaatagctcgtactccccgaaatgcatttaggtgcagcgtttagttaagtatattagaggtagagctactgattggatgcgggggcttcaccgcctaccaattcctgacaaactccgaatgctaatatatgtttctaggcagtgagggcatgggtgctaaggtccatgtccgagagggaaagaacccagaccatcagctaaggtccccaaatatatgctaagttgaaaaaacgcggttggattgcatagacagctaggatgttagcttggaagcagctattcatttaacgagtgcgtaacagctcactagtcgagcgatccggcatggataataatcgggcataagcatattaccgaagctatggattagtacaaaagtactactggtaggggagcattctaacggcgcagaagtcatctggtaatggatggtggagcttttagaaaagaaaatgtaggcatgagtaacgataaaataagtgagaaacttattcgccgtaagactaaggcttcctcagctatgctaatcagctgagggttagtcgggacctaacacgaaccctaacggggtagtggatggcaaacgggttaatattcccgtacctgcactcaataaaagtgacgaatgattgtaggaggtgcgtactgacggaatagtacgttgaacctacgtaaagtagggatagtacacgaagacttcggttagagtgataatcctctgaaaattgttccaagaaatagcgagatgtgcagcccgtaccgtaaaccgacacaggtggtcgaggagagtatcctaaggcgctcgagcgattcatggttaaggaattaggcaaaatagacctgtaacttcgggagaaaggtcgctgacagcaatgtcagcctcagtaaaaaggcccaggcgactgtttatcaaaaacacaggactctgcaaaatagaaatatgacgtatagggtctgacacctgcccggtgctggaaggttaaggaaggagcttagaagtaattcgaaggttttgactgaagccccagtaaacggcggccgtaactataacggtcctaaggtagcgaaattccttgtcgggtaagttccgacctgcacgaatggtgtaacgatctgggcactgtctcaaccatgatctcggtgaaattgtagtatcggtgaagatgccggttaatcgcaacgggacgaaaagaccctgtgaacctttactatagctttgtattgacttcgggtaaataatgtgtaggataggtgggagactatgaagcagtatcgctaggtattgtggagtcattgttgaaataccaccctttatttacttggagcctaacttctttatagaaggacagtgcatggtgggtagtttgactggggtggtcgcctccaaaagagtaacggaggctttcaaaggtaccctcagcacgcttggtaaccgtgcgtagagtgtaatggcataagggtgcttgactgtgagaccaacaagtcgatcaggtgcgaaagcaggacatagtgatccggtggttccgtatggaagggccatcgctcaaaggataaaaggtactccggggataacaggctagtctcccccaagagctcacatcgacggggaggttcggcacctcgatgtcggctcgtcacatcctggggctggagaaggtcccaagggttgggctgttcgcccattaaagtggcacgcgagctgggttcagaacgtcgtgagacagttcggtctctatctgttgtgatcgttagaagtttgagcggagttgactctagtacgagaggaccgtgttgaacaaacctctggtgtatcagttgtgccgccaggtgcaccgctgagtagctacgtttggaagagataagcactgaaagcatataagtgcgaaactcgccgcaagattagacttctttaaagggtcgttgtagactacaacgttgataggctatagatgtaaaggcagtgatgtcatagtcgagtagtactaattacccatagactttttcttaaaaagtacaacgaatcaaagataatgatagcaatatcaaaaattaaaaagattaaatactaagattgatttaatcgtcatagagaaggttagttaatcttatttggattaatgaagtaataccaaaagattgtataaacgaaattcgaaacacgaaaaacgaatttcgaactcaataatgtcaagatatagtaggaactaaaacctatttaaaaatattagggtgactatagctgcagggctcacctcttcccattccgaacagagaagttaagcctgcctgcgccgatggtactgttacttacgggagagtaggtcgtcgccagtttttattaaaagcctcaagattattttcttgaggcttttttatgttcaataaagttataggttttaagtgctacgttctacgtataacataaaacttattacgtaatacttcataaacacccctataatcccctcaagaggatagtttgcatagatttttattctagtaaatctaacgtcttataacttatcactcaaaacttacaacttataactcaaaacccgcgttagggatagtagtggaaatccttttgtaggaattgaatttttctaatctgtaatagaatcttcttctacaaaagattggaacggatagcccgaccgaagggaacgccataataataaacaattgaatgaagaatttttatatatttaggttttaaagtaaaagaagatatgaaaccatttaatgtgcgtgtatatgcgttattggagcacaagggaaaggtattggtgattcacgagccgtttcagggagaattaatttataagtttcctggaggtggactggagtttggtgaaggaactaaagattgtataaggagagagataaaagaggaattgaatttgaaagtggaagttcatgagcatttttatacacaagatttttttgtgctgaatgcttttgatccaacagaacaggttttattaatttattataaagcgacaattacagagaaagcattggctaaattgaaaattttggatgctgatatcaacgaattgttatggttatcgaaagaagaattgaatgtagagaaatttacactggatgcagataaagtggtagttgatttgtataaaaaagaaaacttcgaatcttaagactcgaagtttattattttttgatcatcaaaatactgtataacagcgtatttcattaacaaggtttgctcattagttttaagcggtggtaaatcttccaacaactcaaaatgtggccaaccatctggatctaatccatcgaaacgataaaaaccaaaaggttctaacacgcgacaaactgcaatgtgtaataaattgagtttatcatcttttttaaatcgtttttttccttgtcctaattcttgaacaccgattaaaaaaagaatggtatctaaatctggtctttcaccgtctgtgaaattttgttgaaaaaattcttcaatcagtttccacttgttggtgtttgatgatgattcttctgtaaattttgatatatccatttagaatttacgtcctttgtgacgcatatgtgggtttt

SEQ ID NO: 4101 - DNA, 21536 bp, synthetic construct
  misc_feature 1..21536: note = Synthetic
  source 1..21536: mol_type = other DNA
gctcctggcggaacaacagatacaccagaggttagtccaattcggtcctctcgtactagaatcagatccactcaaatttcttgcgcccacagtagatagagaccgaactgtctcacgacgttctgaacccagctcgcgtgccactttaatgggcgaacagcccaacccttgggaccttctccagccccaggatgtgacgagccgacatcgaggtgccaaacccccccgtcgatatgagctcttgggggagatcagcctgttatccccggcgtaccttttatcctttgagcgatggcccttccatgcggaaccaccggatcactatgctctactttcgtacctgatcgacctgtatgtctctcagtcaagctcccttatgccattgcactctacgcacggttaccaagcgtgctgagggaacctttagaagcctccgttactcttttggaggcgaccaccccagtcaaactacccaccaagcaatgtcccccacttatgcggggttaggcctcagataaacaaagggttgtatttcaacaatgactccacaacgcctagcgacgccacttcacagtctccaacctatcctacacatcatttatccaaggtcaatactaagctatagtaaaggtgcacagggtcttttcgtcccactgcgggtaaacggcatcttcaccgttactacaatttcaccgagctcatggctgagacagtgtccagatcgttacaccattcgtgcaggtcggaacttacccgacaaggaatttcgctaccttaggaccgttatagttacggccgccgtttactggggcttcatttcaatgcttctggttacccataacatctccacttaaccttccagcaccgggcaggtgtcaggccctatacttcatcttacgattttgcagagccctgtgtttttgataaacagtcgcctggacctcttcactgcggccagcattgctgctggcgacccttctcccgaagttacgggtctattttgcctaattccttagccatgaatctctcgagcaccttaggattctctcctcaactacctgtgtcggtttacggtactggtactattaatctgaagtttagaggtttttcttggaagcccttaggcgcactatctctttgcccgaaggctccgagtactatcgtatttccccaaaaaccgtggatttgcctgcggttcttataggtaggtacttcaacgaactattccgtcagttcgcggcgctttcatcactccgtcaccccatcacaattaatagtagtacgggaatattaacccgttggccatcgactgtccctttcgggttcgccttaggaccagactaacccacagctgattagcatagctgtggaaaccttagtttttcggtgtgcgggtttctcgcccgcattatcgttacttatgcctacattttcttttctaaccagtccagcaagccttacgactcaccttctaccctgttagaatgctcccctaccacttagagtaatctctaaatccatagcttcggtaatatacttatgcccgattattatccatgcccgtccgctcgactagtgagctgttacgcactctttaaatgaatggctgcttccaagccaacatcctagctgtcgatgcagacagacctcgttctttcaacttagtatatatttggggaccttagctgatggtctgggttctttccctctcggacttggaccttagcacccaagccctcactgttatgaaacattatatagcattcggagtttgtcaggaattggtaggcggtgaagcccccgcatccaatcagtagctctacctctatataactttaaccataacgctgcacctaaatgcatttcggggagtacgagctatttccgagtttgattggcctttcacccctacccacagatcatcccaagacttttcaacgtcaacgggttcggacctccactatgtgttaccacagcttcatcctgtccatgggtagatcacacggtttcgcgtctaacactactgactaaagcgccctattcagactcgctttcgctacggatccgtgacttaatcacttaaccttgccagcaacgttaactcgtaggctcattatgcaaaaggcacgccgtcaccccacgaaagggctccgaccgcttgtaagcgtatggtttcaggatctatttcactccgttattcacggttcttttcacctttccctcacggtactggttcactatcggtctctcaggagtatttagccttagcggatggtcccgccaaattcagacaggatttctcgtgtcccgccctactcaggataccactatcgttatcttctattacttatacagggctatcaccttctttggctttactttccagtaaattctaattctatccgcaacaaataacgtggtcctacaaccccaacattgccgtaacaacattggtttgggctaatccgcgttcgctcgccactacttacggaatcacttttgttttcttctcctccgcctacttagatgtttcagttcagcgggtttgcccacctatcggtgtactatgtcttcaacatagtgggttgccccattcgggtatctacggatcaagtcatgtgtgctgatccccgtagcttttcgcagcttatcacgcccttcatcgcctctgagagccaaggcatcccccatacgcccttattttgcttattgtactttttctagccattagccattagtaattaaccattagtttttcaacttatgcctaatgccttttgtctaatcactaaaaagtgttctttctactttttaaatattttcttatctcaatatgtcaatgaactttaataaagtattaagtgttttgtattaagtattaagattttgtcttaatacttgatactatcatcttgatactatctcgtggagaataacggagtcgaaccgttgacctcctgcgtgcaaggcaggcgctctagccagctgagctaatccccctaatagattttagattttttgaattcagattttagattttgaattgtagttctaatttcttttggttgaatcctcaacttctaaaatttcctttactttaatgaacgtatttatcctttttttaatctaaaatcttaattctaaaatcttaaattaatttgttgtctcggacagactcgaactgtcgacccctacattatcagtgtagtactctaaccagctgagctacgagacactcttctaattgataatcaataattatcaattattttttattttgaactaacagcaaagagtaattgagaattttcttatttataaaactaaaaacatgctctagaaaggaggtgttccagccgcaccttccggtacggctaccttgttacgacttagccctagttaccagttttaccctaggcagctccttgcggtcaccgacttcaggcacccccagcttccatggcttgacgggcggtgtgtacaaggcccgggaacgtattcaccggatcatggctgatatccgattactagcgattccagcttcacggagtcgagttgcagactccgatccgaactgagaccggttttatagattcgctcctacttgcgtagtggctgctctctgtaccggccattgtagcacgtgtgtagcccaaggcgtaagggccgtgatgatttgacgtcatccccaccttcctcacagtttacactggcagtcttgctagagttcccgacatgactcgctggcaactaacaacaggggttgcgctcgttataggacttaacctgacacctcacggcacgagctgacgacaaccatgcagcaccttgtaaattgtcttgcgaaaagtctgtttccaaaccggtcaatctacatttaagccttggtaaggttcctcgcgtatcatcgaattaaaccacatgctccaccgcttgtgcgggcccccgtcaattcctttgagtttcattcttgcgaacgtactccccaggtgggatacttatcactttcgcttagccactgagattgctcccaacagctagtatccatcgtttacggcgtggactaccagggtatctaatcctgttcgctacccacgctttcgtccatcagcgtcaatcaatttgtagtaacctgccttcgcaattggtattccatgtaatctctaagcatttcaccgctacactacatattctagttacttccaaataattcaagccaaacagtatcaatggccgttccatcgttgagcgatgggctttcaccactgacttatctggccgcctacggaccctttaaacccaatgattccggataacgcttggatcctccgtattaccgcggctgctggcacggagttagccgatccttattctcacagtaccgtcaagctcggtcacgaccgagtgtttcttcctgtgcaaaagcagtttacaatccataggaccgtcatcctgcacgcggcatggctggttcaggcttgcgcccattgaccaatattcctcactgctgcctcccgtaggagtctggtccgtgtctcagtaccagtgtgggggatctccctctcaggacccctacccatcgttgccttggtaagccgttaccttaccaactagctaatgggacgcatgctcatcttttaccgttgtgactttaatagtgtgttgatgccaactcactatactatgaggtattaatccaaatttctctgggctatccctctgtaaaaggtagattgcatacgcgttacgcacccgtgcgccggtctcaaatattgctattctacccctcgacttgcatgtgttaagcctgccgctagcgttcatcctgagccaggatcaaactcttcatcgtatattgtttgaagttagcattaatgctttcttctgtttttgatgctctagctttatttcaaatcttacgattcgctcttactctttattcttttgttttaaatatcgctatttaaaacggctgtcaattcaatatgtctaggaacttgtcttgcttttttttagcctcgtttgtgtctttatctgtttctcgaagcgggtgcaaaagtagtggttattttttaactggcaagctttttgataagtttttttgaaaatatttattctcgtttgcttttctttttcttaaccaatttgtcaatgaacttaatctcttgcgggtgcaaaggtagtttctttttactattttcctaatctttttaataaaatttttgttttattttttttcgattcgtttttaatatgtaataagaactgtgtgccaatgcgggtgcaaaagtaatacttctttttggttttgcaagctgttttttgactgtttttttgctttttgctttaaggttttggttttgtggtggttatctttgtttttttttgaagcgttgctaattgttgggggtatttaaggctttattgacatcgattgcgtttctttttagttgtcctagtagggtttgtgcttgctttctcctgttttgctgggttgcttaatgttttgtctttatatttttactccttatatataggtgtaggggttttgtgttatggaatgttgaatcttataacgcgggtatctttattttttaatgggttttgtattattgcatttgcagtttgtggtttgcaacgcagatgacacggatttgataaattaaaaaaaatggatttgtttgtttttggaaatagctgggtcaaaattttgaatgctgatgtgctgatgtgctgcgccgcgtgagggatagcagcggaaatcctttttttgaggcttttcgccgataaaaaagattgtagcgcatagcccgacccgaccttttcgggaggggcacgtccaaaaaattaaaaattaaaaattaaaaaacataccttatatatgatacttgttttatggggtttggggatctaagtttataaacttgtgtggaaatattaaaagtaggatatttgtcgtttaaaaatagatagaaaggcaagattattttgtggaatttatgaagttgttattgtctgaagtgatagtgggttattttggattgatttcttataaaaaaaatatttaatccttgtgcgtttcttaatttcgtatttattaattgaatttaaaagcgataaatgaaaaaagtactacttgccgaagatgattttgattttgctgatgttttaaaacaatatctggagctatataattaccatattacttgggctaaagacggggaagaagccttactcctatttgagaatgaaactttcgatatttgcgtgtttgatatcatgatgccaaaaatggacggttttacactagcccaaaaaataattgatatgaatcctgaaacaccatttgttttcttaactgccagaaaactcaaagaagacaaactaaaaggattgcaattgggtgccgatgattatattgtaaaaccttttgaagccgacgaattggtcttgagattaaacaatattttgaaaagaggcgagcaaaaaaatcaaacaactttttcaggcgatgaaataacaattggcaattatatttttgatccgaataggttagaattaaagttaggtaatcatacacaaaggcttacagtaaaggaagttgctattattttgttttttctaaaaaataaaaacaaacgcataaaacgaaataatattttgcaacatatttggggaaatgacgatttcttttcaggaagaagtatggatgtttttataagtcgaattagaaaatatttctctagcgacaaccgaattactattgaaagtattcgcaatgtaggtttagaatttaagattataacctaaaaaaaaagcagacctataagccggattctgttctcgatattactaacgataccttatcatttatctaggcttgcaattactcacaagctccatctttctacccttcagcaacggacgagaagcccttaactaccgatatacttgaaatttcaccgcatagagtttacctggtttcactacagcattacctgtacatactttctgttgcacttgtcctaaccccaataaattggagccgacgggtgttacccgctatgcttctctctggtgtccggactttcctcccccaataaattggcgacgataaggcggtctgcgctgcaaaagtagtttttttaggagccaatcccgctatccgttgcaatcttttttcggcgaaaagcctcaaaaaggattttcactactatcggggctagggcattgcggtaataaaacaacattttcacaaaatacctaaataaaaaagcgaccctttagaggccgctttaaatgttttcacaacggaataatccttattgtgaattgcttcaaaattgtagtacaatactacaactttttttttatatataataaaaatgtatctaaataatattaattatcttacatttatagttaaaaataaatctagacaactagaataattaaaatataaccaagtacaatgaaaaaaatattaggattagatttaggaacaaatagtattggatgggcgtttataaatgaggcagaaaacgagattgaagtgtcttcaattgtaaatacaggcgttcgcattgttccacttactacagatgaagaatctgatttcaaaaaaggcaatacaatttctataaacgcagatagaaccttaaaacgtggcgcaagaagaggtttgcaacgtttcaaacaaagaagagaagctttattagaaacattcaacagaataaaattcattgcgactgactttgtttatgcagaaactggcgcagcgacaactttttcttcttatcaattaagagctaaatcggctgttgaagccgttacaaaagaagaattagttaaagttttattaatgcttaacaaaaaaagagggtataaaagcagccgaaaagcaaaaactgccgaagaaggcgatgcaattgacggaatgaaaattgccaaagaaattttcgaaaacaatttaactccaggacaatgggtttacaattctttatcaaaaggaggtaaatttattcctgatttttatcattccgatttgcagaaggaattagaaaagatagttcgttttcaaaatcaatttcattccgaacaaataaatgataaattattagcagacattcaaggaaaatcaagaacgcagacttctcaacatttttcaaaaacattgaatattcctcttgccgaaaataaaggaactagagaagaaaccaaattgcaacattaccaatggagaaatgaagctttggcaaatgaactcgatatgaaaattttggcatttattattactgaaatcaacaatcaaattaaccaatccagcggttatttgggtgccataagcgaccgaagcaaagaattgtattttaatcaggaaacggttgggcagtatcaatacaaacaacttcaagaaaatgtacacgctaaacttaaaaatcaagttttttaccgtcaggattatttagatgaatttgaaaaaatttgggaaactcaagcaaaatttcattctgaattgaatgaaaaattaaaagcagaaattagagatataaccatattctatcaaagaaaactaaaatctcaaaaacatttagtaagcttttgcgaatttgaaaaaggacataaagccattccaaaatcgtcccctttgtttcaagaatttaggatttggcagaatttaaacaatgttgttgttaaaaacgaaactacaaaagaggtatttgaattgagtgaagagttgaagcaattaatcgccgaagaattgcagtttaaagaaagtatgaccgatgttcagatgttaactttttgcgaactaaagaaaggaactcataccgttaatttcaaaaaaattgaaggaaacagaaccaatacttctatttataaagcttttgaaaaaatattggaagtagaaggctatgaaatagatttttctaaaatgaaacctttagaaataaaagaaactgttgctccaatcttcgaaactttaaatatcaatactgttattttagattttgacccaacaattcaaggtaatgattttgacaaacaaccttattatcaattgtggcatttattatattcggcagaagatgatgataaattaaaagaaactttaaaaaccaaatttggtttcaaagaaaatcaccttccgtttattttgaatattaatcttcaagccgattacggaagtttgagtgctaaggctatcaaaaaaatattaccgcatttgatggatgggcatatttatgacaaagcttgtttaatggtaggttataatcattcctcatcattaactacagcacaaaataacgatagagttttaaaggataccttagaattactcaagaaaaatagtttgcgaaatcctgtggtggagaaaatccttaatcaaatgattaatgtgattaatgctattatgaaagatcccgcaatgggaaaaccagatgaaattcgagtagaattagctcgtgagttgaaagcaaataatgaacaacgaaaaaaagctacttcggatattaataccgcaactaccgaacacgaaagaattagaaaattattgcattccgaatttaatatacctagagtaactagaaacgatattattagatacaaactttggctagaaactggaggaatttctttatatacaggaaatccaattaaagcgtctgatttattttccaaaaattatgacatcgaacatattattccaaaatccagattatttgatgatagtttttcgaacaaaacgctatgcgaaagacagctaaatattgacaaaagtaacaaaacagcttattcctttttacaagaaaagctttcagaaaatgattttgctgcatatgaaaatagagtaaaagatttatttaaaacaggaaaaataaaaagctatacaaagtacaaaaaactcttaatggcagataacgaaattccataaggattcattgaccgtcaattacgagaaacacaatacatagcaaaaaaagccaaagaaattttattggaagtttccagaaatgtaaccgcgactattggaagcgtaaccgataaattacgtcaagattgggaattggtcgatgtgatgaaagaactcaactgggagaaatacgacaaattaggtttgacccatattgaagaaggcaaaaacggagaacgattgtctaaaataaaagattggacaaaacgtaacgaccaccgccatcacgcaatggacgcgataacggttgcctttacaaaacctgcatacattcagtatttaaacaatttgaatgctaaaacacaaggtgaaaataaagctaattcaattattggtatagagaacaagcatttatatcgagataaaaacaacaaattacgtttcatttctcctatgaaaaactttagagaagaagccaaaaagcaactcgaaagtattttgatttcgtataaagccaaaaacaaagtagttaccaaaaataaaaacaccactaaaaaaagcggtggaaccaatcagaaaattcaactaacacctcgtggacgattacataaagaaacggtttatggaaaattgcagcaatatgctactaaagaggaaaaagtaaatgcgagttttactgaagactatattcaaaaagttgccaaaaaagaataccgtgaagctttgttaaaaagattggaagaaaatgacaacgaccctaaaaaagcatttacaggtaaaaatgctttaaacaaaactcccatttatattagtttaaaggacaatattatagttccagaaaaagtaaagacagtttggttagaaaccgattataccattagaaaagatattacacccgatttaaaaattgataaagtaatcgatgttggtataaaaagaatactccaaaatcgtttgaacgaatttaatggagatcctaaaaaagcatttgttaatctgggcgaaagcccaatttggctcaacaaagaaaaagggattgctataaaacgtgtgactataagtggtgttagcaatgcacaagctttacacaccaaaaaagaccatttgggaaatgaaattttagacaaaaacggaaacccaattccagtagatttcataagtaccggaaacaaccatcacgtagccatttacagagatgaaaaagggaatttacaagaagaagtggtttcattttatgacgctgtcattaggcgaaatcttggattatcagtaataaataaaaaccatgaaaaagggtgggaattcttattttctatgaaacaaaatgagttttttatatttccatcggatggttttaatcctcacgaaatagatttattaaatcctaataattatcatttgattagtcctaatatttttagggtacagaaaatttcaacaaaaaattatatgtttaatcatcatctagaaactaaagctgttgatggagaaatgttaaaatcaaaaaaagaattatctaaaacaagttatcatttcatccaaactccaacaaatttgaatggaattataaaagtccgcatcaatcatttaggtaaaattgttcatttaggagaatattaatttctagattataaattaaataggattgggctttagcctattcaacaaaaaaataggaataaacaaaaaggctttagccaaaatatttcggctaaagcctttcttaaatcaattattatccgcctccatttaaaaatggaggcaattgaaaaaggagtatagagttctaaaatcataatcgatacaattgataaaaaattaagataaattcaaattcatagaaatgggttttaaccaatttaacaatataaataatcgagatttactttagccaaaatatttcataaaccatttttaaatcgcaaaatatgataaaacgcacccttttttttggcaatcccgcttatttaagcaccaaaaacgagcaaattgtaatttcttatcccaacaaggagcaagaaaccaaaactgtggctattgaagatattggcgtaatcgttttagaaaaccaacaaataaccattaccaatggtttgttagaaaaactaaccaacaacaacgtggcgttaattaattgcgaccaacagcatttgcctattgggttgttaatgccgctcaacggacatacagaacaatcggaacggtttaaaaaccaaattaacgcttctgttccacttaaaaaaaacttatggcaacaaaccattagtgccaaaatcatgaaccaagcaggattgcttaaagaaaaaggaatcccgtgccgaaaaatggagctttgggcaaaagaggttacatcaggagatgcgcttaatcacgaatctagagcagctgtattttattggcaaagcctgattacggtaccaaattttaccagaggacaaaaaggaattccgcccaataatttattaaactatgggtatgcaatactgcgagccattactgcaagagccattgttagttcgggcatgttacccactttaggcatctttcatcgcaacaaatacaatgcctattgtttggctgatgatattatggaaccctatcgcccatatgtagatttgatcgtgtgtcatattatagatacagaggattcatacgatgagctgaccatcgaaatcaaaaaacatttactcagcattgccacaattgatgtatgtatagacggaaaaaatagccccttgatggttgccatgagcagaacaacacattccttacaggaatgctttgcgggagccgcaagaaaaattttataccctatttatgtatgacgaacattacacccgtttaaaccagtatagaagtttgtggatattagttttttttgacttacctaccgaaacgcggaaagagcgtaaaattgccagtgaatttcgcaagaaattattggacgatggtttttctatgtttcagttttcgatctatatacgattttgtgccagcagagaaaatgccgaagtacataccaaaagaataagaaatagtttgcccgaacacggcaaaattggagtaatgcaaataaccgataaacaatttggtatgatggagcttttttatggaaaaaaacctgtagaaacagacaaaccttcgcaacaattagaacttttttgaaaaataggatttagaaatattagacctaccagaatatcaacacacaaacagaactgttttttaatttcaaaataagcatataaccaccaacatatcaaacgattaactcgcggtatgttggtaattataagctaaaatacaattttgaaagcaattcacaacgctaaatatttcttttattttattttgcttgttggtaattataagctaaaatacaattttgaaagcaattcacaactattgaacagcaattttcatcagatgatgagttggtaattataagctaaaatacaattttgaaagcaattcacaactacggcattcaaaccccccatctattactgttggtaattataagctaaaatacaattttgaaagcaattcacaacaaagacttatttaagtctaaagaagtgcctgttggtaattataagctgaaatacaattttgaaagcaattcacaacgaatgcgtgcgctgtatgtatttcgttttgttggtaattataagctaaaatacaattttgaaagcaattcacaacaatgtgtctattgtgaatacattacctactgttggtaattataagctaaaatacaattttgaaagcaattcacaacacggaataaacggaaacgagcaacttattagttggtaattataagctaaaatacaattttgaaagcaattcacaacattacagttgctttaaataaaaagtaaaagttggtaattataagctaaaatacaattttgaaagcaattcacaacaaaacaatcatctatgttgctaaatcttttgttggtaattataagctaaaatacaattttgaaagcaattcacaacgaacacataacaggacacaaggcattggctgttggtaattataagctaaaatacaattttgaaagcaattcacaacactttgatatacgacatctcgcttactggagttggtaattataagctaaaatacaattttgaaagcaattcacaactaagttttcctacttaaccattttttaaaagttggtaattataagctaaaatacaattttgaaagcaattcacaacatagtactttgatttcacgtgcgaaaacggttggtaattataagctaaaatacaattttgaaagcaattcacaacggtggcaatgtgtattcaaacacggatatagttggtaattataagctaaaatacaattttgaaagcaattcacaacggagctggttcgggtacaattacattaaatgttggtaattataagctaaaatacaattttgaaagcaattcacaacattctctttcagtttttcgatattgtttttgttggtaattataagctaaaatacaattttgaaagcaattcacaacctgtcgtacgctctagtattagatatatctgttggtaattataagctaaaatacaattttgaaagcaattcacaactaatatttagcataaatttataatcgtcctgttggtaattataagctaaaatacaattttgaaagcaattcacaacagtgctaccttcgataattagcgcattaatgttggtaattataagctaaaatacaattttgaaagcaattcacaaccacaaatggggaatttgacgaaaacaaaagttggtaattataagctaaaataacccgttgggtgtaattaaattatttgatgacactatcccgcaaagtttttataggggtcaaaacaccatttacttttatgatgttttacgtcgacctcaattgcgatttcctgtgtttgtggttgaattattttaatttcaattccttttgatctaaatatttgtttaacatttgaatatattaataatccattataatcccaatcacaaaaataatatattggtagttttaatttgtcttgagaaatatcttctaatggtttggtattattacctccaacataccataactctatattatgatttttatattctagtggaacttttagacaatcaagattctcacaaagcacaatgacttttggattaaggcaatcaactacaaatctccattgattattttttgggtctttttctggaaattcagcaagttctaatatttttaaaattgcatttttaacacttaatttattagataagcatttagaattttgatttttataaattaaagcagataactttttctctgtagttacattcttttttaattcctctttgttataaaaaacaaacattaatgcttttatatcttcatcattaaaagattttttagcatcattttctattccagatttttcaaaaaaattattataatattcataggtttctaaaaattcctgctggtaatactcattaaatcttgatgatgcttcgataatagaatgatttccaaccttatattttattagtttcttttgtttaaaaatgacctgattaataaaatcattgttggttatttttaatcttgtttgctttgatttataaagttgatgcaatccttttatatgtttccattcaattttcttcatattttaattgtttgatgatccaaaaattggcactggagtgtagtttatattttcatcttctaaactattgtgcaacaaataaatattttgattttctgcatcaattttattgggatttatcgataaagataaaatttggtaatcatttgcttttgcaatattataaagcatatcaaaattacttccaagaccttctgcctcatcaatagccatataacgaattccttttcttattttcgatttcgaagttttatcgattaaagataattttgccatacataaaagtgctattgctgaatatgtttgacttgtactaccagcagttttgttcccttgtgctgatttaatagaaaatttcaacccataatatgattttggattcaataaatccctaacttctagtttgttcgctcttgttccaccagttcgataaaatgcttcttttaatttttcttccaaagttggaaaactttctaattctgttgaaaatgttttaagtgtttcaaataatgattcatccataccgtattgaatatctttatttatttcttcggtaaaattattcatccattcttttttgaaaacattatcatatataacatctaaatcaactttgtgacctccagttattttcttttcttctgaattcaaaaaattacttattattcttatatccattaattgactacttacttcatttgaaacatcgtcgataatctcacttaatttttgaagctttcggctatttagctttctatttttaatatttatatttcgtaaataattagaaatattttcaattatatctgcgtctaataaatctttttcatcaaatatttcttgaggtagaatttctctgcataaaggactaaaatcgccagtgtctttatattgattattcttctgtttaagaaaagtatagactacaaagttgtagtttgaaatataatcattattagcattattagactttttttctaattcattaatttcaatatcttcataaatatccattactatttcttctgtaaatagattagggttttgactataaatctcatttttcttatgtttaatatttgaaatttttaaatctatttcctttagagattctgtttgattattattacttatttgagtattgtaagcttttttcaattctatataataatcttcggcttcgtttaattctttatttaagctgtctaaatcaagatttttagttgatataaaattatatttatttttataatcatctatttcatcaataattattggtgttaaaaatgattctaattcacgttctagattgatatttagattgtctaattttcgcttttcgacttctaattttctgaaatttgttctcgcatttgtaaactgttcattaatttctttttctcttgaaaaagcatcaaaataatcatcaaagaagatatttgaaacttcatacatttcgtgattttcaagttgttcttctagtccaatatctgaattaaaagcaagtatataatcatcaggactttctaattgttctaaaacttctatgagcaattcaatgtttgctaattttctctccaaatttaaaatgtcttcttcaatcgtaaaagtttgtttttgaaaatattccttaatttcttctttatcctccttgtcaaaaattggtgattcaattaaagatatgtgttccattaagccatttagatcaatccaaaaacctttgtcatttttatttgatattttaagattttctattaattgatttggttccggaatatatcttaataaatcatctaatggagcatctacttttatattttcattgtggtatttatgaattatactttcctggaataaatctaattttttagtttgatttaaagcccaatgtgctaatgattttttatcttcaatattatttaaagcttttaatttatttttaatttctagctcttttttgtaaacttctgtttttgaattaatttgtacaagtacatttttaccctttaaattttcatttgtaaaaaaagtcaaaatgttttttgattttaacttttcagtcaattctcttaattgtgttatttgaagtttattttgatggtatttattatatttttcttttaaaatttctttttcagaacaattaaaatcctgtaaccaagagaaaaacttttttaatttcttttcactttcttcccatttatttttttctataaatgcagtttcccattttggatctattatttcaatttcttcttttgttgaaattattttttcttggacaattgtttttaattggatgagtattttggaactatcttcataaagattaattttctctcttatttcattttctgaattagtaatttcctttgaatagtggttaaaagaggctaataagtaaatctgttcgtttttatctttttcatttttcaatttcaacaattcacttaacgcattttgcttatcggtgagtaattctatttcatttaagtttttatcaaattctttggtgtcaccattcaattctttgacggtttgattaaatttttcaagtaattctttttctttttcttcaccaaataaaaaactttgtaatttttcactcttattcatatccaaagattctctagaaaatgcttgaataattttggcataattgtctaaagttttattactgatagacaaatcaataggcaatatctcatttttgaaaagaattttatgataatttgaagtcttatgccaagattcacaagttagttgcaaagtattactgatgtgttctttcaaattttgaattggtaatatttgattgtttttgagaaaatcggaataccctaaaacagtttcaaaaggaatcaattgagtatcgtcatcaaaattattaccctcttgaataataaacatatttgaagtaccagcactttctaaataaataccaataactataaatttatttttctctacctcaacatttataaaagcataacccatatcagttccattaccatcagttcttaaaaccatagttttaggttctctcgtacttgtaccttttgtaggagaatgaaaagccgaagtaccaacacaaattaattgtaaaatatcagaaatcatacttttaccagcgccaccttcgccaacaaaatcagttctgaacggattaaaatcataatcaaatccttgatggtgtactattcctaaagttgatagtcttttaattattggatagtctttcatttcaattcgtttagtgtttcctctatgtttatgatgtactcttcatatacttttagcaatctgtcgaatgcaggtaatgtatgaaactcatctttatctaatgttatccaaccaatttttttaaattcttcaagagccgattgaatcgttttatcaattatttcatcattgtaattaccaggagttgtattctttgatttagcaattaaagtataaataccttgcttgtagtcttcacattcaagacggattttttcttttaattttttaacagaatctaaatcaaattctcggtcaataaacataattttataaattagaaatccaataattacatactcacttttcagcatatacctgtgtttatcagagatatttccacgatcattatttataaaatctaaataataatagcttgcattgtcttcgcctcctttaactaaatcgactttaaaaaaggcattgtaatacattttaagactttcttcattttgcgaaataaaattatattgatttatttgttttccttctttttgaaagtgtacaccatcttttaataaataatcaattgaagcaaataaatcctctgaattatcactgtacaagaaactacttaaactaattttattattttcattttccataatgcaatgtttttaaattcgctattcgtttctaattctttatcaatttctaatttatatttctctttattgctataaacatatttaatgatgttaaaagttacgctcacagcgatttgactgcttttattttcttcaataattttaaaaaaaacttctgataatttgatacttccttttagttctatttctgataaaatatatttttcccaatttctaatagtgtctatttcgtttattttatcttgagctttcttaatgttttcctcaattattttttcgttttgagcatatttttttctttcttttggtttggaaggaaataattctcggtctttatcaattattgtgaaatgtggcgttgcaatatgaatttgtggtgaagaaatattacttggaaatactattgatttattaccattgttagattctaatgtacttttatacaatagaaaatgaatgaatttttcaatctttgaacttaacaatggtttgcttaatgttgaaaatagttgtctgattttgggttgaattcgatctaattttctatcaattgaatttaatcgatcattgatgtattttacaaatgaatacacttccgaaatcaactcatttatttcgttatcttgattttgtttttgttctaataaacctcttattgttttggtttcagaataagccgaacgtaattctgcaacgtgtttttgagcattgttcatactaacatctgttgctaccagtatctctaggaaattttgattggtaaaatcagttccttttttaagcaattcaatcgactcggtaatttgtctgtctaaaaaatcgatttgttctcttaaatcaggttcaaattttttgaaagtttcctttagccaaaatttaagtttatctattgaatcctctgattctaataacgaatttgaaagaaatgaacaaatttcttggattcgtgttggattaaatgctccaataagagtttctttagcgtgtttacaaaatttagaagcatagtctttgaaaaaatacttttgcgattcctggttgtaatccaaaaaatattcctgcaagtccataatatgactgctgtaaacctcttttggataacgcacttttgttctatatacatattcaaaagcttcgtgtaaatcattttctgtaaatttttcatcctcaaaaacaccatcattaattttttcataaatcaaaacaatagcaagccctatttctctttcaggaaataacagcttgtatgtattttcttcatttagaattttaatgaaattgaagtttgtgtttatgtgattactcaatagggataaatttagtttttattgcaaggtctttagttcttcatttaatcgttctatctcatttttaagatatttttctctttcttcatttccgaaaatttcggaatacatttctaatagttttgtttttattattctttcgtcaataatttcaataatatttttatggtattctttttcctctaatagcaattcaaaatcatttttaatagatttttcattctcttcacggattagatttagccattgaatagtttttgtaatcctattttttgcaaattctccaatggaaccctttttcataaagaatccatcttttagcaaatcgtgtatgttagccccaaatgttgatttatcatctaaaatttgtaccgctttattatctatattttctaaaaacataatattttcttttggaatatctgaaagtataaatggcgaatgactaacaaaacaaaaattgattgctttgattttataaagttctattccagaaatactatctaaaatatcatttataaaattccgttgcatttcgggatggaagtatagctcaatctcttctaaaactatattcacattagtataagcggtctttgttcgagtatttttaactgaatctaaattacttaaatgataaagaattgaactaatagaataaattttttgcttttctcccgagctcaatgttttgaattctattttttcatttttatctgaatttaaaattatat

SEQ ID NO: 4102 - DNA, 15439 bp, synthetic construct
  misc_feature 1..15439: note = Synthetic
  source 1..15439: mol_type = other DNA
cgcaccttctccttagttctgcggtaaaggctttcattcataagcacttcgtttacgcccacccaagagattatcgaaggatggttacgatagcgaagcatcatatcctctacgcttgcgatggccaggtcgtgatccagcgggttgtcggcgttctcttgtcccggtaccattctgaagcactggtagaagacgtgccaccacataatgccatatttgtcgaaggcctcgaaccattcatcgctcggagaaggcatatcttcacttccgacgatggttatgttagcatctgccataagacgcacctggtcgtatatgttcttaggactttcgtccagcaagatgtccggctgtatccatcctcccttgcagaagattcgcttgtcgtttatatagtacatccttccgtagttgtctccgtttttcagcaagtcctgtcgaacttccctgataccgaagtcgagttcctttacgtccgaacacttcgcgccctcgtcgaaagagagcttgaggtggtgaagccactgctcgccgtagccgttagggaaccacagatgtgggtccttgactgcgagagaagggaagtccttttcactgagctcgatagtgcgcttttcgcccggctgcagggtgatgccctcgctgatacggataggtttcatctttccttccatcttcttcgtgtatgtcgggaatttcacttcgtcgacaagcgagatgcgtgcactgagcttaccctttacctgacgctccgaatggttcgcgagctctacctttatgctaatgtgcgccagagtgctgtcgcttacggtcgtgcttacgaaaggattctctatggtgatatcgtcggtagagtgaagggtgactttctggtagatgcccatatttctgtccctaactgccggagcgcagtcccaaccacctgatatcttgagggtttcgtcctggaagatatccgtactgtgacctcttaccggacccatcggaacgaactgtgtgccaggggtaggggtgcccggatggtccacctgatagattttcagagctatgccgttcttctggcctgccttcacgaagtcgctgacatccagacggaagcgcctgaacatacccacgatgtcctcgtggtccgccaccttctccccattaacccaaacatctgccctatagttaattccgtagagggtaagccaaaccttcctacccttgaaggaacgagggactacgacctccgtgcggtaccagtaagggtcctgccacggatttctgccgctttccagatagttatatttcgccaaatcaagcctttcgttgaattcgtcggacacatccggaatcagataattgttcaggcccatcctcgggtcgggatagacgccttccttaaccagagcgttcagcacggtagtcgggacctgcgccttgaaccacccgtcggttttgaaatctgtcttcgatacagcctctcctgccgcctcgatctctgcggaattgattatctgccaatccttcagctcaagcccttgcgcatttgcgagaactgcggaaacgaaaagtaaaagtagtgtcaagctttttttcattattcggtagatgttactttattagctcttgtgaaattgccaggaatgaggttcttctcctctgcccatctgtccaccatcaactgcagcgggactatggccgggatggcgaaaaggtccgcatcctcgcactctacaactatctgcaaaagattatcgcaagtctgggccaattccttatccgtaagcaagatgaccttacctccgaaggcgagtatgtcgctcaccagtcgctccatctgcgggaagactcccgaagcggaatgcgcgaacagcactccgatgaaatccttacccaccatttccagcgggccgtgcctgaattctcctcccagaagcgccgatgccggggtcttcgtggcctccataaacataagtgcggtctgtgaagcgctcgcgaaaaccggtcctcgagccaccacctgcacgaatttgtgctcgcccagcgcgtctaccgctttcctgaggtattcttcttttccggccaatccgtccgccacctgtcctggcagcttttcgagaatctctgcgtctaccggcttccctaatatcttctcggccaataaatacgctaccagatatgtgcaaatgaaggtcttcgtgctggtcatatcctccttaccggcgaagcaaggaagactaatttccgaaagcctgtccagtgagctgccttcggtattcgtgatgcctataacggtaggacagtcgtcttcttcacgaagcttttcgagtagtttcaccacttcgtagctttcgccagactgggagatggctaccagaagagtatccttatgcatagaaggatagcggaagtgaagcaattcgccggtgtcgattgcgctcgcgtttatgccacccgcattaagcagcgaagctgcggcgcaggacacgaaataagagcttcccattcctgtaaataccagggaagtgtactttccggaagtccatagtttagcagttttgtctaaaagattacagccttcagagctaagatagtgtcttaaagtcttttcaagagcttgtggctgttcgtgaatttcatcgaaaaactgactcataaatctaaaaaacgtttatatgcaaaattaacaaaataattctctatatttgcctatatgttagatgattttcgactgagggttttcgagactttgtgcagtaccctgtcctttacgcagacagcgaagctgttaggcgtaagccagcctgccatcagtcagaatatcagcgaattggaacgagacctcggagtcagtctcttcgatagaaacggaggaaaggttacccttaacgaaaacggagagaagttcagggggtacagtcaccagattttgcattggtacatggccgcctcggcagctttttcttccgaagatggaagtaagcccgtggaagtggaacttgacagcggaaaggtggtgcagatatggacttgcggggaggatatacatctaaaacttaaaacagattaattttaaaatgataaaaagctatgaaatcttcaagcattcttatgacagtcttaatggggagtgtcatcgtgtcgggcgcagtttcctgctcgacatccgtcaaaatttcacggattcaaagtaaaggtcttaattctactcttacgcttccgagcgagaaggaattgagccgttactcaggagaggcgcgaagccaaagcgcagattcggacggactatatgctatgaaggtgtctcgtgacgaggaaaccggggagtctatggcaagtgaagacttggaagctgccgtaatcgtggctcgattcagaaatactgccgagcgccgcggtatggtcaatttcgattttatgatagtggcctccgattcacttcaagacccttcttggcagttaaggttctatcctacagtctatcttgataccgattcgctcagtctcgctcccgtttaccttagcggagccgatttccgtgcggcgcagcttcgtgcctatacgagatataatgactatctcgacggtattaggcgcgatagtcttaactttatagacagcaggcagcgaaacgcctttaatgagcgctttcctcagaagccgctgagcgaaagcgatgtggacaaacacttcgaaagaccgcttctcattcgctataatgcgtataagtcgtctcgaaaggacgccgtgcgggagaaactgataacagccccattggcaggctcggaagtgaggcgcgacaccactgcggcccattccgacgagcgtttcatatatctatataggcagagcattccttcgcgaagatcgctccataagttcaccctaagggttagaacgcagattttcgatgggaagaaggtgatttactctttcccggcatcgcttccgatcacctattatgtgagttcgcttagttcgctggtcgataatggattggcctcgaaccacgcaggtgattccctttatacgaagggcgtacgggcgcttagggacaggaattgggaagaagctttggaggcgctggctccgtacgaggactataatagcgcattggcatacgtgtcgctcgagtacaatgccacggcttgcggcgtgctggaaggatgtggctacgaggcggcgaatgtctgctatctgaaggcattggcatactcgagaaggggactggaagagcaggcggtcgagcaactgtgtagggcggtcgagctggagcctacctatcgtcaccgcggtaatctcgaccccgaaatagcctcactgataaataagtacgaccttttcgaggaagaggagtattaaaaaaaggcagggaattaaacccctgcctttatagtatctatttgagagtgaacttcgtcgtgctcctgatgtcctgtgatgaaggacctatgagtacttcgaattctcccggttcagccacccagccgtgcttctctatgctatagaaactaagagcgtcggacttgagcgtgaactttaccatttgggtctcgcccggcttgagtgaaaccttttcgaatcccttgagctcctttacaggacgatcaatgctggccacaggatccgctatgtaaagctgaactacctctgcgccttctctgtcgccggtattcgttacaggtacggtgatggttatctgaccatcagcctttatggcacgtttgtcggcgtgtgcatctccgaactcgaatgtggtatagctaagcccgtgtccgaaaggccattgaacaggaatgtccttagcctcataccatctgtaacctacatacacgccctcgtcgtagtgcgtctgccaatactgacttccttcttcttttacaccagggtactggcgctcggtcttgatagggccgtcttcgtatttgaatggaacggtgaaaggcatctttccggaaggattgattttacccgtaagcacgtcggccaatgcatttcctgactctgtgcctccgtaccatccctgaactatggcgtcggccacatcggcccaaggcatggaaacaggtgagcctgagatgttcactactacgagtttcttagcgacttcggcgagtgccctgatgacattttcctgtccgtaaggcatatcgagctgcacgcggtccgtaccttcgttgtcttggtggttgctcttgttaagtccacccacgaagattacgtagtcggcatccttcgcctctttaacggcttccgctatgagagttttcgcagagcggtggtcagtaaggtcttggcccgtatctaccagattataagatgtggaggtgtcgcccacataaccgcgaacccatttcacatctgcgtggcctgcaaatgcgttctgaataccctcgagaggggtgatttcgtaagcggtcttgaggtttgagctacctccgcccactaccattttcttcactgcattttcacccacgagaagaatctttccaccttccttaacgtcgagtggaagcgtgtgatcctcgtttttaagcaggactacgccggcagcggcgatgtctcttgcagccttatagtgctcaggacatacgaaacggccatagttaggctccggacgcatactggtgcggaatatggtacgaagaattctgcgcgccttgtcatccagctccttagtagtgtatttgccttccttgatgcccttaaggtaagggtctgccatatggtagttcctgtaactgtcgcttgctgcgcccctaagaccattggtccaggtacccatctcgatgtcgagtccgttctttatggcttcttcgctgtcgcgacatccgccccagtcgctcactaccacgccgtcgaatccccagtcgcctttcaagatgtcaacgagaagtttcttattatgacagttgtattggccgttatagaggttataggaacccataatcgcccaagcgccaccttcttgcacggcggccttgaatgcagggagatagatttcgtgaagggtacggtcgtccactacggaattggactgagtgcgttggaactcctgattgttcactgcgaagtgctttacgcaggctgctacgccgtttttctgaacgccctgtacgtatggaaccaccatctttcctgacaggaatgggtcttcgcccatatactcgaagttacgtccgttataaggagtgcggcagatattgactcccggaccgagaagtatgtctttcttacgatagcgggcctcttcgcctatgctcgtaccgtagagtagggacatctctttgtcccaagtcgccgcgaggttgataagggcaggaaaagccgtgcaggagtcgttagtccatccggcctggtcccactcgtcccagagcacctccggacggatgccgtgaggtccgtcggtgtgccaaacttccggaatgcccagacgcggaacgccgcgggaactgaatttggactgtgcggtggtcatacccaccttttccttagtggtcattctggccaatgcatcctcgaccctgtcttctaccggagcattagggttaaggtaggtcgggccgtcgaatttcggctggttgcagcaggctgccatagccagcgcaactgtagaaaggataatggttcgtttcatataaagtgttttgtttaatctagtaatcgtattacacgatatttaagaccataaatttagcaaatataatttaatttcaatccataaatattgattacctttgcgccatgaaacaaatgacaaaactttttaagatgatttgcctgggggtgggtcttcttgccgtgtctgtcgacggctattcttggggacagaaaggtcacgacgttacttgtgccatcgcacagaaacatttaactaaaaaggcttcgaagcagatttccgagattctcgatggaaagtccatcgtttattgggccaattggatggacagtgcaagccacactcctgaatacaaacatacaaaaacttggcattacaagaacatcgatgccgacgaaacttacgaagacgctctcttgaacgagaatggcgacgtggttcgcgctgtggaaaacatcatcgccgacttgaagagcggcaacctcagtaaggagcagcaggctctttcccttaagttcttggttcatctggtgggtgatttgcattgccctatgcatatgggtcaccgctctgatttgggtggtaacaaatggcaggtgcagtatttcaataggggaaccaacctccattccatctgggattcaggcgttatcgagagcgctcataaatggacttataccgagtgggtggagcagatcgatacgaatagcaaggccgtgaataaaaaattggccgaaggtactcctcaggaatggggtaaggaaacttacgaaatctgcaagaccatttacgatgccactcctgtgggttctaaattgtcttatgactatgtaggtgagtggactaccaccatcgaggaccagctccttcgcgccggccttcgcctcgcctccgtcttgaacgaaattttcaagtaattttttatatttgcggcctgaaatcttcgtagagttgcgaagataggttagtttagtagtgtatgaaaagtggtaatggtatgccgcttagggtgtggtttcctctggtaggactcactctctcgacttttatttttaatacgtccgaatttatccctattggactgttgacggacatagcatctgacttcaatatgactgaggccggtgtcggaatgttgatatccgtctatgcttgggtggtgatgctcttgtctctccctctgatgattttagcttcaaaggtggaaccgaggaagttactgctgggtttggtcgcagcattttctgcgtttcaggtgatgtcgttcagctccgttaattatgctatgctgatggcgtccagaataggtgtggcctgcactcacgccatattttggtcgataatctccccgatagcagtgaaaatcgcacccgaagaacatagggcattggcattgagtatggtggtgaccggctcgtcgatagcgatgattctgggaatgccaattggcaggatgattggcctgcatatagggtggaggatgacctttttaagcataggcatcttttcatttgccactttcctatatctgcttgcgactctgccatctattgctccgagcggaaagttctcggtaagggatttgcccgagatgttgcataataaggcgctggtcgggctgtatctgttcgtgttgctcttttcaggggcttattatatatgctacagctatatagagcctttcctgaagcaaatcgtgggtatgccggattcgcttgtgaccagagtgctgatgattttcggatgtgcgggaatagtgggtagtatcttgttctccaagttctattcgaagaacaagtatttctttaccacttgcattatggtaatcttcgcgacttgcatgcttctcatcttcccggtttcgaaaagtgcattggctatcatagtgttatgcgtgttctggggattgacgtccactacctttaatgtgtctatgcagaacgaggtcattaatcttaccacgccggcacagagtgcggtggcgatgtccatatcttccggaatcttcaatatgggaattggctgcggaacttatataggaggactggtatgcacgcattcttccatagccaatataggcttcgtggcgggaatagtagccgtagtgggcgtattgtattgggttttcagactgtccggtctgtataaggtagcggagctgcgacgggggcagtagtttggaagatagagtgtgccggtaattcttgactgatgataaagacatatagacaagaaagataattaacagttattttgaatgaagaagtttaaggcgatttttagcgacatagacgggacactggtgagttttacgactcatcgggttccggagagtacatttaaggcgatcgaacaggctcgaagtcaaggcgtaaaggtaatcatagcgaccggcaggcctttcggagatttcgatattataggagatgtgccttacgatgccgtcatctctttgaacggatcggattgccgatggaaagacggccaagtgattcgccgacattttatcgactacgacgaattcaagaagatgtcggaactgtccgacgagtacggcttcgcgctttgtcttgagctaagcgaaggcttcttcataaaccgcataacccctcctgtattggatgttgccaatactcttaatcattcggttccggttccggccgacatcgaagaggtgtttagaacctatggctgcgggcagctgtccgcttatttcgatgctgagaccgagcggaaggtgatgcctcaagttccaggcctttacgcaagcaggtggcaccccgggttcgttaatatagatgtcgcgggcatagacaagggcacggccttaaaggaaatggccgggcttatgggaattggcatagatgagaccatctccttcggtgatgggggaaatgacatccctctcattaaggcagccggtctgggtgtggcgatggggaatgccggagaggagctgaaggccgtggccggctatgtcaccgcttcggtcgacgaggatgggtttgctgccgccctgcaaaggttcgtgctgtagctccgcctctctttttacctactggctatttttttcggcttgtctgcattttagcgacttcgcaagagactcagttcttgaaactgtcatctcatccggtgaaaatggtgtcggatgaaaccgccgaaaaatgtggttttatccgacagattgacatttcccaggactaaattactgaaaaactcaggaaaagaaactttaggaaaagaacaggcgacccgagggccgcctaaaatgtttgcacaacggaataatccttattgtgaattgctataaacttatgcaaagttatagaaaaggtttagatatacaatacttttttactaattttacacaatgaactgataactaataccgatatgaaaaaaatactaggcttggatttgggcgtaagttccatcgggtgggctttggttaatgaagctgaaaagcccgaagagtcgtcatccatcattaaattaggagtgcgcgtcaatcctttgacaactgacgaacaggcagatttcgaaaaaggtaagagcataactacaaacgctgatagaacacttaaacgcggaatgcgtcgtaatttgcaacgatataaattacgccgcgagaatcttatagaggtcctgaaggaacagggcttcattgatgacgataccatattggcagagaatggtaattttaccacatttgaaactcttcggttgcgcgctaaggcggcagatgagcagataagtctggaggaattggccagagtcttattgaatatcaataaaaagagggggtataagagtaatcgaaagtgcaagtctgccgaagaggaggggcaggtcgtagatagtatcgatgtggctagagatttgtatgagaacaacttgactcctggccaatatgtctatcttaatatatttagtatcgggaaaaagagtgtaccttcgttttatagatccgatttggaaactgagttcgagaggatttggcagaaacagagtggataccatccggagttgacgcccgaattgaaggaaagcttgacaggaaagaataaaagccaaacttgggctattatagcaaaacgttttggccttgtggggaagaaaagagatgtaaaaggtattgaactgaagaaagataattatagattaaggtatgatgccttgatggaaagacttgatccggaagatctggctatcgcacttcaggaagttaatgatgacataagaaacgcaggtggctacctcggaagcataagcgaccgaagcaaatgccttgtgtttaataatatgactgtcggacaatatatgacgtccgaattggaaaagaatcctaactatagtttgaagaaccaagtgttctacaggtcagattatatggacgaattcgaccgaatttggagagtgcaatctgcgtatcacccggaattgactgacgagttgaaacatacgataagggatatagtcattttctatcaacggccgctgcgaagtcaaaagggattggtcagtttctgtgaatttgagcctcagcgtaaagtctgcccgaaatcctctcctatctatcaagagtttcgtacttggcaggaactaaataacctaactatcggggggcttcctttgagccttgacgagaaaaaggttttggcaaaggagcttcaggtgcgagagtccttgagtggctccgatatttattctcttctgaataagcctaaaaaccaaagattaaatttcaaacaaatcgacggaaataggacacaatctgtattattcaagtcttattttaagataattgaagaaagcggaaatggggaatatgacctcaaaaaattgtcttgtgacaaaacgcaagaagtcgtatccgacgttttttcggcactgggagcaaaagtagactttttagttgcgagttctttagaggattctaaattcttcgcactgtggcatttgctttattcctatgagggcgataattcaaaatctggccaagaaagtcttgtagttaagataagcgaacttacggggctaccatcggaatattcaaagattattgctggaataagcttcgagcctgattatggtaatttgagtgccaaggctataaagaagatacttccatttatgaaggatggagatgaatacagtgtagcgtgtgaaaaagcaggctatagacattcaggaaagtcattgacgaaagaggagattgaatcgaaggtatacaaggatcacttggagagcctgcccaagaatagcttgagaaatcctgttgtggagaagattctaaatcaaatggttaatgtagttaatgccattatcgatgagtatggtaagccagatgagattagaatcgaattggcccgagaacttaaaaagagcgcgagcgaaagagatgaaatgactaaggccaataatgttgcggataagcaaaatggagagataaaagcggaactgaaaagagacttcggtataagctctcctacccgaaacgatattatccgttatagattatggcaggaactgggttcaaatggctataagacattgtattcgaatacgtatatccctaaagaaaagctcttttcaaaggaatttgatatcgagcacattatccctcagtctcgtttgtttgatgattccttctcgaataagacattggagtccaagagtataaatatcgagaaggataatagcactgccagggactatgttttaagcaagtatggcgaagcggggcttagcagctataaggctaatctggatagaatgtttaatgcaaaggaaattagtcgcacgaagtataatcatctgttaatgagggagtcggatattccgtcggattttattaaccgtgatttaagggattcccaatacatcgcgaaaaaggctaaggagatgctggaggatgtagtaaagtatgtagtttccaccactggttctgtcaccaagcgccttagagaggattggcagttggtagatgtgatgaaggaacttaattgggataaatatgataaattaggactaacatcttatcacgatggaaaagatgggcagaagataaggaaaattgaggactggactaagcgaaatgaccatcgtcatcacgctatggatgcactgacgatagcttttaccaagcgttcttacattcaatatcttaataatttgaatgctcgtttggagaaagtatcggacgattcgtcgtttttcaaattagaagactacgaactggatgatttggataggggcgatgtggcgcgcgtggttcgtgctattcaggacaaggaattacacagggatgcagataagaaactgcgctttaaccctcctatgcctttagatgagtttcgaagcgaagccaagcgtcagctcgaagatgttttggtgtccataaaggcgaaaaacaaggtggtgacgaaaaatgttaattacacgaagtctaaacgaggtgaccgtaagagtcaaaatacactgacgcctaggggtgcgctccatgaagatactgtatgtggtagaatctctcgatatgcgacaaatgaagaaaatgtgggttctggatttaatgccgagaagattagcacagtcgcaaatgccatttatcgtcaagctcttttaaatcgactttcagaatatggaggagatcctaaaaaagctttctgtggagctaatagtctggagaaaaagccgctatatctaaatgagatgcatactgactacgtgccgcagcgggtaaagactgtccatttggagactctatatactaaacgcaagcctatagatgaatctcttaaggtagataaggtcatagataaaggtataagggatatacttaaggctcgattggccgaatatggcgattccgctaaggctgcattctcaaatcttgacgaaaaccctatatggttaaatcgagaaaagggtatagcgattaagcgtgttaccatagatgcaagtgtgtccgtggtcgaacctcttcattataagaaggaccataagggcaatgtgatttatgattcacgcggagagcgcattcctacagattacgtgaagtatggtaataatcaccatatagctatatacgaggacacatccgggcacctccaggagcaggtggtaactttcttagaggcgacatcgagggcttctatgggacagcctgtagtggataaagactatagaaagagtgaaggatggaagttcttattctctatgaagcagaacgaatacttcgtcttccctaatcctcagactggattcgacccgtcggagatagacttgatggatccgaagaattatgcggctgtgagtgagaatatgttcagggttcagaagatgtcttctaagtattatgtttttagacatcatttggaaacaaacgtgaatgatgaatcttcaaaaacgcgagatgttgtttggaaacgcattcgaacggttgatgaactgaaaggcgtagttaaagttcgggttaaccatataggccaaatagttcaggtaggggagtattagtatggtaaaaaggactttatatttcggcaatccggcatacttgtcacttcgtctgggacagctggtagtgcggctgccgtcgccagagccgaccattagtaaagacagttttgaggccaagaccatcccggtagaagatatcggggtggtcgttttggataataagcagataacgattactcagggcttgttagaggctttgctggaaaacaactgcgctgtgctaacttgtgattcgtctcgactccctgtggggcttatgcttcctctttgtggacacactcttcaaaacgagcgatttagagatcagatagaggcatcgcttcctcttaaaaaacagatatggcagcaaaccattaggcaaaagatcttaaaccaagctgcagttctgcgttattccacgggtaaggagcataacaatatgctggtgtgggcggaggaggtacgaagtggcgattccgctaatctggaggcgagagcggcagcatattattggaagacagtatttggagacccgatgttcgtccgtggacgggaagaggctcctccaaataacctattaaattatggttatgccattttgagggctgtagtcgctagaagtttggtttgtagcggattgcttcccacactgggtgttcatcaccataatcgctacaacgcgtattgcttggcggatgacataatggagccttaccgtccgtacgtggataggatggtgtgcgatatgattgaattaggtggtagtatgattcttactccggaagtgaaaaaagcgtttttgtccataccggttctcgatgtcgacatagatggacatagaagtccactaatggtcgcagtgagtacgaccgcggcttcgcttgccaagtgttttaccggggaatctcgaaaggttatatatccggagatgtaaactaatgatatgaccgataggtttagcgcatatagagttatgtgggtactagtctttttcgatttgcccacggatactaaaaaagagagaaaggcggctagcgactttcgtaagaaattagtttccgatgggtttaagatgtttcagttttctatctatatgcgccactgcccaagtgctgaaaacgcggcggtacacgtgagacgagtgaaattgaatttaccggatgcgggtcacgttgggatactaacgattacggataagcagtttggggctatggaactcttttgcgaaaagaaagaggaggcgccgcctatcgattatctgcagctggaactgttttagtattcgacacgatgtgcgaaaatgtagatactaaaaattatcgtccttaattgacc

SEQ ID NO: 4103 - DNA, 13478 bp, synthetic construct
  source 1..13478: mol_type = other DNA
  misc_feature 1..13478: note = Synthetic
acggagaggacttgtcgcctattatgaagcctgatggcagttacacttatgcgtttactctgccaggaatagagtacatgacgaaaataaattgatactgattatgaacaaatatatctatatcttcatagctgccgcatcggtcttcttgggtgcagcatgcagtagtgacaatgatttaccagcgtatgcagcagggctgaaggtggtgaaagcagagacagactttggtgttctcggtgagacacatgaggttgtaatgagtaaagaacctgctcgtgcctatgcacttgacgcttggcttacggtgtcgaaaacggcagagaagctatcactgacggctcaaccgaatacgagcgcacaatcgcgtaacacgctattggtggttaagaatgagcaaggagactctatcacactgaatatccaacaggagggtgtgaccttcgggttgcctactggcgaggatatctatgctggagatgaggctgttgaacgctctttgattgctacttctaacgtccccgttgagtatagtgggacggcagattggattaaggtaggcaatacgaatgggaaaataaacgtcaaggtcgaagccaatacgacggggcgtccacgtgtagggtgggttacagccaaggcaatcgggcttgttgactcattgaaagtggtacaggcttcgctcaacgatgtggttggcgattatgtgcaaacggctaaaatgcgccttccaagtcgtgacttagcagagaagacatcgtctgttcgtatagaggcaacgggtacgaacaaggcaaacttcatcgttgacaatcaatacaagtgggaggttagcttcacaccaggcaaaggctttgagatgatgaatggtaagattgttggcaagaaagaggttgttccaggcgtatatgagtatcttatcagtgtaatcgttgctgatgactttagtaaggagcatgagactgccatcaacggaacgaaggagagcatccttctcacgttcgataacgatggtaatctagtgttccgtgaggcacagaagttagcttccgcacaaaccttctcatcctatggttggaaccgatttaccgacacgaagcccgttatgggtgctttccgtggaatcggagaggtgtatgttaatccgaagttaacacgtagataaatgcaactttaaattctatcatgatatagaaaagggtgttttcaccctgactccgcccttgcatgcgaatgtaggggcggagttttttgtgtaagaaagtgcctcacccccgccccctctccgaatggaacaaccccacccaccctcccctaaggggaggagtgcctaacgggtgccagttagaaaatagtttctttaattcaaaaggggcgtttcttcgatatgaagagggcgttctgttgcatcgaagagaggctttcttcatatcgaagaaacgccctccttgtttgcaaatcagactatctactcccctctcctttcggagagggggcgggggagaggctgtagttgatttttgatgaggctccttttcctatttaacaacaaatcttctcatttctttggatgacttctcaaaaagtattacatttgtgttgacaaacctaaatgggggtgattacaggagattagacgcattgattatgatcctaatagccctcctttaaaacctaaaagtcagttattacctatgcaaactaaaatcctatgctgcgtgacaggcaccctcgcattgggcgccatcctacctgctcaggcacagaagaagcccatgaatatcgtttatatcatgagtgacgaccattcctatcaaacgattagtgcctacgacaagcgtttcattgatacaccaaacatcgattggattgccaatcatggtgtgaaattccaagagagtttcgttgctaactcccttagcggaccctcccgagcatgtatgttaacgggtaagcacagtcatgcaaatggtttcacagataacaccaagacgtttgatggaggacagcaaacctttcctaagctcttacagagtgcagggtatcagaccgcaatgatcggtaagtggcacctcacatcactgcctactggcttcaactattgggacattctcattggacaaggcgactattacaaccccgacttcttatgtaatggcaagccactaaagcgtcagggatatgtgacgaacatcattgctgacctcgcaatagactggatggagaataaaagagacccttccaagcctttctgcttactaatgcacaacaaggctcctcatcgtgtttggaaccctgatacatgcgacttagacctctttaatgatgtgcagtatccattgcccgagacgttctatgataactatgaagggcgtttggcagcacagaaacagaagatgagtattatcaaagatatggacattgtctatgataataagatggcagatcacgagcaggagatacactctgacaaggagttggaagcgtggggacgtcgtaactatgagcgtatgacaccctcacaaaaggctcaatgggatcgccattacgaccccattatacagaagtttaaggctgataagctatcggggaaggcgttagctgaatggaagtaccagcgttacatgcatgattatatgcgtgtgattcggtcggtagatcgcaatgttggacgtgtaattgagtatctccgtgagaagaatctattggacaatacgatgatagtctacacctccgaccaaggtttctacatgggtgaacatggttggtttgataagagattcatgtacgaagagtcgttccgtacaccactgctaatctattgtccgggtgggaaacaaggcgttgttgatgagatggtacagaacattgactatgctccaacattcttggaagcagcaggtgtaaaggttccttcggatattcaagggtgttcgctcttgcctttgttacagggtaagaagcctgctaactggcgtaaatcgctgtattaccattactatgaataccccgcagagcactctgtctgccgtcattatggtattcggacgaagcgttacacactgattcatttctataacgatatagactcttgggagctttatgacctcaagaaggacccttcacaactgcataacatctatggacaaaagggtacggagaaactcacagaacgattgaagaaggagctaaaagagcttcaagtacaatacaatgaccctattaggaaccaatactaagtggcaactttgtacttatcacgggctattaacgaattgtgtagacgccttgactcaatagagtcggggcgtcgcttttgataaaggacttatttcttgcatccaagataatcattagttttatgttgacgaaatacgagttatttagtaagcaaagccttcaattaggctagataaagctattttgcggtgtattctcttgttagttagtaagaaaataagtaatttcgccgatgtatttatatgatataacaaggtggtggagatggtgtcttgactgcttagataaatctattatgaaacgacttactttattattaataatgttcctgatggttctgatggcatttgctgacggacgcattaaggtggcgtgtgtgggtaatagtgttacatgggggtatggtttgaccaatagggacgccgattgttaccccgtgcagttacagagaatgttaggagataagtacgatgtgcgtaatttcgggcactctggaagtacacttctaagccatggtcaccgtccatatatcgaccagaaggaatacaaagaagcgttagctttcaaagccgatagggttattatccatctaggactcaatgacacggaccctcgtaattggtctgaatatgctgaagagttcaattctaactatatagaactcgtcaactccttccgcaaagtgaaccctaaagcacagatatgggtgtgcttgatgtcgccaatcttcgaacgccaccctcgcttcgagagcggaactagggactggcatagcctcattcaacagcatatcaagcaagtggcaacggctgagaacctcccattaatagacctctatacgcctcttcacaatcgtccagacctctttgcggatgcgctacaccccaatgctgaaggtgcaaagatcatcgctgagactgtatataaggctatgacaggcaattatggagggttatctcttgcgccactatataccgatgggatggtaatgcagcgtaacgaaccgattatctttcgtggttctgccaatgcaaagatggttgttaaggtaagtttcgatggtcagaatcaatccacaacagccgcagacgatggtacatggagcgttaatttccctgctcgaaaggctggaggaccttacaaagcaatagttgcagcaggtaaagagcggctgacgttgaaagatatatacgttggagaggtgtggttgtgttcgggacaatcgaatatggagttgcctatctccgccgtacaaagtggtaagcaagaccttgcggaggctggttcacaacccttaatacatctctttaatatgtcaacacgctatcctacgaatgctgtgagctggtcggaagcggtgtgcgactcggttaatcgccatcaactcatgcgtgttggtccatggcgtaactgctcggctgaatcgttatcgggcttctctgcagtagcatatcacttcgctaagagtttagcagatagtctgcaagtacctataggagtgatttgtaatgccgtaggaggcactaccacagagtcatggattgatcgttcgacccttgaaaaggactttccagcaatcttgcgggactggtatcatggcgatttcggtatgaagtgggcaagagaacgtgctttgcagaatattgccaatagcaagaatccattgcaacagcacccttatgcgcctgcttatatgttcgagacagctatgactcctttgttgggttatacgttgaaaggtatcgtgtggtatcaaggagagtccaatgcgcataacatcgagctgcatgaacgcctcttcccattgttggagaaaagttggcgaaacttctttcaacagaagaagatgcccttttatttcgtacaactatctagtctgaaccgtcgttcctggccgcgtttccgtgattcacaacggcgtatggcgttagggttagagcatacttggctgacggtgacaagcgatttgggcgattcacttgatgtgcattacaccaataagaaacccgtaggtgagcggctcgccatgcaagttttgcaccatagttatggacatgatattgtgtcagagggacctgttatagagcgagttgaatccgttgatggaggcttattgttgactttctcaaatgcaaaggaacttcatttcacgggcaaccgattgataggctttgagcttgcgggtgccgatggtatttatcatgaagcccaagcaacgatagagaatggttatcaggtgcgtgtgtcgtgtgggtcagtagtagcccatcctgttagtgttcgctatggttggcagccgtttactcgtgcgaatcttgtgaatgaaaagggattaccttgcagtacatttgagaccgcagaacgtagattttagatagagaggacgcctcatatctatttcccttgccgacagggaaggggagtagaagggcttatttctatctgaagtaatagtttaacaagtttttattagataattgttttcagtatagttagttgtgttttcttatagaggaaacaatgttttgaatattaaagtattatcccttgaattaaaggaaacgcccttctcaaatagagaagggcgtttcgttaataggaagagaggctctcttgccatcgaagagacgccctcgttgattccaataaaactatcgtctttggacaacaatgcgtattcctaccccgtggatgggggcaagataggatttaaaaaaacttcagaaagacttgaatcttcactctcctgtatagaacttaatcagttgagtgatagcctgggtgcatgctggacagaactcaggatgggcatttgtgcgcatacggcagtctgggtaagcgcggtaaacaccatgttgcgcatagccagcaggctcgtatgcacccactttccacttgtccctgcgtgcgttcggcttatctaagtcggttggttcaggcgtcggtaatggggtcttcttatcgatcattccttcccacttattgtggaagtcgaccagagttgttaggttcggttcccatggctcgacgtcctttggatacatattaatctcttctttggcataagcatactcatccccaagtcctgcgaaagagtgtccaaactcgtggacaaccactggtttgaattgaggatggtgtgccattgagaggttgtaagagttcagaataccgccaccaccatatttctctgtgtttactagtacgatgatatgttcgtaaggtgtaccagctagccagtcatggaggtctttgagatggagtgtagtgaggtatctgtcgctgtagaaagtgtcgaaatgagagtgaagagccgtgttcttccatataccctttgatggttcggatgtgccactatcaatggatggagccttgacagccacaatattgaatcgagaacgcagcgatttgaaaggttcgtgagcgaagagagcctccatcgcaatgcgacaatcctttataaatgtaggcatttcagcctcagtgtaaccctccgcaatatatgcaatgtgtatgcagcgcgatggatcagcagcctgttgcaaagtctcgtaaggtgtgatattacgctccccgatgtgtcggatgagaatatcctgtggtacaacgatatgcgtcatgcggttagtaacctcgcgccgattgttccttagttcgatagttacatctgctgtatctttgggataaggtactagaaagacgttctcaaacgatttcttgctattaccctgtgcctcgtcataagtgagccactcctggaatagagtcgaaaaggagtttcgatagattactttttgcgtacgatggtcacgcacaatgacctgtccattgccttcaacgggcacttctgctagtcgttcgtgcttgccataccaatgtggaatacgtgatagttcgtccacagcgatggtctgctctttggcattccctgcgaagatgtaatctaaacggagcgttgcatcctcaaagtaatggttgaaatcctgcgcaacagcactcatggagagtgcgaggagtagggtagtaatgatttttctcataggtcttgaaaattggttagaactattatttctcattcttcagatagatagaatcattgacaaagtagcgtttgcttctctcaaatacgcatctcttatcatctgcaaagatatgaataattaatgaaattagctatcaggaaagagattattaataccttatttcttattcatagctcatagttaaagcctttcacaggctctttgaagggaatgaagtcttattgtgaggttctttataaggcgtttttctctatttaaaagttcctcattatgatatgtgtcgagtgttaagagttgtgtagttgggggtattttagtggtttctacttactctttatagtgtcagaagatagtgataatgtggataggacacgagtatttttgaataaggaaaaggttatgaaagtgcgaagagtttaattttagctgtcattcccgtcatagcttatacgtatataggtattactgattgttcctaatgatacattaggatagtggctagatggattatatataaacaataaaaaatgccccgtatggaaggacgaggcaacctaatgttctcacaacggaataatccttattgtgaatactttaaaattagttcgttacaaaggtatgtattaaaaaaataataagcaaattttcttaatgaaattttgactttgttgttgttttttttgtacctttacacaaattatcatataatcaattcaacatgaagaaaatactaggattagacttaggaactacaagtattggttgggccttagtgaatgaaagtgaaaacaaagacgaacaatcttctatcgtaagacttggtgtgagggtaaacccattgactgtagatgaaaaagggaactttgaaaaggggaaagcaatcacgactaatgccgatagacagcaggtgcatgctgcaagaataaaccttcaaagatataagctgcgcagagagaatcttcgtagttgcctacagaaacaaggttggataggttccgaaccgatgtatgaagatggtaaatcttctacttttgagacctataagttgcgtgcgaaagctgcagaagaggaagtgtcattgcatgagtttgtccgagttctatttatgctgaacaagaaacggggctataaaagtaatcgaaaagcaaacgataaagaagatggaaagctttttgatggtatgaccatagccaagaaactctatgaagaacgcttgacacctgccgaatactctcttcggttgctctataaaggtaagaagtttacgccagaatattatcgttctgatcttatagaagagttcgagaagatatggaacgagcagaagaagtattatccagagatacttactgacgagtttaaacagcagttagaaggtaaagcaaagagcaatacaagcaagctattccttggtaaatatggtatttactcagctgatacaaaaggtctagataggaggctgcaacctttgaaatggagggttgaagcgatgaagcaacaggttgataaaaatgttttagcctttgttatcagtgacttgaaaggacagattgctaatacaagtgggctacttggtgctattagtgatagaagtaaagaactctatttcagcaagcagacaattggtcaatacctatgggcttctctgcaagaaaatccacatatcagtattaagaatcaacctttctatcgtcaagattacttagatgaatttgagaagatttgggaaacgcaagcaactttccataaggaattgacatcagaactgaagcaagaaatcagggatattatcatcttttatcaacggccattgaagagtaagaagaatctcattgctgtttgcgaacttgaacagcgtaaggtgaaagtgacagtagatggaaaagaaaaagagataacgataggtccgaaggttgctcccaagtcttcccctatgttccaagagtttagaatttggcaaaacctaaataacattctacttctagaccatgagactaatagcaagcgtccattgtatgaggaagagagaaaccttttatatgaggaactaagcgttaaggagaaactcagtaaaactgaggctctgaaggtattgggcaagaagagtaagcaatgggatttgaattataaagagttagaaggcaatagaacacaagctgttctctatgattgttataaccgaattatcgtgatgtcagggcatgaagagtgtaatttcaaaaaactaaaagcctctgatattcgccattatgttaagatgatattcaagaacttagccttcaatacagacatactatgctttgattcatcgttgaaggggcatgagttggaaagacaaccaatgtatcggctttggcatctgttgtattcttatgaaggtgataactctcgaacaggtaatgacgcgttattaagaaagttggaaacagcatttggttttccaaaagaatatgctgctgtgcttgccgatgtcgtttttgaagatagctacggaaacctcagtgtgaaagcaatgcgtaatattttgccacatttacaagctgggaaagattatagtcaagcatgtgaggaggctggatataaacattcgcgtcggtcgcttacaaaggaagaattaaatcaaaaggtgtataaagaaaggttagaactattgccaaagaatagtttacataaccctgttgttgagaagatcctcaatcagatgattaatgtaatcaatgcagtggaatgacatcataaaatataagttatatgaagaacttaaatcgaatggctttaagactttatactctgacacgtatatatcaaaagataaactcttctcaaaagattttgatattgagcatattattccgaaagctcgtttgtttgatgattcactttcaaataagacaatcgaagcacgtgatgtaaatatagctaaaagtaataagacggcctttgattttatacttgaaaggtatggagaacagggtgttaaggcttataagacgaaacttcttcgccttctagaggatggggctattagtaataagaagtataataatttgctgaaaacggaagcggatataccttctggctttattgatcgtgacctgcgaaatactcagtatattgcaaaaaaggcgtatgaaatattaagtgagttggttaagatcgttactccaacaacgggatctgtgactaatcgattgcgcgaagattggcagttggtggatgttatgaaagaacttaactttgagaagtatcagaagttaggtttagctgatgtggtagaagatagagatggtcggaaagttaagcgtataaaagactggacgaaacgcaatgatcatcgccatcatgcgatggatgcattgacaatagcttttacgaagccatcttatattcagtatttgaacaacctcaatgcacgcagtgataagagtagcagtatttatggtatagaggtaaaggaactgcatcgtgaagaaggtaagcttcgctttaatgctcctttgcctatcaatgaattccgtgcagaagctaaaaggcatctaaaatcgctcttggtatctattaaggcgaagaaaaaagtgatgacacagaacgtcaataaaattaagacgaagcatggaatcataaaaaaggaacagcttacaccacgtggagaattgcataacgctacatactatgggacaaagaaacgtccattaataaggatggtgaaagttggagcagcattagacgaagctacaataaatagggtatgcagccccgctattcgtgcagcattactgaaacgtctgaatgcttataatggtgatgctaagaaagcttttacagggaggaattcaatagataaaaatccgatttacctagatgttgagcagacgaagatagttccggccttggttaaaacaatagagtggggaatgtatcatcctattcgtaaacggattacacctgaccttaaaatcgacaaagtgattgataaaggtataagggaaaaactgaaagctcggttggcagagtttaatggagatgcccaaaaagctttcagcaacttggatgagaatcctatttatatggatgaagcaaaacaaataactttgaaacgagttagtattgaaggagtcttaagtgcaattccgttacatacattaaaggataaggctggtaagccaattattggaagtgatgggaaccctgtattcggtgattatgttcaaacaagtaataaccaccatattgccttttatatagatgacaaaggtaatttgcaagataatccagtatcattctttgaagctgccgaacgtaaatcacaaggagttcctgttatcgataagaggtataattgcgataaaggatggcactttgtatttacaatgaagcaaaatgaatactttgtcttcccaaatgaagctacaggttttattccttctgaagtagatttattggatgaagctaattattgtattatcagcccgaatctatatagagttcagaagttatcgaaggcttcaggtagagattattggtttaggcatcacttagagactatgttgaatgatgatttaaggttgaagaactctacgttcaagcgaatacagtctttaaaaggtttagaaggtattgtcaaagtacgtatcaattctataggtaagatagccgcagtaggtgaatacgattaattggatggcttatgataaagaagacattatgtttcagcaatcctgcttatttgagtttaaagaattcacaattggtaattcgtttgccagaagtggaaagttgtgataacctatctgatagtttcaagcaacaaagtgagcgtacaattccaatagaagatattggagttgttctgcttgataataaacgaatcacgattacatcgtctgcattagaagccttgatagagaacaattctgctgtaatcacttgtgatagtaagaatatgcctattggacttttgttacctttatgtggtaacacaacacagaatgaacgcttccgtatgcaggtagacgcatcgttaccactaaagaaacagttatggcaacaaactataaaacaaaaaataagtaatcaagcaaagattttaagtatatatactaatgctgatgtgggatgtatgtatgcctgggcagataaagttagaagtggtgatcccgaaaaccttgaggctcgagcagctgcttactattggaaaaatatcttcactgatatttcagattttgtaagaggtcgggatggggaaccacctaacaacttattaaattatggatatgcgatattacgtgctgttgtggctcgttctttagtagcaagtggattactcccaacattgggaattcatcatcacaatcgatataatgcttattgtttggcagatgacgtaatggaaccttatcgtccttatgttgatgggttggtgttggatataatgtgcttgactaatgattatagtgaattgacaaaagacataaagattcggcttctatctattcccgttcttgatactactattggagggaaaaagagtccgttaatgatagctacacaacagacgacagcctctctttataagtgttttagtggggaacaaagaagaatggtttatcctgaattataaagtcaattggtggaattttatagatttagtcaatataggagtatgtggttaatggtattttttgacttacccacagatacaaagaaggagagaaaggctgccgcactatttcgtcagaacttgctaaaagacggatttacaatgtttcaattctctatttacatacgccattgtggtagtaaggaaaacatggaggtgcacattaaaagagtctcaaccattattccagagtatggaaaggtggggattatgggtgtaactgataagcagttcgaagggattaagctcttttatggtaagaaaccacataagcccaatgttccaggagtacagctagagcttttctaaaaagattaaagtttcacttttaaaagtgaaactttaatctttcttgcatttttctttttcgtaagtagagagtatgttgcttataatcaatgttttattctacttgtgttgtatttgataatgcaaagatactaattttaaagctaatcacaactgattagtcaccaaatggttgccacagatagttgtatttgataatgcaaagatactaattttaaagctaatca

SEQ ID NO: 4104 - DNA, 10449 bp, synthetic construct
  source 1..10449: mol_type = other DNA
  misc_feature 1..10449: note = Synthetic
tacttgagaaggtcattaaagttgtgcttctttcttaacataacaaaaccccaaaagttatttgtctaacttttggggttcagttcaaaagtaattttgatccggttttctatgtaatatggcgtggtaagggcggagccccagctcctatatcatgccttgcagcacctttttttactttatatacatgaggataggcggctgattgctggccgcaggcattggctcccgaaaagggaggggacttgcttgcggggaggacctgcggaagcaacagccgccatccgacataatgaaagggggtaactctcagttcatattttgaacttttgagtcacccccttcttttttgtttcgtctcggattttattattcaacaccgacatttacgtattcgtggtttacttttccgttttctacggtgatgatcctgtatccagaatggtctttgccaagttgaactccgatggcactcgttgtcacgacgggcatgtaatttttatatgacgttactctgttttgatggagatgtcctgaaaatactgcttttactccatatttttcaaatattttgaaatactttttacgtgcttccttggaaagttggaaatatccttcgtcctcgtcaaagctttccaggaagaaaggatggtgtgtaaagatgatcggtgttcttttgtttttgttttttttgagtgttttttccagccagcggaactgctcttcttcttccttggaaccataacactgctttatcggattgctgtcaatgccaatcagtagtgtatttcctattttttttgcaaatcttgaatatttcatatgactgaaatatttttccattacaatttttccgtccttcatgtccacatcatgattgccggggatgtagagaacagggatgtctttgctgatcctgcttgtaatttcttcaagcgcattccattgctcttcaacccaggtgtgatttacgaggtctcccgtgaggaccacgacgtccggtttgagcatgttcagttcctctacgcatttggaatatgtttttacttcgtagctgatgacgctgtcgtcccagaaaccgaactgagtatcagatacttgtgcgatgatggttttgtcttgtgctgccactgttgagcatatcagcagtaaggcggctgtaatagattttttcttcatgttcttatcttttgccttgattgattttgtcgattaactgagaaagtgcctgcaatcatggtcgtcgtatagggtcctttaacagtgatatttttaaaaaagaatctaagacgcgcaagatttgagggcacaagtatgaattgtcagatctgtatagagaaatttattattgctgaactttcttatgctgccatattgttaatctcactctattgtgcccaggattacaggtcccatgacagcataaccttcaagtgtcggatggacttcgtctttggaatagatctcgggcagtcctccctgtccgtctttcatgatgctgtggacatcagcatagctgatgtggttctttgaggcatactctcggagcatgttattcacttcaataatctttcctgccgggtcttctacgtctggcctccataggtagagcttgcaaggtggaatgctgacaatcacgggcttgatgtcgttctgttttgcgagttcgcacatcgagatgatgtttccaacgatgtcatccaatgcaatgtagcctgtattccgagcaatgtcattggtgcctgccatgattatcacatattcagggcagtgctgtatcacatcttttctgaacctcacgagcatctgggaggtagtttgacctgatatgcctctgcacaggatgttgttctctgtaaagaagctgggatctttatcatcccaaaggtctgtaattgaatctcccattaatatggctttgggtctctctgtcactgttctgtttgcttcggaatatcttccgaaatctgcccagtctgtttccggtggtatctgtgcgctcatcaatgttgctgccgacatacctgcaataataaggagtaatcgtttcataactatttttattgtttattttgtgatcattatcctcacaaatataaataatattaatttataatcattaattattaataagttttatatatttgttagtatgtatttattaaaataaattcaaaatgaaaagattattgacttttttggcagtcttggggctcctgttctattcatcgtcttgtgagaaacaccaattgcaggatgatacagatgtttcaggaaatgtaaatccgactcccgggccatcagagaatgagaaaccggaaaaacccgttaaaccggatcctgctgtgtatccggaaggactagacgtttctgaacatatgtatactcatagtgatggaaagaaaacgcgttactttgtagcaaaagcagattttcagaagaatccgaatctgaaatttacagtaactcagaacatgccgaaggctactccttcgaaggtttatgaatcttttgattcggattacggtattccttatgtcattaccaatgctggatattttgccggttctacttcgatgagtctcatcattgtgaataacttctgttctgtgattgctcccttgagcattacctggccaaattacgagcatccggaagcaaatgtctacgtcactagagctgctattggccagatgccggacggcaagatggatattgcttgggtatattgctgtgacccgaccagtcggcatcattatagctatcctgagccgcatcctaataatgaaaagacaaagaccttcgcaaaggaaccacctaaacaagatgcttcaggagcgaaactgtggactccggagtgggccgtcggtggaggcccaatgctggttaaggacggacatgacattgcgatggatagttattggaaggagtgtctgaacagcggcggtacagcgggagcatcccgtgttcctagaacaggtgcaggactcgataaagatggaaacctcatcctcatcgtctgtgacggaagaaatatgaagggatcggctggcttcacattgactgagttcgctgaagtcttcatcaaacatggggcggtaaaggcaatgaatctcgatggcggaggttcgtcggcaatgatcggcaagaatggagagctgcttaattggcctagtgattccggtagtggaaacacggcggtagaacgtcgcgttacttcttgcattgccatttcatgtttaccatcagaatgaaactgttgatttatatcgatagctgtggattcggaattcagaaagatttcatcagatcatagaaacttccttgttctttcccgaaagaaacggaataaatagatacaataaaaaggcgagccgaggcccgccttgaatgttttcacaacggaatgatccttattgtgaattacttttcagatttgtttcaaagttagcgatttattctttcaatccaaggaaaaagtgttaaatttattccggaaatgaactgataaccagtgtatccgtcgctctgtcgtttttggggagggatgtgatgcagtttggcacaagcatgctttagatttgcaatgtgtgtgtctttaaattgtaaccatatgaaaaagattttgggactggaccttggaacaggcagtatcggctgggccttggtcaatgaggcagaaaatgaaagtgaaaaatcgttcatcatcagattgggagttcgtgtgaacccattgacggttgatgaaaagggaaatttcgaaaagggtaaaccgatcactacaaatgcaggcagaacgttgaaacggagcatgcggagaaatctgcaacgttataaaatgcgtcggaataatctcatcgaactgttgagatccaacggatggatcgctggggatacgttgttgagcgaagacggtaaggatacgacctatgaaactcttgctttgcgggcaaaagcggcaacggaggagatttcattagctgaacttgccagagtgcttctgctgatcaacaagaagaggggataccgcagcagccgtaagacgcaaggtaatgaagagggccagctggttgacggtatggagattgccaaggaactcgatcggcggaaaattactccggggcagttcgtgttcgagcgtatggtggcaggaaatttctccgttccggatttttatcgttcggatctgcaggctgaatttgaccgagtctgggaattccagcggactttctatccggatatcctgacggatgcgttgaaggaagagttgcgagggaagaatgaaaaacagacctgggccatctgtcaggaacctttccatatagtcggtatcaaacgcgaattcaagggaaaggatctacagattgacaattaccggctccgtgatcttgctgtcaagcaaaaattggggctggaggaacttgctatcgtgcttcagaagataaattctcaactgaagaactccagcggctatctgggggcaatcagcgatcatagtaaaggactgtatttcaaagggcagaccatcggacagaacctgtatgcaaggatttctgcacatcctcatgacggcttgaagaacatcgtgttctacaggcaggattatattgatgaattcgacaggatctgggagactcagagtcgtttccatccggaacttactccggaactgagagataagataaggaattcgacgattttctaccagcgtccgctcagaagccagaagtctctgatcgatatctgtgaattcgagaaccgtaagatcgaggtggtgatcgatggagtcaagaaaacgaagactgtcggcttgaaggtctgtccgaaatcctctcctttatttcagcagttcaagatctggcaagtcatcaataacctcaaagtcaatggagaacggatggaggaagaggaacggaaaaagcttttcggtctcttgcagttctgcgacaagatgaaggacaaggaggttctcaagcggctgtacaaacatccgaaagacctggaactgaattataaggaggtgcccggtaatacgacgatgtccttgttgttcaaggcttattccagaattctggaagccagcggacatgaggatatcgacaggtcacggctcgaatacgatgaaatcattggcgtttatgaagaagttttctccgccttgggttgcaaggtgaacattttcactttcgatgccggattggaaggaaaggcattcgaggaacagccgttgttccgtctgtggcatctgctgtattcatttgaaggagatacgtccgtaaccggtgatagatcattggtcgaaaagatctcctcattgacaggtttgcctgatgaatattccaagatcatcgccggggtagccttcgattctgattatggtaatctgagtaccaaggccctgcgcagaattctgccgtttatggctgatggactggaatacagctgtgcctgtgccatggcaggatatcggcactcgaagaaatcattgacccgggaagaactggaaagcaagatctacctcgatcatctggaagaacttccgaaaaattcgctcaggaacccggtcgtcgagaaaatcttgaaccagatggtgaatgtggtcaatggagtcatcgatgaatacggtaaaccggatgaagtcaggatagagctggctcgggaactcaagaagaatgctaaagagcgggcggaccttgaagcagccatctccaagtcaagtaaggagaatgaagcgatccggaaaattctgacagaggagttcggaattcttcatccgacccgaaacgatgtaatccgttatagactttatatggaattgaaggacaatgatttcagaaccttgtattccaatacctatattcctcaggaaagtcttttctcaggcgatttcgatattgaacatatcataccgcaggccagattgtatgatgactctttctccaataagacgatagagtctcggcagatcaatatcgagaaaggtaagaagacagcagatgatttcatcaaagacaaatatggtgatgtctatctggcggattatgaagctcgggtcgatcgactttacagaaatggtgtgttcggcaagtcgaaaagggacaagttgctgatgacggaagacaagatcccatccggattcatcgagagggatcttcgtgatacccaatatatcgcaaagacggccaagaatatgcttgaggacctggtacctgccgtcgtatccacgaccggttccattaccgaccgtttgcgtgaggattggcaactggtggatgtcatgaaggaattgaactgggataaatacgaacgtctgggtatgacaagactggagatgaaagaagatggtcgtcaggtgaggaaaatcgatgattggacaaaacgtaacgaccagcgtcatcatgcgatggatgccttgacgatcgctttcacgaagagggcatatgtccagtacctgaataatcttaacgcgcgtacgccggataaggatgaagcgggaagacattttgatctcaggacattggacatcaacgatcttccgcaggaggagagatgcgccgcagtcaattatatcgcaagaaatgaattgagaaaagatggtcatgggaagctgcgtttcattccacctatgccgctggatgaattcagggcagaggcgaagcgtcagctggagcagatactggtttcttataaagccaagaacaaggtcgtgacaaggaatgtcaacaggacgaaatgtaaggctggtgagaaaacccgagtgcagcttactcctcgtggacaattgcataatgaaacggtgtatggtcgtaggatccagtatgttgaaaaattggagaaggtaggttcctcattcggcctgcagaaaattgctgcagtggcagatcaacgttaccggacagccttgacgtcaagattggagcagtatggaggagaccctaagaaagcatttacgggtaagaacgctctggataagaatccgatctggctggatgaaatgcatgcgactgctgtaccggtgaaggtgaaaacgcgtaatccggaggagatctatacgattcgcaagaaagtcggaccggatcttgtggtggataaggtcattgacgatcatatccgagaacttcttcaggcaaggctggctgaatatggtggagatccgaagaaagcctttgctgatgtcgattccaatccgatctgggtcaatgaagccgcaggtattgctgtgaaatcagtcacgatcaaaggtgtcaacaatgcagttgcactgcatagtaagaaagataaggatggaaaagtcttcaaagatgcagatggacatgtgatggcggctgattatgtaagtaccagcaacaatcatcatatcgcgatttatcgggatcaggacggaaatctgcaggaaaatgtgatttccttttttgaggctgttgcccgtaagaacaatggtgttgaggtcattgacagaaattaccggaaagatgaaggttgggagttcctgttcacgatgaagcagaacgaatactttgtcttcccgaatcctgaaaccggctttgagccatcagaaatcaatctgctggatccggataattatgttcaaataagtcctaatttattcagggtgcagaaattgtccacaggaaattatgtgttcagacatcatttggagaccaatgtgatggaggaaaaggtcttgaggaatacgacctggaaaagaattcagactatcaattatctgaaaggtatagttaaagtcagaataaacaacattggaaagatcgtggcggtaggtgagtattaagtgacctgcttatgataaaaagaacgttgtatttcggaaaccccgcttacttgtctttgaagaacagtcagctggtcgttagaaagccggaggacaatgatttgccatcgtctgattcttctatcgggaaagtcactttcatgaaaacaatcccggtggaagatatcggtgtgttggtgttggattgtcctcagattaccttgacaaatgctttgtacagcgcaatgattgaaaacaatgtcgcacttgttcactgcaaccagaaacatatgccggtcgggcttacgcttcccttggcgtgcaatactgtccagaccgaaagattccgccatcagctggaggcctcccttcctttgagaaagcagatgtggcagcagaccatccaggcaaaaatccataatcaggcgagggttctgtactacacgacaggaaaagagttcggtaatatgattgcctgggaggctgatgtcaggagcggggatacagataatctggaggctagggctgctgtgttttactggaagaccattttcccggatcttccttattttgtcagaggacgtgacgaggatgttccgaacaatcatttgaattatggatatgcaattctgagagcggtggttgccagggcgttggtcgctggtggacttctgccgacgctaggcatacatcatcataaccgatataatgcgtattgcttggcagatgatgtcatggaaccttaccgtccttatgttgataagatggtatatgatatttatgagtcagatggtgcaagtgatctgatgacgagcgtgaagacaagattgttgaacatccctgtcattgatgttgacattgacggacatcgtagcccgttgatgatagccgtttcggcaacagttgcttctctggtgaagtgttataggggggaatcccggaaaatcatatacccggaaatgaaatgatttgactcgaatcagtgaatatcgtgttatgtgggtactcgttttctttgaccttccgacagatacaaagaaagagaggaaggccgctagtgacttcaggaagagattgctggaggatggattcatcatgttccagttttccatttacatgaggcattgtccatcttacgagaatgctacggttcatatcaaaagagtaaaatcttttctgcctcctaaaggacaggtcggtatcatgtctgttacggataagcagttttcattgatggaacttttttcagagaaaaaagagcaggatcctcctgttggtttcttacagctggaattgttttgaggcagtctatctgtaagccatcgataaactctgtctaagcatattatgctgaactttaaaaagatagcggctgttatcggaaatctccgatgacagccgttttttcaaaacgtcagttccgcaacatgagttcgccggatgcttacatcttacagaggggagaggcttgaaagtgaaaaaacatatgagaaagaaaaaatccgatattattatcggatttttttcttcctggattcgttatgcaacttattataagtcatcttgttataagcatccaggtgtcgttgctgatgcaaaactatgaaatctgaaagtaattcacaaccaacacgtcgtcgtatgccactttgcgtatggtgtcgttgctgatgcaaaactatgaaatctgaaagtaattcacaactgtacaggcgcaacttgataccattaatacggtgtcgttgctgatgcaaaactatgaaatctgaaagtaattcacaacaatgaggactatcaggaaatccgtattccggtgtcgttgctgatgcaaaactatgaaatctgaaagtaattcacaacggagacagaacgatacaatggcgtaaccgtggtgtcgttgctgatgcaaaactatgaaatctgaaagtaattcacaacatcctcagttccaacgaatgttccgttcttggtgtcgttgctgatgcaaaactatgaaatctgaaagtaattcacaactgtcacgaagaaatacaaataagaaaatcggtgtcgttgctgatgcaaaactatgaaatctgaaagtaattcacaactacttaaatgtatgttatatgtttgaaaatggtgtcgttgctgatgcaaaactatgaaatctgaaagtaattcacaactgcaaggataagacatccgtagcttattatggtgtcgttgctgatgcaaaactatgaaatctgaaagtaattcacaactacgcgaagactacgcattacggtagcaagggtgtcgttgctgatgcaaaactatgaaatctgaaagtaattcacaacggattcggaaaagaagaaaatcgtggaataggtgtcgttgctgatgcaaaactatgaaatctgaaagtaattcacaacaggagtctttctttctccattctcatcaagggtgtcgttgctgatgcaaaactatgaaatctgaaagtaattcacaacacggatgcaaacggtgatctcatggctgctggtgtcgttgctgatgcaaaactatgaaatctgaaagtaattcacaacaaaaaatcctaccacctgattattcatgttggtgtcgttgctgatgcaaaactatgaaatctgaaagtaattcacaacaacccttatgacagggtgctggtaagagatggtgtcgtt

SEQ ID NO: 4105 - DNA, 9481 bp, synthetic construct
  source 1..9481: mol_type = other DNA
  misc_feature 1..9481: note = Synthetic
ttgttatattttcttatgacctgtgccaaatttttgcatagtccatctataattttgcagcaaatatagttactaatgctgaaattgcagcttgttgtttgtggcatacttccttctatggttttaccaaacgacacatgaaagagttgtcacaaattgattataagtcgaaagccaaggagttaaagacgataatactggatcaaataatattgttgtgtttttaacaatctgcatttcttacacaaacaactgttttactctataacgatttttagcctcgatatgttgcctaagacttgagaatataaaaaagcccaccgttaaggacgatgggcgaacctaatgttttcacaacggaataatccttattgtgatttgctcaaatttatatggcaaagatacagaaaagaacataaccaaccaaacaattgaagtgaaaaatttgcctaatagcatttaaatatttaaatttgtaacaacctaaaagctatttgtatattaaataccattttgatatgaaaaaaatattaggacttgatcttggtaccaccagtataggatgggcatttgtcacagaggctgaaaacgaaaaagaaaagtcttcgattataaaactcggtgttcgtgtaaacccattaacagtagatgaacagacaaactttgaaaaaggtaaagccatcactaccaatgccgacagaacattgaagcgtacagcacgacgtaatttgcaacgttacaaattacgtcgcgagaatcttatatctttgttgaagaaggaaggcttcataaccgaagattccgtgctttgtgagaaaggaaacaacacaacattcgaaacacgtcgtttacgtgcaaaggctgttacagaggagatatcagtagaagaactggcgcgtgttctcatcatgcttaacaagaaacgtggctataagagtagtagaaaagcaaattccggtgaggaaggtaatctgattgacggtatgacggttgcccgaaaactatatgacgagcatctcacaccaggacaatatacctatcagcttttatgtaaaggaaagaaatacattccagacttctatccttcagatctcattgcggaatttgaagccgtatggaattgccaaaaacaattctatgcggatgtgcttacagatgaactcagagaagcattacgtgacaagaacgaaaagcagacttgggcaatatgcgccgcaccgttaggattgaaaggcattaagcgtagtggcactgttgtagaccaacgtgttgagaattaccgttggcgtacagaagcccttaccaaacagcttcctcttgaacaagttgttattgtattgcagaaaattaatagccagatacgtggcacaagtggatacctcggagctatcagcgaccgaagcaaagagttgtacttcaaccatctgacagtaggtcagtttcaaatgaaacaactatccgagaatccaaacataagtttgaagaatcaggttttctatcgtcaagactatcttgacgaatttgaacgtatatgggaaaaacaggctaaattccacaaagagctaactgaagaattgaaacatgagttgcgtgatattattattttctatcagcgcccgcttaaatcccagaaaagtctaataagctattgtgagtttgaaagcagtcagaaagaggttgtggtggacggaaagaagaaaaccataaccattggtttgcgtgtatgccccaagtcttcgcctttattccaatgttttaagatttggcaaagcataaataatctgcaaattacaggcaatgtcatacctaaacaacaacttgacctctttggtgatactacagagtttgaccatggtacccgcatactgactgaagaagaaaagctcgacttatatcgtgaacttagcataaaggaaagtctttcagaagcagaaattataaaattgctttttggaggggaaaaaggattgagccttaattttcataaggtagaaggcaatcatacaatggcaacttttatcaaggcttgccatactattcttgtcattaatggatacaatgattatgatttctcaaagatttcctacgacaagacaattgctatcataacaccggtttttgacgccttaggctttaagtctggcttcttgaattttaacccgactcttgaaggtaagggttatgagcgtcaggacgcttatcggttgtggcatcttttgtattcgtattcggacgataactctgcaacaggaaatgaaaagcttgttgaacaaatcggcaatctcttgaatatggataaagaatctgctgcagcatttgcgtcaatcacatatgaatctgattatggtagccttagttctaaggctatgcgccgcattttaccacatatgatggatggtttagagtatagtgtagcttgtgaatatgcaggttatcgccactcccgtaggtcactcacaaaagaagaaattatgtcgaaacctttagttgacacaattcctcttcttccacgcaacagcctgcgcaaccctgtggtagagaaaatccttaatcaaatgataaatgtggtgaatgctgtaagcgagagctatggaaaaccagatgaaatacgcatcgaaatggcacgtgagcttaagaaaagcgctacagaacgtgaacaaatgacacgtgaattgcacgggcaagtgcagaaaacgataaatatcgaaaggttttacaggaagaattcaacatacaaaatgtaagtcgtaatgatataatacgctatcgactttacctcgaactggaggccaatggcttcaagaccctgtatacacagacatacataccacgcgagaaacttttcagcaaagagtttgacatcgagcatataatcccgcaagcacgattgtttgacgattcgttctctaataagactcttgaggcgcgtagtgccaatatagagaaaggtagcacaactgcttacgactatgtgcttgcaaaatacggcgagcatggaagcaatggggctattgcatataaagaacgcatagaccacctttataaagatggcaaaataagcaagacaaaacacgataagttgttgatgactaccgacgatattcctgacggattcatcaaccgcgacttgcgtgatacacaatatatagcacgcaaggcacgtgaaatattagagagcgcagtacgtgttgttgtgcctacaactggttctgttacagatcgcttgcgagaggattggcaacttgtggatgtaatgaaggaacttaattgggacaaatacgaccaactcgggcttacagagattgttaaagataatgatggacgacaaatacgacgtataaaagattggacaaaacgtaatgatcatcgccaccatgctatggatgctctgaccattgcctttacaagacacagttacatacaatatctcaacaacctcaacgcacgcagtgacaagggtggcagcatatatgctatagagaagaaagaactttaccgtgataaaaacaataagttgcggtttattccacctatgccgcttggcgaattcagagtagaagcacgtcgccatctggagaatgtgcttatatcgattaaggcaaagaacaaagtagttacacgcaacgtaaacatcacatgtggttctgatggcaaaacgcatcgtactgtacaactaactccacgtgatcagttgcataacgaaactgtatatggacatagacgtcagtgtatagttaaagaggaaaaagtgggtagtgcatttaataaggaaaagataaataccgtcagcaatccacaatttcgtgaagcgctgttacgtagatatgctgagtttggcgatgcaaaaaaagcatttacaggcaagaacagtcttgataaaaatcctatatacctcaatgacgaccacacaaaacaagttccccagaaggttaagactgttacattcgaagaagtcttcactattcgcaagccgatagacaaagaccttaatatagataaggttgtggatgctcgtatacgagaaatcttgcaacaacgcctatctgaatacggtgatgacgcaaagaaggcttttgccaatctcgacgaaaacccaatatggcttaaccgagaacgtggcattgccataaaacgtgtcaccatatacggtgtaagtaatgctatagcattacatgatagacgcgatatgcagggaaataaaatactcaaaagcaatggaacgcctacgccagctgactacgtaagtacaagcaacaatcatcatgtggcgatattcttagacgaaaaaggcaacttgcaggaacatgttgtgtctttctttgaggcaacagagcgatcacgacaacatcagcctattgtcgaccgcgaatacaacaagcatcttggatggcagtttctttttacaatgaaacgcaacgaatactttgtgtttcctaacgaaaagactggattcaatcccaatgagatagatctacttgatcctaataatgctgcagaaataagtaagaacctgtttagagtacagaagttgacttctaaagattatttcttcagacttcatttggaaaccaatgtagatactccaaaggaattgtctggcattacttatgcacgtcttagtcttaaaggtattgtcggcatcgtgaaagttcgtatcaatcatcttggacaaatagttgctgttggcgaatattaatagataaacaacaaacaccctatgataaagaaaactctatacttcggcaatccggcgtatctgtcgctgcgtatgggacaaatggtgataaagttacctgaagtggaaacagacagcaatctgcttgaaccaatcaaaaaacagctagaagtgacaaaaccagtggaagacattggggtggtggtgctcgacaatcgacgcatcaccataacccaaggtttgatagaggctttgcttgaaaacaattgtgcaatcatcacatgcgattctcactgccttccagtaggattaatgcttccgctttatggtaacactacacagaacgagcgttttcgtgatcagttagcttcttctcttccattaaagaaacagctatggcagcaaactatcaaaacgaaaatcagcaatcaagctgcagtacttgctgcatgtgccggccacaaatctcctattatgcaaagatggattgaagatgttcgcagcggtgatcctgacaatatagaagggcgtgccgctgcatactattggaagaacctgtttgatgggattgatggcttggagggttttacacgtggtcgagatggagatgcacctaacaatcttcttaattacggctatgctatattgcgtgcagttgtggcgcgtgcccttgtgtcgagcggaatgttgccaacacttggcatacaccatcataatcgttataatgcctattgtcttgcggatgacataatggaaccatatcgtccttatgttgacgaacttgttcattcaatagtaagagaatatggagtcgataatctggacttgtcaagagatctcaaggcacgattacttaccatacctacgttggatgttatgataggaggtaaatgcagcccattgatggttgctgtcacacaaactacggcatcgctatataagtgctttacaggagagttgcgacgcattgcttaccccttacgctaacttaaactcaacttcattatggaccgttttagtgaatatagagttatgtggatacttgtactttttgatttacccactgaaacaaagaaagatataaaagaatacaccttgttcagaaaaagattgcaacaagatggcttcactatgtttcagttttctatatatgtacgccattgtgcaagtatggaaaatgcagaagttcatatgaagcgagtctactcctttcttcctgaatttggaaaggtaggagttatgtgtataacggataaacaattcggaaatattaaacttttttatggaaagaaaccacaaaagcctaatgctccaggacaacaattggaacttttctaactaattaaaaactataaaaggaaatatttagaaaaagaggtgttcttcaataacgaagaatacctcttttattcaccaactttttattattctaatatatgtgccattttattgatattcaagtaaatacacatactatattggtgattctaccgcaaaggtagtgaaatttgagcaaatcacaacctgcgtgcactggcgtatatgcgttgacgaattggtgattctaccgcaaaggtagtgaaatttgagcaaatcacaacgcattgtcccactttccaacactttccaaattggtgattctaccgcaaaggtagtgaaatttgagcaaatcacaacggcttgacatccatgaccttcaggtgtgggattggtgattctaccgcaaaggtagtgaaatttgagcaaatcacaacggcttgacatccatgaccttcaggtgtgggattggtgattctaccgcaaaggtagtgaaatttgagcaaatcacaacgagagttcaaccattcctctatcttgtcttattggtgattctaccgcaaaggtagtgaaatttgagcaaatcacaaccaacggtcaaatcatccgtccgcagcggcgattggtgattctaccgcaaaggtagtgaaatttgagcaaatcacaacctgccatgctcttggtggttcgttggtttgaattggtgattctaccgcaaaggtagtgaaatttgagcaaatcacaactggcaggaaacaataccttttaacgctgtaattggtgattctaccgcaaaggtagtgaaatttgagcaaatcacaaccgctttggtgtagatacatattgaccttgcattggtgattctaccgcaaaggtagtgaaatttgagcaaatcacaacgcccgtgccttctcctcctctgtgagttcgattggtgattctaccgcaaaggtagtgaaatttaagcaaatcacaacgcccgtgccttctcctcctctgtgagttcgattggtgattctaccgcaaaggtagtgaaatttaagcaaatcacaactaccttctgcccatctgtataggattgcagattggtgattctaccgcaaaggtagtgaaaataacaatcaaataatattgttgcgtttcaaataaatcaacaatattgtttatctttgccttattaatagaactcagcccatatattaaaagttcgtgttgtcattatttcttacatcaggactccttggctatttcgatataacagaagttttcaacatgggaaattattttatgttggtcttaatgtaatgtttctggataaaataagttggacattgacggacaatatttacagggtatatattttaacgcataggctatggacaaagagatgagaaagagcccaatattcggtatcagtaggcatcgtatgggagttgacggaaaaggggtgactactcttgtcgctttcatggggtgtccgcttcactgtagatattgtataaatgctcaatgtcatgactccatatacgagaaaggccgctttttgcgaaaaggcgtgcagatgctttctccaaaagaactgtacgacatcgttaaaaaggacaatatatattttcagacaactggagggggtgtatgttttgggggaggtgagccgactatgaatgcagatttcatcattgaatttgctaagcttatccctaagggttggaaactgactcttgaaacatctctaaaatgttcatgcaaaaccattgagtctttggcaccatacgttgccgaatggattgtggacataaaagatacgaacgtgtctatttatgagaaatacacaggtgtctcatcagaaatcatacagcaactgtgttacataaaagagcttgtccaagttgacaaagttatcgtcaaagttccgcatattcctcatttcaatacgaatgaagacgtaaagcatagtatcgagattttgaaggaaatcgggattacacacattaaggtgattacttatatggaacatattactcatattactaagtaacaaaataagatatggataaaggtaaagaaaaatgtgaaatacttaaagccatccgtgcttatgtagcagagaaatatggcttggactacactccttcagagtgtaatcatcggggcaagtgtcgtggtacctgtcctaaatgtgatgccgagttggagaatattcaaaggcaattggaaaagaaaggtattactgatattaccaatgatactaaattgagcaaaatggtggatgattacctcttgaagccaacaaatgatgaagaagatagtgatatgcttgttggtgtcccggacattccagttgacacatatgcaacagaaggcatgccaaagccattggagggtgatgttgtcatcgaagaaggggtcgttcccgaccaaccgcttgagggtgaagtgtgcaccgaccctatagaaaaaagaaaactgtttctggagtgtaatgttgcaggagcagccttttacaatatagatgatatatgggatgagttgtatgaaggtgcaaaattgattcttgttcgtgaaaaagataatgcccatgatgaagaagcaatagcagttgccttggctgacgaaagcaatgactggtctgatgatattgaatgcggccccactcttggatatataccgagaaaggttaataaatcattagcgacgctacttgacatgggatggcaagatatgtttgaaacagaaatcagtgaacttagggagaatgtgccttacagtgaccgcatccatatctctatctatataaaaaataaagatgctgaagaagaaccagagcaacaagacgataggttgagaatggtggtcataacggaagaagccaaatggaaactgctgtctgatgaactgtggcaaaaaggatatacgtatttccgttggggcggtttccctccttgggaacttgacttgccaagcaaaggtgacaaagtggttttcctctataatgatggcttccagtcattcatgtatctaatgaaaacaatcgctattggcgaacaatcggtgccattccttgaagacatagacgaacttcatcaggtagatgactgtaccgtctatgtcttgtcgaatatagttggtcccgtcattatagacaatggtgagctgaaattgcccaaagaactgttgaaaggcaagtatcagccagacgagcgtgtctcacaaccattgtcggataagctcatggagatatttatcggtcatcagtattattccagcagatgagtaacttcagcaacgctcattcccgtcatctgcgaaatctgatcgttgctcagtccgcttgccgacaaagctttagccatattcttcaactgttcgctttgctgtgaaagctgttcgctttgctgtgaaagctgttcgctttgctgtgaaagctgttcgctttgctgtgaaagctgttcgctttgctgtgaaagctgttcgctttgctgtgaaagc

SEQ ID NO: 4106 - DNA, 8899 bp, synthetic construct
  source 1..8899: mol_type = other DNA
  misc_feature 1..8899: note = Synthetic
ttgctcaggtacttataaaataagttaaactaaaatgctgcggaatttaggttttaaacttattcttatcgttcgactctttacctcattagtcgcacgacaaccagaaaacttacacacaaggaataattttattaaatctttgtatcacactaatgcaaattcatcggtaaagttacttcaaataattgagacatgatggcaatgaagaaaactttaaacaccgacaaatagatggcgagcggaattactactcctctcagcttctgccacctggatatgaggataaaattattcgttataaactataccgttagataaaagaggcttaacaaacaaaaaagcccaccgttaaggacgatgggcgaacctaatgttttcacaacggaataatccttattgtgatttgctcaaattcatgctgcaaatataacgaaaagcaatcatacgaccaaatatttttcggattttatataacttatataattattattgctaaatttgtaatctattactaaaagacactgcacattaagcaacaacccataaaaaagaataatacatgaaaaaaatattaggtcttgacttaggcacaaccagcataggatgggctttggtaaatgagaaagaaaacgacaacgaacagtcgtcaatcataaaacttggtgtaagggtaaaccctctctctgttgacgagcaatcgaactttgaaaaaggaaaggccatcaccactaatgcagaccgaacgctgaaacgcagtgctcggcgtaacctacaacgcttcaagttgcgccgcgaaaacctattgacgttattaaaagaacacggtttcattacagacgaaaccgtgctttgcgaacaaggcaaccgcaccacttttgaaacgcgccaactaagagcacgagccgtgagcgaagaaataacccttgaacaattggcccgtgtgcttttaatgataaacaaaaagcgtggttataaaagtagccgtaaagccgattctggcgaagacggcaaactcattgacggcatgagcgtagcgcgtcaactgtacgaacagcacctcacaccaggccagtatgttttaaaccttttgcgcaatggcaagaaatatttgcccgacttttatccctccgacctcactgccgagctgaaggccgtttggcatgcgcaacaagcctattaccccgaactgctgacgcaagaactttttgatgcgctaaaaaacaaaaacgagaagcagacatgggccatctgtgcgcaaccgttcgatataaaaggcatgaaacgtaacggcacaacagccgaacagaaggccgaaaactatcgttggcgttcagaagctttagacaagaaaatagggttggaagagctggccatcgttctgcaaaagattaacggtcagatacatggcacaagcggctacatcggagcaataagcgaccgcagcaaagagctttattttaaccaccaaacagtggggcaatatcaaatgcaacagcttgaaaaagacccaaacacgagcttgaagaaccaagtgttttaccgccaagactatcttgacgagtttgaacgtatatgggagactcaagccacttatcatccggagctcaccgccgagctgaaacatgagattcgtgacatcgtgattttctatcagcgtcaactgaaatcgcaaaagagccttgtgggctattgcgagctggaaagcaaaccgaaagaagttgtggttgacggaaagaagaagacaataacgacaggtctgcgcgtgtgtcccaagtcgtcgccactgttccagagctttaagatatggcaaacacttaacaatgtgcaagtgtcgggcaacatcatccctgaaaaacagctcgacctgttcggcacggcagcaacctataagtatggcagccgctgtcttacagaagaagaaaagcagacattatataaagagctgagcctaaaagagcgcatgtcggcagccgaaattctgaagttgctgtttaagagcggaaaggggctgagcctcaacttccgcgaggtagacggcaaccacacaatggcggcttttgtaaaagcatgccaaaccattattgtcatgagcggacataacgaatacgactttgcaaaactgtcgtatgaaaccgtcgtgtctaccatcaatcagatattcaatgcgttgggaataaagtctggtttcctcaatttcgacccatgtcttgagggcaaagcgtttgagcaccaacctgcctaccagctgtggcatctgctctactcgtatgctggcgacaactcagccactggcaacgaaaagctcattacccgcattgcagagacctttggcatggaacacaactatgctgccgtgtttgcaaccatcacgttcatgcccgattacggcaatcttagtgccaaggccatgcgtcgcatcttgccttacatgatggacggcaacgaatatagcgtggcatgcgaatatgcaggatacagacattcacgccgctcgctcacaaaagaagaacttgacaagaaacctcttgtcgacacgttgcctctgctgccacgcaacagcttgcgcaaccctgtggttgagaaaatccttaaccaaatgattaatgtggttaatgaggtgtcggcacaatatggcaagcccgacgagatattgagatggcacgcgagctgaaaaagagtgccaaggagcgcgaacagatgaccgccgacattacacgcgccacagcccagcaagaagaatatagacgtatcttacaagacgagttcggcatgccgcatgtaagccgaaacgacatcatccgttaccgtctctggcttgagctaaaagacaacggttacaagacgctctattcgcagacatacatcccccgtgaaaagctcttttctaaagagtttgacgttgagcatatcataccgcaagcccgtttgtttgacgactcgttctctaacaaaacgcttgaagcacgccaagccaatcttgagaagagcgacgccacagctttcgactatgtgcaaagcaagtatggtgaagaaggcgccaaagaatataaggaacgtatcgactatctttatgctgacggcgtcatcagcaaaacaaaacacgacaaactgctgatgaaggaagccgacatacctgaaggtttcatcaaccgcgacttgcgcgactcacaatatatcgcccgcaaggcacgcgaaattcttgaaagcatggtgcgggtggtggtgcctacaacgggtgctgtgaccgaccgcttgcgtgacgattggcaactcgtcgacatcatgaaagagctcaattgggacaagtatgacaaattgggcttaaccgaaacgttcaaggatcatgacgggcgacaaataaaacgtataaaagattggaccaaacgcaacgaccatcgacatcatgccatggatgcgctgacgatagcgttcacgcagcatagcttcattcagtatctgaacaacctgaacgcacgcagcaacaagtcgggtagcatttatgccatcgagcagacatgtctttatcgcgatgcgcacggcaaactgcgctttatgcctcccatgccgcttgatgtcttcagagccgaagcacgccgacagcttcagggcatactggtatctaccaaagcaaagaacaaggtcgttacgcgcaacatcaactccataaaacgtagaggcgagaagaagcaaacggtgcaactcaccccgcgttgccaacttcataacgaaacggtgtatggcagcgtgcgctgttgtgtggtgaaggaagaaaagataagctcttcgttcacagaagaaaaaattgctaccgtggcgagtcctcgttatcgtgaggctcttctcaagcggttgggcgaaaatggtggcaatgcgaaaaaggcattcacaggccgcaacagtttggagaagaatcctttatatctgaacgacgaccacaccttgagcgtgcctgctaaggtaaaaactgtgacatacgaaacaatctttacacagcgcaaacctatagacaaggatcttaaggttgacaaggtgattgacgagcatgtaaaagaaattctggaagctcgtctcaaagagtttggaggcgacgccaagaaggcgttctcaaaccttgacgataaccccatttggctgaaccgcgagcgtggcatacagataaagcgtgtcaccattcgtggcgtgagcaacgctgttgccttgcacgacaagcacgacgtgcaaggaaaacccatatgcgacagcgaaggacgacgcatgccgtccgactatgtaagcacaagcagcaatcatcatgtggccatcttccgcgatgccaacggcaacctgcaagaacacatcgtgtcttactttgaggctacagcaagggcaatccagcatctgcccatcgtggaccgtgactataaaaaagccgagggttggcagttcttgttcaccatgaagcgtaacgaatacttcgtgttcccgaacgaaaagacaggatttgaccctaaagagattgatctgcttgatccaaagaattatgcggagataagtgcaaacttgtttagggtgcagaagctggctacaaaagatttcttctttaggcatcatcttgaaacaagtgtaaaagaagaaaaactcctgtttgatataacatggaagcgttgtcgttcacccaaagagcttcaaggcatcgtaaaagttcgcatcaacaacatcggacaaatcgttgccgttggcgaatattaacccctcatcaaacaccaccctatgataaaaaagacattatattttgggaacccagcctacctttcactaagaacagggcaaatggtgataaagctacccgaagtggaaagcaacgatcaattgccagaagtgatgaaaaaacgggctgaaacgacgaagcctatagaagacattggcgtggtggtgctcgacaaccgtcgcatcaccatcacccaaggtctgcttgaagccctgcttgaaaacaactgtgctgtgataacctgcgacagccatagtctgcccgtaggcctgatgctagcgctctatggcaactccacacaaaacgagcgtttccgctatcagctggaagcatcgctccccctacgcaaacagctatggcagcaaaccattaaagccaagatagaaaatcaggcagccgtattgtcggcttgcagtggcacacccgtcaaaaacatgaaacggtgggcagacgatgtgcgcagtggcgacccagacaatgttgaaggtcatgccgcggcttattattggcgcaacttcttcagcaccattacaggacttgaaacgttcacacgcagccgtgaaggcatggcccccaacaacatcctcaattatggctatgccattttaagagccgtcgtggcacgagccttggtagcaagcggcatgcttccaaccttaggcatacatcatcacaaccgctacaacgcttattgtcttgcagacgacatcatggagccttatcggccctatgttgacgaactggtttttgctattgtaaaagaacaaggagcggaaaacttgcagctaacaactacgcttaaagcgcgtctgctctccatacccacacttgacgttgtgataggaggcaaacgcagtccgctgatggtggcagccacacagaccacggcatctctttacaaatgtttctcaggagaattgcgtcgcattgcctatcctgtacgttaagcataacattataataatgtaagaaacatgaaccgttttagcgaatatcgcgttatgtggatactggtattcttcgatttgcccactgagacaaaaaaagacaagaaagcgtacatgctttttcgcaagcacctgcaaagtgacggctttacgatgtttcagttctcaatatacatacgccattgtgcaagcatggaaaatgctgatgcacacattaaacgtgtgaaatcgtttcttccagaacatggtaaagttgggataatgtgcgtcacagacaaacaattctcaaacataagtcttttttatgggaaaaagcctcaagctgttaacacgccaggcacacagctagaattattctaactcacacaaatcgagaagtaagcacacctacaaaaaagaagaactcaattttaaccgtgagttcttctttttagacaacattttttttatttctagcacattcgatattcctctgattctcagccaaataccaaattaatattgtctttgtcaccgcaaaggtaatgaattttgagcaaatcacaacgaatattaatattggtagaggagtctatagattgtctttgtcaccgcaaaggtaatgaattttgagcaaatcacaacatatgaagtgtttaattatatttataagaattgtctttgtcaccgcaaaggtaatgaattttgagcaaatcacaactgaaaatacacatacgaagctaagcaaaaaattgtctttgtcaccgcaaaggtaatgaattttgagcaaatcacaacttaaaatactacattaaactttaaatataattgtctttgtcaccgcaaaggtaatgaattttgagcaaatcacaaccaatctacttacatgccagagactgttccattgtctttgtcaccgcaaaggtaatgaattttgagcaaatcacaacagtcgttgttattatgtatctcaagacgatattgtctttgtcaccgcaaaggtaatgaattttgagcaaatcacaacagagacagatagactcaattagcgagaagaattgtctttgtcaccgcaaaggtaatgaattttgagcaaatcacaacagataatcatacatagttagtactcaagaattgtctttgtcaccgcaaaggtaatgaattttgagcaaatcacaacaataacagagtaatgcgtaagttcatttaaattgtctttgtcaccgcaaaggtaatgaattttgagcaaatcacaacaatttacaagtgattaaattaattagcagaattgtctttgtcaccgcaaaggtaatgaattttgagcaaatcacaacgggaacatatagccaaggtttccgaaagacattgtctttgtcaccgcaaaggtaatgaattttgagcaaatcacaaccacaagaacaaattataaatccaatgagtattgtctttgtcaccgcaaaggtaatgaattttgagcaaatcacaactgtcagatgatacgacgggtgcaacgtcgaattgtctttgtcaccgcaaaggtaatgaattttgagcaaatcacaactctactgctggtgattttggtaatggctcattgtctttgtcaccgcaaaggtaatgaattttgagcaaatcacaacacctccaaggcggcggcgatacgctccaggattgtctttgtcaccgcaaaggtaatgaattttgagcaaatcacaacggaatattcaaaatagagctgcgcttcgggattgtctttgtcaccgcaaaggtaatgaattttgagcaaatcacaacgcagcagccaagagttccttgcacaggtgcattgtctttgtcaccgcaaaggtaatgaattttgagcaaatcacaacaaaaaatagatagtataacataagtgatggattgtctttgtcaccgcaaaggtaatgaattttgagcaaatcacaacgtccagcctattttgacgcaacgccttgaaattgtctttgtcaccgcaaaggtaatgaattttgagcaaatcacaactaccgccgatgattgggtaattctagctatattgtctttgtcaccgcaaaggtaatgaattttgagcaaatcacaactgatattcttgctgctcattctcgtgaggtattgtctttgtcaccgcaaaggtaatgaattttgagcaaatcacaacttgtcttgttggatgaagtgccagctacaattgtctttgtcaccgcaaaggtaatgaattttgagcaaatcacaacaaagaatggtctgttgactgtgaaggttttattgtctttgtcaccgcaaaggtaatgaattttgagcaaatcacaaccttgtccacactattaatctgtgtgtttccattgtctttgtcaccgcaaaggtaatgaattttgagcaaatcacaacatccgctttcagagcattgtaaagttgcaattgtctttgtcaccgcaaaggtaatgaattttgagcaaatcacaacagatactgattttcaaccctcaaataatgaattgtctttgtcaccgcaaaggtaatgaattttgagcaaatcacaacaaacttggcttatctgttgttgctcaagagattgtctttgtcaccgcaaaggtaatgaattttgagcaaatcacaactataggcgatgaaagcagctgtcagcgaaattgtctttgtcaccgcaaaggtaatgaattttgagcaaatcacaacgggcataggtatagagtccaagtctatgcaattgtctttgtcaccgcaaaggtaatgaattttgagcaaatcacaacacacttgatcgaaacggctgacacacgtccttgcgataggccaaaatctaagagtttaatgaaagaaaccgtttcgttatccttggaaaaatggacgaaaataactttcaaaaaagttgtaacattcctcattatattgtatacttgcaccaaataagttcggaaaagtgtcaagcttggcacaaatcagaagtaattagtgcatacatgagaatagaaagaaacataataaataaattcaagaatgttaaaaaacttttcagaacgaaatatgcaacctataagttgcatatttcgttttaaatgtttatatttgcagcagaattgtatctttgataaagacagttttgtagacttttttgaggaggatttattatgaaagagaaaacattaaaatttcttgaaagaaatctcagtagcaagccttctac

SEQ ID NO: 4107 - DNA, 7967 bp, synthetic construct
  misc_feature 1..7967: note = Synthetic
  source 1..7967: mol_type = other DNA
taaatttgtggatatatggaagctgttattcgattcctgaagaattggaccttgccggtcgccatgggtgtgggcgcgatcggctattttttattcgctaatttgccgttgatggcgccgcttaaaccgatgacgaacgctttggtcgccatattgacaccgttgctgattttcgctcagctgttgcttaccttctgtaaggtcagtccgcaggaactggtcccttccgcatggcatgggtggttgttgctgatccagttattctcttgtatggtgttggccgccctcttgctctgggtaccgatgaatgtcgagtataaggaggtgttcgagggggctatggtctgttttatctgtccgacggcgacggcggcggctgtcattacgggcaagttgggtggtagcgcctcgagcctgacgacctatacgctgctctccaacctgttggcggcggtggtcgtacctttggtcttcccgttggtcgagccgcatgccgatatcagctttttcgctgcgtttctcaagatcttgagtaaggtattccccctgttgctgtgtccttttatcctggcctgcttctttaggcgatatatgccggcggtacaccatttcctggtggggctgaaggatatggccttctatttatgggcggttgccttggcgatcgtgacggcacagaccgtccgctcgttggtcgttagcgactcgtccgcctgggtggagttgtggatagcgatgggtggattggtcgcttgtgtcatccagttttatctgggcaagcgcatcggcagccggtataacgaccgcatcagcgcggggcaggcattgggacagaaaaacacggtgttggccatctggatggcctatacctacctgaatccggtctcatccgtgggaccgggcagttatgtcttgtggcaaaatatgttcaactcttggcaattgtggaagaaacagaaaaatgaaagcaagtgatgacgatcggaaatggaaggtgctgaagagcgagtatctcttcaagcggccgtggttgacggcccgccgcgatgaggtggagttgcctaacggcgcacgcaacccggaatattatgtgctggaataccccaattgggtgaatgtcctggcgattacccgcgacgggaaattcctgatggtgcgccaataccggcatggcctgggcaagacctgctatgagctttgcgccggggtgtgcgaggaacgtgatggcgatccgatggagtctgccaagcgggagttgctggaggagaccggttatggccggggtgagtggcagctctggatgacggtgtcggctaatgcgagcgccatgaataacctgacctattgttatctggcgactgatgtggagccggtggatacgcagcacctggaagcgacggaagacttgacggtgcatctgctgactgtcgacgaggtacggcaattgctgatgaatgatgaggttaaacagtcgctgatggcggcgcccctgtggaaatatttttatttatacgataaacgatgagactgagtgataattggtttacggccttttccgaggatgaggagggccgcctgatctcgatttatggccgtgatgagctgtcggagttcatggcttgtgggaaattgaaagagcgtgtggagatcacttggccctatgagggcgacgcgcacgcgatgccaaccgatgaggtggcggagcggatggaggtgtttgagacaaccgttcgcaaggtgatggaaaaagacaagctggcgatactgacggcggtctatacgggtggcaatgcccgggtatgggtattttacacacgtacggtccgtgtctttggcgagcggctgaacgaggcgttggcctcgcatgaggcctatccgatctcgatctatactgagctggatcccgagtgggaggagtatcaggatatgtacgagatgaaacagtgggcggcggattgagcggtgcctctatccgtgtgttttccgggcggaggtaggttttgtcccggtaatgggcgataacttttttgtatggcggattctcggacggaaggcttatcttcgtggtgtaaatcaataaaggcattttcactatgtataaacagcttgttcgtccttggctcttccgtattgatgcggagaggattcacggtcagattgtcaccgcgcttcatctttatcgtcatttgtctccggttcgtgctctgttccgctggtctttcaagcctaaggcggaggtgttcaggtggcggggattatctttcggcaaccgggtgggactttccgccgggttcgataaggaggcaagttgtttcgacgagttggccgatctgggttttggttttctggaggtgggaacggttaccccatcagaggtgaagggcaatccttgtccccgtattttccggttgcccaaggatgaggccctgatttcacgtacggggttcaacaatcccggaaaaacagtcgtatcgcgcaatcttcaacggaaaaggtcaggacgttacttgttggggataaatattaatacgaattgtccgacggatggtcagcgggtggtgaccgacctgctgggcctttacgacgccttccatgaatatgcggattattttactgttaattgggggagtatcgctcccgagctgttaagccccgcgttggtcgccctggcggaaagacccgacagcaagcctctgttgctgaaattaccggccgatataccggtcgggaagctggacgaggtgatcgaatacgcccggcgtcatcaggtggccggtttcatagcgaccggtcccacacaagaccgttcatcgctggtccgttccagccaggctgagattgcccgagtgggtatgggtggcatcagtggtttacccgttttcggtaagtcggtcgagattgtccgctacctttccgcccatgcgcccaaggatatgttaatcgttggtgccggaggtgtgatgacgccacgtgaggcgacccttatgcttcaggccgtcgctcacgtggttcagctctattcggcctttatctacgaggggccatgcgtcgtcaagcggatagccgaggcgttgggctgatctaaagcttcatactctttaatcgcatcgaaacaggggcaagccttgcggatgtaggggctgagctggtagtggccgatgatccgggccttcggatagtcgcgcttaagctggcgcagcaggtcgagcagggcacaacgctgggcgtaggtgcgggtatcggtcggttgattattctcgtccaacccgccctcataacagatacctatgctttgatcgttccaacccgccgcgtgcgcgccgatctggttgaccgggcggcagcggtggatcatgccgtcgcgggtgatgtagaaatgataaccggcgaagccgcgggcgacgtggtcggcccgcaacgcctcgaccgggtagtcgcggtcgtagcgcgtggcgctacagtggattaccaggaggcgtacctcccggtaattctggtagaaacagcaggctttcatccgatgcacgaggtaatgccaatggcgcccgcgatggcggtagcgacggcgataatcactttgaggatcgttccccagatgttggttctcttgttttctgtcattttgatttgttttttttaagtgttcgacatcttgttcgcgtttaatcttggcgtgttaaggaaagagggttagacaccaccgggcgagccaccgggttcctcggttgtcggtttggtgaggtccaccgtcgtctcgcccgccttctcggccttcaggacagccttggccgccgcacgggttggaacgaggttgaacgtgatgccggcaaagagatccttcagctcctcgccaggaacgaactggatattgacgccggtgatgttgttggcagtgaactcctcggccgtggcggctccctcgctggtcagttggaggcggaacttgcccagctcgccgaaatccacctggtcgcccgccttcagggcctcgaccatgttctcgacggcgctgatcaggaccgccgagacatccgcccggctgacggtcgtctggctggaaatccgtttcgacaatcctttcagggttaactcatcacgcatttgggcctgcgcgtaggccttcttcggttgctccggatcctgtggattctgagaggaatttggtatccagcatgtgagccgcaatgacattgttcgctacaaattgtattgtgagttgaagaacaatggttacaagactttgtattccgatacatatattccgcaggaaaaacttttcagtaaggaagtagatattgaacatattcttccacaagcccgtctgttcgacgattctttttccaacaagacgttggaataccgtgcggtgaatattgagaaaagtaatcagacggcttgggactatgtggcgaccaaatatggagaagaaggcgttgctgaatataagaagcgagtggacgacctgctggcggcaggtgctattggtaagtccaagcatgacaagctgctgatgaaacaggagggtattcctgaggatttcatcaatcgtgatttgcgcgacacgcaatatattgcccgtaaggcacgtgaaattctggaggatatggtcccgatggtcgtgtctacgtcaggtgctgtgaccgaccgtttgcgcgaagactggcagttggtggatgtcatgcaagaattgaattgggacaaatatgccatgaaggggttgacagaggaatggaccgacaaggacgggcgaagaattagtcgtatcaaggaatggacaaagcggaacgaccatcgtcaccatgctatggacgcactcactatcgcctttaccaagcatagttttattcaatatctgaacaacctgaatgcgcgcagtgacaagtcgggcagtatatatgccattgagcagaaagaactttatagagataaccatggtaaattacgtttcataatgcctttcgagggattcagaagcgaggccaagcggcagttggaaaatattttggtttccatcaaagcgaagaataaggtggttacccgcaacgtcaataatgctcgaagaggaagcggacgtcaggctaaagtacagcttactccacgtggacagttgcacaacgaaaccatttatggctccatacatcgttatgtgacgaagttggagaaggtgggcggtaactttgatggcgaacagatagcaaaagtggccaacctgcgttatcgggaggcgttacaagcaaggctcgaagcgtttggaggtgatgccaagaaagcctttacaggtaaaaacgcattggacaaaaatcctctttatttgaaggatactcgtacagaagttcctttgaaggtaaaaacggtttctacagagactctctataccatccgtaaggcggtggcgcctgatttgaatgtagataaagtaattgatgcgaaggtacgaaatgtcttggaagaacgcctgcaagagtatggaggcgatccgaagaaggcgtttgtcaatctcgacgagaatcctatttatttgaataaggccaaaggtattaccatcaaacgtgttgcaattacaggagtgaacaatgccattgccctgcatgataaaaaagatgtaggcgggcatatcatgctcgatgcttctggcagaaagcagcctgttgactttgtgaataccggcaataatcatcatgtagctatctatcgcgatgcagaaggcattctgcaagaagtagttgtctctttctacgaagcggtagctagagtttctttggggttgccaattatagatagggaataccataaggaagatggatggcagtttctgtttacaatgaaacagaacgaatattttgtttttcctaatcctgaaacaggtttcgatccccaggaagtggatttgactgatgaaacaaattacgcattgataagtccgaatctgtttagggtacagaaattggcatcaaaatattatgtgttcagacatcatttggaaacagccgttaaagatgtagcctctttacgtgatattacatggaaaagaatacaagcaactaactacttaaataatattataaaagtccgtgtcaatcacattggccggattgtatctgtaggcgaatattgaatatgatcaagaaaacattatattttggtaatcctgcctacttgtctttacgcaacgagcagcttgttatcaagttgcccgaagtggagtccgactctgacatgcctgatacactgaagcggcagacggaagtaaccaaaccgatagaagatatcggtgtatagtggtactcgaccatcgtcgcattacgttgaccacaggtgtgctggaagcgttgttggccaattcgtgtgccgtcattacctgcgaccgtcaaagtatgcctgtggggttgctattgcccttgtgtgggcatactacgcaaaacgagcgtttccgcaagcaacttgatgcttccctgccgttgaagaaacagttgtggcaacagactatcagggcaaaaatcaacaatcaggcttctgtcctttccagtcatgctggcgtagaagtgaagtgtatgcgtgtttgggcagaaagagtgaagagcggtgatgtcgacaatgtagaagcgagggcagctgcctattattggaaaaaccttttccctcaggttgaaggttttgtaagggggcgcgacggagttcctcccaaccatttgttgaactatggctatgccatacttcgtgccgtcgtggcgcgttcactggtgattagtggtttgcttcctacgttgggcatccatcatcacaaccgttacaacgcctattgcctggccgacgacattatggaaccttatcgtccgtatgtagacgaacttgtgtgccaattgatggttgaatttggagtacagcctgaattgaccaaaagcctgaaggcccgtttgttggccattcctacattggatgtcttcatagacggtaaacggagtcctttgatggtagccgtgggtcagaccacctcttctttgtataagtgcttcgacggtgaattgaggcggatagcttatcctgagcgatgacaacacggatcagtgaatatcgagttatgtgggtgctagtattgttcgatttacctacggatacgaagaaagaccgaaaagccgctaccgattttcggaacaaattgctgaaagatggttttactatgtttcagttttccatttatattcgtcattgtgcgagttccgagaatgcggatgttcatatcaagcgagtaaaatcatttttgcctgagtatggtaaagttggcatcctttgtattactgacaaacagtttggtaaccttgaattgttttttggtaagaaacctcagccggtaaacgctccaggtcaacagttagagcttttttgaagaacaaataatcccacttttggtgggattatttgttcttggaaactttcttttttattcctgttttttcttatagatcattggtatatatatgattatgtataatcagctgtctccaatggttcaaagatactaatttgaaagcaaatcacaactgattgacctcatttcctcgggattcaaaagctgtcttctgtaactcaaagatactaatttgaaagcaaatcacaacttgatgatctcgtcaaaagcgttattggcgctgtcttctgtaactcaaagatactaatttgaaagcaaatcacaatacctctctacattgagccatttttattgttttcttgtcttcattgaatcaaaattagtgaaataatgatgtgatcttaggaattatcccctcaaattcttgcctgttatgatataaattactatatttaaggtgattaaataaaatagagatgagaatacgaccatatagcaagagtgagttggcacaggcctatgcgcctgagattaccccgcaagcggccctcaatcggttggctgcctggattaagttgaaccgtccgttgcgggaggcgct

SEQ ID NO: 4108 - DNA, 7315 bp, synthetic construct
  source 1..7315: mol_type = other DNA
  misc_feature 1..7315: note = Synthetic
tgcctgagcagctgggcggtcagatgtgtcaggcccctcttctcaatcctctgcatctggtcgaaattcctcttctcctcatcggtgaacacgctcttgctgaacgataggaagacaagcctgttgaaaagggcaatgtcggccgtcggcatctcctggccggacatcacgaccccgcagtccacggccgtggtcactcgctggccgccgttgtcaatgtctatcttcgaccgtcctgttccatcccagaggcccttcaggaactcccgtttgcggatgtcgatgtcgttcttgtactcgtcaaggtgtacgatggcgttgctgacctccgccactgcttcggccaatgccgcatttgtcgtgctgcttatattaggagcctcgaagtcggtgaggaagaacgagaccagggcgtgtccgagttctgattttccggtgcctttcgggccgaagagattgaggatggggaaggctgtcgtaatgctagtgacgatgtcccggaaaagcgatgcgatgaggaagcacaatgcgaccttggcattgtctccgaatacttttataagcatatccgcatattccctcagtgtcacgtcatttgtctcaaggtagataaacttgcgcatctgccggtaacctccggcattgtcctgagtatcgagagccgccccagggagataatacttgtggccgccaacctcgaacactccatatttgtctacgggcttgaagttccctccctcgaagcctccgttgccccaggcatagaacccgaatcttttctgccagccaagttgcctgatttcatcggccgacggagtatccttgtacaggtatctcttgagtttggtgagttccaggttcgttgcctcccaaacaaagttcccggccgtctcagtcctggtccggaaatcagtgaacgacacgagctccgactgggcgaacttcaccacagcctcctgcttgtcggtattacgcagcacatatatacgtcgagcgttcttctcgtccttgatatgcagcacaggaagcatgatgaagtttgaccatctccggtcattcgaggcgttgacggcaccgtagtagcagtctcccttgatatagaagccatactccttcagcatatagtcggcattctcatccttggaagccttcctctcccttgcgttccttgccctgtagtactcctgcgtccagaccttgccattcttatactccttcgtgaagaggtcgagatacatctgggcggtattctcgttgtttaccaatgcgagtaggccgcaaatctcccgtatcgcttccgccttgtccgtcggggatttgagtccgtccatccttcccccgctaccaagacggacaatgagcaatcattgcccgttatttttttgtggttaaaataccatttcggggacattccaagttttctatcaaacaggagaaatttgctgacattgcttcctctccctgccctgtccacacacaaaaaaagacgaggcccgaaggtcccgccttgagtgttttcacaacggaataatccttattgtgaattgctttcatatctttcgcaaaaatataatatactattgacatatccaacaattaattctaaatttacgcacataaaccatcgtaaataatcattgatatgacacatagaagaatacttggcctggatttgggaacatcctctataggctgggcccttgtcgatgaggcagaagtcggagaaaagtcatccgttgtcaagcttggtgtcaggattatccagtatgacacgttcaccaatggcgagggacaggaaatcaaaggtagtccggccgactattttacagccggaaagacagtgtcgccaaatgctgcaaggaccaagtcgcgcagtatgaggaggaatctccagcgttataaactcaggcgtaaggttttgattgacacattgaaagagtatcatatcatcaatgatgcgacattgatcaatgagtccggtccgggcagcacttacagcactttgtcattgagggcgaaggcggcgacagaggaaatcagccttgaggatctggctaaggtgcttgtgaatatcaataagaagaggggctacaagagtagccgtaaagcaaaaggtaccgaggaaggcagcctgattgacgggatggcaattgccaggaaactttacgaggatggacttactccgggtcagtatgtatatgatgtcctttgttccggcaagttcattatcccagatttttatcgaagcaatctcgaagatgaattcgacagggtttggaagaagcagagagaatactatccggaactcctttccgaagaactgcgcaacagcctacaggggaagaacaagtcccagacttgggctatctgccagaaacctttcaatattgttggtgtcaagcgaagcctgaaaggcagggatcttgtcaaggataattacagattgaggaaagaagcggttgcgtcccggatatcattggaggaacttgcaatagtcctgcaggaaatcaatgggcaaatcaagaattcctccggctatctcggtggtatcagcgacagaagcaagatattgcatttcaataatttgactgtaggtcaatggcaaatgaggcagattgatgccaacaggcatttctcattgaagaaccagacattcttccgccaggattatttggatgaatttgagagaatatggagtgttcagagctcatatcaccctgaacttacttctgaattgaaaaagattctccgtgacattgtaatcttctatcagcgtccactgcgcagccagaaaggtcttgtcggactttgcgagtttgaaaaccgtgtcatcaagacaatggtggatggccgtgagaagacaaggaaaatcggcctgaaggtctgccctaaatcttcgcctttgtttcaggaattcaagatgtggcaggttatcaataatttgaaagtcaatggaaaggaacttgaacaggagcagaaggaaaggcttgccgatgaactttccatccgaggcagaatgactgacaaagatgtccttaaacttctcttcaagaatccgaaagacctgcgcctgaatttcaagagcgttgagggaaatgacacccaagcggcattgtatagcgcatattccagaattcttgttgctaccggtcatcaggaatatgacttctcgaagatgccggcaaccgaatcgaaggagattgtgtccagtatattcagcgcacttggctggaagacggattacctcacatttgattccactctccaggaccctgactatgagcgacaaccattgttccggctttggcatctgctttattcctacgagggagacaaatctgtatcaggcaatgacagtctgataaaggctgtctcggaacttaccggaatggaggaggactatgccagaattctttccggattgatatttgcccctgattatggaaatctcagttccaaggcaatgaggaagattttgccatttatgaaggatggcaatgagtatagtgtagcctgtgcctatgccggatatcgccattcggctaaatcccttacccgggaggaattggatgcacgagaatatgctgatcacattgaactgcttccgaagaacagtctcaggaatccgatggtggaaaagattctgaatcagatggcgaatgttgtcaatgaagtcattgccacttatggcaagccagatgagattaggatcgaattggcgagggaattgaaaaagagtgctgaagaaaggaaggagatgacagaggcaatcgccaagtccaccgctgaatatgaggggtacagcaagactctgaaggaagaattcggtattgaaaatccgagcaggagcgacctgatcaggtacaggctctatatggagctgaaggacaatggattccgtacactgtactccaatacctatataccgagggaaaaattgttttccaaggagtttgacattgaacatattattcctcaagccaaactcttcgatgattctttttccaacaagactctggaggcaagacaggccaatattgaaaagtccaacaagactgcctatgattatgtctctgaaaaatatggagaggaatatcttgctgaatatcaggctcgtatagaattgctttgcaagaatggcgcaatcagcgggacaaagaagaaaaagcttcttatgaccgaggcggatataccgcaaggcttcattgagagggatttgagggatactcagtatatctcccgcaaggccaaggaaatgcttgaggaaattgttccatttgtggtttccaccaccggctcgattactgacagattgcgtgaggactggcagctcgtggatgttatgagggaattgaactgggagaagtacgacaaacttggaatgacctactatgtccaggactcagacggacggcagattccgaagatcagggactggtcgaagcgcaatgaccacaggcatcatgcgatggatgccctgaccattgcctttacgaggcggagctatatccagtatctcaataatctcaatgccaggattccgaagagcaccttccagaatactaacactgctctggaggattacggcatcagcgatatcccgaggaatcagtgtacagctgtagttatgtcagtggaactcaatcagatgtaccgggataacaagggccgtctgaggtttattccgccaatgcctctggatgagttcaggcgtgtcgccaaggctaagctggaggagattcttgtgtcaatgaaggcaaaggggaaggtcgtgacgagaaataccaatgttacaaagaagcgtggcggtactaaccgcaaggttcaattgactccgcgcgggcagttgcataatgagactgtgtatggccgcattgtactgccggtctataaggatgagaaggttggtgcgggcttcggctatgaaaagattgccactgtggtctctggacggtatcgcaatgcgttgagggcaaggctggatgccttcggaggggatccgaagaaagctttctccggaaagaacgcattggacaagaaccctgtatataatgaccagattcactctgaggaagttccgctcaaggtcactacggtgacatatcaggagcagtttacgaagcgggaggctgtcggacctgacttgaaggttgacaaggtcattgacaagcatattcgcgagatactcctcgccaggctttatgaatatggcatggatcccaagaaggcttttgtcaatctggacgagaatccaatctggctcaatcaggagaagggaattgccatcaagcgggtcactgtgactggcaagaacaatgttactccgctgcattgcaagcgtgacaataccggggcgttgatgctcaatgattcaggggaatatatcccgactgactacatcagcaccggaaacaatcatcacgttgccatctaccgggatgctgacggcaatcttcaggaacaggtggtttctttccttgaggccgttacgagggtcaatctcggagtgcctgtcattgacagaaattacaagcgggacgagggctggactttcttgttcagtatgaagcagaatgagttcttcgtgttcccggatcccaagactggttttgacccggcggattatgatttgacggatgtggccaattatcctttgattagtcggcatttgttcagggtgcagaagttggctaccaagaactattgctttaggcatcacttggagacaacggtagcggaaaataaagccttgattgggataacgtataagccgcaattggggttgaatggtataaagggaatagtcaaagtccgcatcgaccacctgggcaacatagtacacgtaggagagtaattatgataaagcgcaccttgtatttcggtaatccggcttatctttcaatgcgtctcggccagatagtggtcaagatgccaggggagtccggagaagttactgatgaagccaaagtccgcaccgtgccgattgaggatgtcggtgtgatagtgcttgacaataagcagattacattgacccatgctttgcttgaggcgttgcttgacaataattgcgctgtaataacctgtgattccaagcatctgccggtcggcctgatgctgccacttgccgggcatacggttcagaatgagcgtttccgtgcgcagattgatgcgtccctgccattgaagaaacaactttggcaacagacggtgcaggccaaggtgcgcaatcaggcggctgtgcttgaatatgttacaggtgaatgtgcgaacaatatgctggtttgggcggattccgtcaggagcggtgacccggataatgttgaagcacgtgcggctgcgtattattggaagaatgtctttcctgaggaggatggctttgtccgggatcaggatggtgacgggttgaatgccctgctgaattacggctatgcgattttaagagcggttgtggcgaggtctcttgtgagttgtggcctgctcccgacattgggaatccatcatcacaaccggtacaatgcctattgccttgcggatgatataatggaaccataccgtccgtatgtggacaagttggtttgtgatatgaatgtggatgttatatccggagacggcttgagcagggatgcgaaggtgaaacttctgggaattccggtcgttgaggtggtcatcaatggcagccggagtccgcttatgaatgcggttttccagacgacgtcgtcactggtgaaatgcttctgtggtgaaatcaggaaaatatcatatccggatatgtagtggacagattcagcgaatacagggttatgtgggtactcgttttctttgaccttccgacagatacaaagaaagagaggaaggcctctgctgatttcaggaagaaattgttgtcggacggattcgtgatgttccagttttcaatttatatgcggcattgcgccagcgcggaaagtgccaaggttcacgtgaaaagggtgaagtcaattcttcctcctcttggtcaggtggggattctgacaatcacggacaagcagttctcgtcaatggaactttttacggaaaagaagtcgacagagccgccaatcgagtatattcagcttgaactgttctgattagaaatgtctatcagaataaaaaatcttgcttataaagcaaaaaatccagccccggggactggattttttctttttctttgatctgcgtgaacatattgtgactcaatctgttagccatattcagttgtgttcaacgtgtcaaagataatgataatgaaagcaattcacaactacctgactgttcaaccttgcagtaactgtgttgt
